United States Patent Application Publication US 2014/0057251 A1 - sequence listing, part 168

SEQ ID NO: 324737 - DNA, 538 bp, Cannabis indica
ggtatatatattttgttggcacagtgattaaagttacttgaagagaattcacgatgaagacataggaacctcttagacatttctaatgcaagatttaaaatttgtgctaaatttagcaccgaaaatgattatgttatatttggcctactatttacaattgtgctctaaatataaaataagtcaaaaaaataattaattatattaataattatttaatattcttttgagtttgtgttatatttgattttctatttacaattgtgcttcaatacatgcgatgttaaatatgttaaaaaaataattaactatattaataatcatttaatattcttttgaaaatatataaaacaattttttttgctggtttattgtttaaataaagaaaatagtatttttaatgaattaaatttgacacaagatattgtgttaaatttagtataacttttaacatatgtcaaatttaacacattttttaaaatatggttggaatagaaattttttttggtatactaaaatatagcaatatactatttttttt

SEQ ID NO: 324738 - DNA, 717 bp, Cannabis indica
ttggtacatgtcaaagttcagaataatcctaattagccaaaaaaaatattcttattttgaaaatatacatatatttttaataattttcaaaaatatcataatattttaacatttctcatatatgtttatacaataatgccttttagcattagttactaatactagcacaaaattatatcttaagattatcatgttgaatatgtaagactcactaataataataaaaaactctaacctttctcatttatcaaatactaatattattattgttaatcaattcaatttggtgtattgaattgcatttagagaaaattgatgacaaaagcagtggcatgagagccgtagattcatatcatcgttacaaggtattattaatttttttattattttcttttttaatatttttagaatttcaactaattaatgtaattagtttcaattaactctaattaaaaatatatttattaaattaattacaatgcactaaattttgaatgagacaggaagatattggtattatgaaggatattggatttgatgcatacagattttccatctcttggtctagggttttaccaagtaagacattaataattaatatatatgaatttaattacttatgtataatatctttatatattaaaagtgcctatctaacgacatttcttggtttaacattcttggtttaacagaatatacttaaaaataaaagaatat

SEQ ID NO: 324739 - DNA, 409 bp, Cannabis indica
tgttaataaaacatacttgttaataaatctaaatcctggtaaaatatttccaacagtgttatatattaatatcactttacaatatttatcaaaaaaaatatcacttcacaatatggtactaatttttttttttaagaaaaatgaataattccattaaaaaaggcacgaagctaaagagatcctgagataaatacaagtataaacaatttaaaataagttggacggaagacccggcatcaaacttgagaagtttctgatgaaagagcaaatttaactaaagaatgagaaagaacattactagctcggttacaatgaagaatttattctactttttgaacataattcccactttttgaatagaagtccaacgtgtaatgttaggttatttttagtattaattttagattaa

SEQ ID NO: 324740 - DNA, 1044 bp, Cannabis indica
acaatctcaatagttggaaaaaaaaaattaacagtttaaaaagttcaggaacataatttagtacatgtcaaaatttagcgacgtaagtcctaattagcacaaagagatatatggatgcatatttttttttattttttcgacattaataaatttattatagctatttagaattaaataatttattgtacaaaaaaaaagactcaaacagtttattaatttaatttctttgtttgaataatttactcaactaaatagtttattttatacccgtataaaataaatgacatgtattctattcatttctagtgtggtaaattatcacgaatttttcaaaagattagaattgtaactatttgtttagttaagctcaattattttatattatattttatacaatttacttttttttttttttgagaaatagaattcattaaacaatttaacgattataaggaaatgacaaattacgctcaattacatgactagtataagagggtgacactccaatccacatagaactaactttatttttcaaagcataatttactttttttttttctttagagaattaattttttactttattatttttaacatttaattaataggaagatttaaagatataatattttcatgatataaaagaaaatataaagaattaaatacaaaaaattgaggttatagtaaagtattttaaagtatagagaaagtagtgctgagaggagttgctattacagcttaatttgacaacaaatatttgttcgaaaagtaaaaaaataaaaactttctattaaagtggcccatgttgaagaattctatttttctattaaactttctattaaaataaaattattttaaagaattagattataaaattgcatgttgaagaaatacaatgcgccactttacaaaataataatttaaaaaacaatgggcctgactattagagcaataatagagcttaaaacttggcaacaaacatttgttcaaaaaataaaaataaaaggggtaagttgaaaaatgcctcttttattcatcaattaa

SEQ ID NO: 324741 - DNA, 799 bp, Cannabis indica
gctttgaatttaatatatttaattagtataattgaattttgttacataagaaagaataccaattgatgaaaactttacttaatcacactcagaactaactaaagagtaacttttcactaacaacacacaaatgatgcttgatatatatatataatagattataattaaaaatttatatatttaaataaatttttaaagcaatttatttttaatttttgtttaaataataaaaaaataacattttttcaccacaccttttcagatcatcaatattgctaaattactagtcagtattcttataataataataataataatatttgtatttcttttttgtaatgtatttgaattttgattaatttgaaattgaatgcactatatatatacttcattatgtttaataattaaactatgtgttttctcatcaacttaaaccacttacattgtgaacaagtacacatacatatagacaaaatttggatagtaaaataccagataataaacaaatacacatttcaacaaacttattattattattaatttctacatcaaaaataaaaaaacaaaaaccctaaatatatcatagagagatctcatcatcatcatcatcttcagtcaaaattgaaatgaactcaatacatcatcaaataagtccataccaatcatgacatcaccattaatgtggtgatggccgtgatgatgatgatcatcatcagattccaaagcaggcgatgatcgatgatgatcgtcattgatcatactcatcatcaaatcatcatgatcaaaatgatgatcatca

SEQ ID NO: 324742 - DNA, 672 bp, Cannabis indica
ttttagtaattgaataaatgttatatttagtgtaattttattaaataaaaaaattaagtgcgttttttatgccaatatcattacttttctttttgaaattcattactctttttctaatcaccgtctactttatacttcttttatcaatattcatttaaatattttctttcatcattttcttacacttgactttctctttcctggaaaaaaataaaaataaaataaagtgtaaaacacacttttatttttcattttttaaaaaataactaaatacattttattttattttttaaaatcagaaaataaaaaaaaataaatgtaattcaattttcatgttttaaaaactcaaaatcaaaatttttaaatagggtattctaatcttgttagtccatttttttatttattattttggaataattaaaattgttagttttacaataatcacaacacaatctgaaagtcactacagtcttttttttttttaattttttttttattagaagcaagtcactacatatatagtcatgatcctgaaatgatcttgaaagaccaattagataacacgtagcccgaaatagagatcaacttagggaatgtatgcatgtctttttccttttcgtaaattataaagaatatcctcacaaaagctaaaaaaaaaaaaaaaaaagtaaa

SEQ ID NO: 324743 - DNA, 537 bp, Cannabis indica
actttttagtcacaacatagaaatgttgatttgtaattagtcacaactattttatttatagacacaaattttactgtgagtaaaagtaagattttttgtagtcataataatacaccgttagtaacaaataaaaatactattttatgcctaccttgacttcacatcatggaataaaattaatattataatcaaaataaaagataaaaaactatagcaaaccttaaaaataattttttttataactttgtttctatttaagagatattggcacaacattacttaaattacatattttttttttacgcgactcaaattacatatttagttatacttaattctacaaacataattgttggtagtaaaatttttcaaattccagctccgttttgctctctactattttattagtaagtcttaggctaattagtaatttttctccccgaactttgacatgtaccaaatcatgcccctaaacttttttggccgttaaaaatttcccccgaactattgagattgttaaatttaaggacttttgtc

SEQ ID NO: 324744 - DNA, 1483 bp, Cannabis indica
aaaacaagatgcaccttgttgatataggtagtaccaatcaatccatttaagccatcttcaactgtggagttccctacctacacaatcttagaatcatcccacttgaccttccccaggcggtgtgagattgcacagcttacctggtatttctccttagtccttacggatcacgggactactgactgtcacactaaatttaaggagtaaaaattttaattagcttttattattattattttattattaacataatttgtagagaaacacatggacctaatactatgcttctaagaaaacaacaatttgttgtgaaaattattatttaattcactagatgtgccaccttcaccaatttttttattattttttttaaagaaaaaactaataaaaatttcacaaatgttctgtttttatagggtgttgaagattcaatatacagtccaactttattgttcaaataaataaataaaaataataatatagtccaacttttaataacttataattttgatccttttccctcatctcaaacaccatacctaataagttatttaaatatatagttaaaaaaattaaaggttgacttttttttttttacaattatttgaaaaaaacataaaagaaaaaacaccatttatttacatttaataaatacatattatttttacttttttttttaaaaaaaaagacttcaattgggacctcctttggcaaaaattatatgaagataaatcatagataatagaatatgtaatatcaaaataaaactatttacttattatttgtaataatcacattaattaattaattttttcaatagatccaaataatgtatactttacagaaaataatattaaaatatcaaaattttggaagatttaaatctataagaaaacaacaaaaatttggaaaagcaaaattgagaatttggtggcaaatctctaaataataaatatcttatgagaagagattattgaaaataaaagtaatttaataaataaaataaatatcttctactagagatatgacaaaaagaaaatgtagaaaatagagaaagataatattctaaaaatgtatttttatatgctgaaaaaaaattataaaccataatacaatacatatatatatcgtatatcttctatgtatattatatatttttgttaactttcttcaaaaaaaaaaaataataatattatagaaccataattgcataatggagctcacaacaataattgagtaatgttattttaattattattgtttatttatttatttaatctaaaaaaaaagtaacttcaagtggtattgtatattattcattatctcacaccactcaattatctcttaataaattaaggttagaaattttagttaaaagaaaagagagagacccttttctttaacaaatcttaaaaagctggtaaaagagattttattttattttattttgaagagaatatggaaaaaaaaaattaaaaaagaa

SEQ ID NO: 324745 - DNA, 689 bp, Cannabis indica
aactttaatttatactaaaatattataaatttaggtgtctataaaagttaatcacatattgttttatataaaaatattgtataaaatacaatttaatataatactatacaatacaatacggtgtaatacggcgtactaaacgaactctaaaattttattttcttaaaaaattatgtatttggccctccttaattatttttttttttttaatcttttggccctccttaattatttttttttaatcttttggccctcttattcttaacttctgcctctatccctgatcatgcttgtgttttcttttagtgaatagttaatagtaacgacgaaagacaaaagcagcaaagcaatggagtccaataaggaaccacaaaatgtttgataattttattttctttggttgaaatttctaatcagttgataattgtcggtgaacagttacacaatatgatatcattaatgtagctttgggtttggcttcttatgtttgcttggacaatcaacaatacaagaactctgttttgagtgtcttgttgttctggagaatatttctgtaacctgctgtggctggacattcatagagacatgttttgttttctttggttgtctctaactaactatgaattatattatgatcatctcaagcactcaccactcaccactcaccactactcggatagtccaccaca

SEQ ID NO: 324746 - DNA, 487 bp, Cannabis indica
ataaccaactgataatttccaaattaactaagcgggctttacagacttggacgggacatgattacccttgattgtgccattgctgattttttttcttgtattagatgacagtcgatttcaacgtgcttggtatgatcgtgataaatgggattctgtgatacgtgaagtgcagcattgttgtcacaaaacagagtggagggaagtcgtatgctaatgttgaattctttgatgagagaatggagccaagctaattcaaaagctgtattggccatggctctgtactttgcttcagcagatgatcgagacactgtttgttgctttttagatttccaggagatgagtgaattccccaggaatatgcaataccctgatatggatcttcttgtatctaagcaggctccccaatccgtatgagcaaatgcttgaagttgaagaggtgcagtgttaggttacttttagtattaattttaaattaattttagtatat

SEQ ID NO: 324747 - DNA, 833 bp, Cannabis indica
taattttttagtcaattttcgtactcgaaaacacatactagaatatttatttttttctaatttctttctcaaggcggtgttcattatagttataatattattcctgtaaatttttaaaaaattactgaatagtaaaataataacgaaaatagagtttttgatatttcagtctaccacgcgtgttaaaaaactttaaaatctattttcgtcactgtaaactattcgaatctttttcaaaaatttaacaaaaataatgtcgtaactgtaatgaataccgctatgaaaaatatataatttgaaaaaaaaaataattccgacatgaattttcgagtacaaaaattgaacggtaacaatcctcttaaaataatcccacttgtttcacatggaatgaagaagacaattgctgaataaacctctacttacactgatatttgttcatcaagtatttacaaggaaaattacacatgcaaattactattgtggcctttggccttctacatcttaatccttaacaggaattagttagaatggattatgacaggtcgtcaatctccacctaactaatttctgttactaacatctaaagaaatcagagaccttcagctatacatatacctactacacaatccaatcgagctaaggttgaggagattcttcaagatccaggagttgtgatccttgaagaagaaggatagaggctcgtacatacacagaaaaaaaaaaaagacttagcaaacagagagagaaagggattaaatacaaaatatgtaattaaaactagagattaccaatcataattcatacctatgacttggaatctcatccttgtaact

SEQ ID NO: 324748 - DNA, 655 bp, Cannabis indica
attcatttggttcggtctcaaatggtttggtccatagtttgaaaccgcagattattgtagattatatgaacacccttatatatacctcggtatagtactatattggttctattgttacaacatctctaaccatactaaccatctttttccatctcactgttggaaagtatatttaactatgatcttatttttactaaacaagtatgttaattattactaatctaacatcctaaatatagaactttaaaacaattcaaatcaaacacataaataaaaatttgagaaaattttacaatgattgcagcgaaattaatgtctcctcccgttcagcgacatacccatttgtactaccataattgtcataatgaattacaattttcgaaaatatatgaaattaattacgttatgtacactcgtggatttcctgaaatgctaggaagtattgattgtatgtattggaggtggaagaattgtcctattgctgggcaatgtttatattctgatcacattcatgagccaacaatcattttggaagctattgcttcttatgatcttttgatatgacatctattttttagttttaccaaaaatctccacttgttagagcatctccaaggagacattaaattggtattacactatcactaaatttggt

SEQ ID NO: 324749 - DNA, 713 bp, Cannabis indica
ccaattgaccgcctagcaccatttcgaaccaaagattgggcttcccatatactccgccaaataaagcttggatactgtcctagctcagcctgtaaaaaagaaccatttgggtaataccgagctttataaatcctttccaccggcgaacctttcttaatgagtaatcgccaaccttgttttcctaaaaacgaaagattataatcacgaagatcacgaaatcctaacccaccaacatgcttatgttgacaaaggcgcctccaactaaaccaactaacacccttacttgtagacttggattgggccttccaccaaaactttgtcagcattccttcgagacttgcacagacttagtcaaagaacacactcatagcataacttggtaaagcttgagcaactgactttaacaacacttctttaccatcttttgacaaaaatttagtttcccaactaaagattcgtttcctcattttttcttttaagaaaccaagaattgcattattttcctccccataatgcaaggaaagcccaagtataagctatcttcattagcctctacgaatcccatatttgcacatacatgattccgagcctcctcaccagtgttcttactgaaaaagactgaagacttgtcaaaattcaccttttgaccagacgccaattcatagctttgttgtaatattccgaaaaataaaatgatatttaaatagacatat

SEQ ID NO: 324750 - DNA, 717 bp, Cannabis indica
cttgctcatttcatagttgtttactactaagaaagaagagaagagaagagattatgagattctttggtccatttataaatgtaacttactgttctaagaatgacgaaatttctaaaaactgtgggttaatcactttgaagagatcagaaaggaagagaataaaaagaagaagaagaagaagaagaatgagactaagtgagaagtttgataggctccaaaagcttattcctggaggtcaagggctggaatcagatcaacttatgattcaaacaactcattacattatgcaattaaggtctcaactttgtgtacttgaatctcttcttaaactacatgatgagacatagtaacttttgctttatgtgtatatatgtatagacattctattgtactttcgtttatgtgtttctttttgtgggttttcatttgagtgtgtaataaatttaggattaaatgtttgtacatattcattgtcagtcttggcacgtataaagagattagttgttaaagatacttgtctttgtagctttattaaaggtgatcaactcaatggaaattcctgaactgagattaattgaaaaacaaaagtacttaaactgttgagaagtcaacaacaacaacaacaagagagcagaaacgacaccgaattgatccaaaatagaaaacacatcgaaacaaaatttactatgaataaattagtgcatgtttgacatcata

SEQ ID NO: 324751 - DNA, 667 bp, Cannabis indica
agtgaccgagaaggcttttcaacaaagtttttcaacaaagatttcaagaagagagacccttattacctttattagaaccctactggaaattcataattaatccatcaatttttgaagcaaggccttttgaaagcttgatggtttgcataacgtacaaatagatggatatgcctactgatttgatgagagtggctttccctgcctcaatcaaggttttagccttctaaccttgaagtttagaggagatgttatccaaaataaatgaaaatcccaatccttttaccttgagcaaaacaggggaaggcctaaataatttgtgttgacgcacatcccctcgaggtccaacgcttcgttgatacctcgcttcatagccggtgtagtgttatgattgaaaaaaattgtcattttcaatttattcacctgttgctcagaacaagaaaataatctttccaaacaattccaaaaggccttggtttctccaatattagttcttcccgcaagcatcaacttatcaacaaagaatatgtgggaaagtctaggaccccctactaaataaatacccttaatctgacccaatgaaaatatcttcaaacttctagaaaggatttacgcaacccaaataaaaataggagtttttataccacatactgaaatttctaattttttt

SEQ ID NO: 324752 - DNA, 754 bp, Cannabis indica
ttttattatatataaataaaatgtgacctatgaatttctcataaaccattttatttttaataataaactatcttctttttaatataaataaaaagttacacattctgttatataggcacactttacatagaatagatatagaggtgataagaaaagaatgaatgatattgattttccaacacacttaccacatttaaaaaatttgtgagttagcagattttttttcttttaacgcaattaaaattgacagtttttcctaaatggttttctcataattcatgaataataatatttgtaataaatttataatgtaaaacaagatcatcggtacatacacgatgattgggttgaagggaaactatcttgaggtgagtgacaaagttaacgaaagctactaatcagagataacagataagtgaatttaattattaggatcgaaaacacaatctgattctgacccaaacttgcataattaaattagaagaaatagacttctcaccacccacatccactcgacaattactcggagtctaatatggataagacctacctatttattacaattggtttattaggtgtattagtttgaatcaattagttgttaattgttgaagcatgaaactcatcgggctgattaagttgaattaacttaaacataaaaataaaaatgtgggaattaattcacacaaatgtttttgagtaaattatagcaaatggtcctaaatcataggactatgttagtatatgtcctcat

SEQ ID NO: 324753 - DNA, 1389 bp, Cannabis indica
ggtgctctactgtgcaggaaagggtaagactgacgttgatcagccatgagtacaggagctggacgaagaatgtacatgttcaggccacactagaccaagcgggttggggtctaccagtgatgtattttgagactctattttgccgcttaggtcggccaaaggaaaagaacttgtaatagtgttttgtaaatacttttgggatcccaacttttgtaacttttaaattataagttttaaattattacaagttattttcattccgtttattaataaagtttaatttccgtgcttaattttctagtaatcccaattaggggattagggtttcataagtttattgtgaagcgtgcctaattatttagggcgttacagttggggtggtaaacgagccttaaaccataagtcaatattattgaagctctttagctatggagtattttacacaagtagtttttgccaaatttctgtagagtttctagccaaagattgcaaccttttgcatggaggggtaaagccttatttataagctgaaactgaattttttgagtaaacccagacccgttagggttttatacatgaagtaagcccactgatggggtaaaatataatataatattgacttaaagtctggtaggtgagacccaattgagggataacaatcgtccatacaaaataatacagtctaatgtcgacaggtggccatgcgttgctaatcatgtatagtataagttagaggagtgggcgttggacaaaaatataggttactttttgtgttgtgcgcctttctcaagtctgatgtgggggacaaacccctaattcggtgggattctgtgtcagagacgtgccacatcagacaggcttcagaaggttgttcactgcgacacctcttaacccttttgggatacccatggtgtatctatatatgtagtttttttttggacatttggtaatttggttgagttagctctctggatttgttgatctgttttagcccccaaccaagtcttaattgaatttggaacatccatcttttggcttcgttctttggctggaccatccatcttttggcttcattctttggccggaccaatatttttttgggccttgagaataggcctacaaattgatttggcaacaccaaatgacatgtgttgcttgtccgaaaattcagataacatttacccccaagcctttgcgctcgcaagtcatggaggcttgcacccactatccaaacttgtagtattatacgggacaataaacaaattaagccctttgaaatttaaaagtgaaagggcgtggagacccactgtaacgccctaattctaaggcacgctacagtgtttttttcaaatattgtgcaatctttgctaatcaaagaaatttctcgaa

SEQ ID NO: 324754 - DNA, 803 bp, Cannabis indica
attttttaaatgatagttgtgaggacccaatatcaatccactcataatatttacaaataaatacatgtctttatgtggtccttggttggttgattcaagtatgatgaccaattaaacctcccaaaaaataaagccaaaaaaaccccctcctgatagggatgccactcagtaccctctatactctatgtctccatccaaaaacaagtgacagctgggtgatttctgtcagcacacgtgttataatttaattaggacaattaaaatttttcagcccataaaaattaaaaaagaataaaagaaaaaacccaaaatttccctttctcttcttcttcttctctccctaacatttttcttaaaataaggaattatataataaggtgagttgagttgggtgggcaaggtagggttggtccccaaattaaagtttaatttgtctcagttaaaaacacacataacataatgttactactttctcttcttcttagaacactgaaatgcaaaaaatatgtacttgtggtgaatatattatcacttttatttttattataaggatatttttttccaagtatttgaaatttatcgaaaataaataatatacaacgtggtataaaaataattaatatatttttttttatatgagcaaaaataatgttatttatatatataataaattaatatttttttttttgagaaaatactaaattagtatttcgttagttatattattatttttattttaattatgtatattttttttattgtataattaagtttttttaatgttattcaataaataacatcat

SEQ ID NO: 324755 - DNA, 725 bp, Cannabis indica
tgagcatgtatgccctaaaagctctgtggcagttagtctctttttttctttttaactgtattaactaccttattttttatctttatccccaatattccctcctcgttttgaatctctgactattaaccgttttcctatatttacttaatttgaattgtatctgttccctcctcttcatcctttgaatttctgcacttcttcttgctgtcttcatgcaaattcgctgaccttcttcatggaccaccttctgcacgacatgaaccatactttaatcctcaccgaatctgaaagagaagtgcttacacttcctgctgaattccacaatggtagcccctctgaatcgaaccatgtactgtatgctcgggttgtatcttcaagagacatcaataggaaaacctttcgaataaaaatgagtgggttctggaagggtcagtaccctgctacgattacagaccatcattctggcctcttccttgttacttttgggtgcataggtgaccttaagaaagtgttgttgctggaaccatggcattttcaaaatcatctcattgtgttatcctcacctactgcccttcaatcaccaacatctgaagctatgtcgctcactcctttttggattcaactgcataggctgccttttctaagtaagaccaaagctatggctgaatgggccgggaacctccttggtacttatgttgatgttcatgaagattctttgaatgagg

SEQ ID NO: 324756 - DNA, 1199 bp, Cannabis indica
caaaagaatctcttctcttgtagcttttctttcgctttataataataaatattcaatacaatccttccatcaaaataaaatgtattattaatacaatccattcaaactcctcataatttttatttgttttttcaagagagaaaagaaaaaaagaaaagaaagaaagatggtgtttagtggggttaaagtgataactgtgatttttacgtggtttgacttgctgacgctttttattcgaaaaccgtacgcgtaggccgttattgaaaatcgaaatatatatatatatgcatttttcgtttttcatacaaaatttaataaaacaaatatacaacaagttttttttgttaagatttgtgatttattgttaaaatataactcatatggattgtgtgctaatttaaatttatcacataataaaaatttatctaaatttgaattagaatgtagcattacaataaatacaaaatttgtattataataaatgtatggaaaatttgatttttcatccatatattaagttaaaattttaaatttaaacccactaatttttagttttagttcaaaaatactccgatctcaaaactctatctccctctttccctccttctcatctccgcccaactcatgaaagatgttagacacaactgatatcttttatcatgaacatctctaaaagcagacactacgtttaaaagtgttgaaaatgtcccacaatcaaactaaaaaaaaaatatttaatagtgatgtggagattttcaacacttttaaagaatgctgcatttagagatgctcatgataaagggtatcacttgtgtctagcatccttcacggtgtcatattattattggtgtaattaagaatcgtattttaaatattttaatgtaataatttttatagaatatcactaaccaatcgtaaggctttacttttaggtggtactaggtgtgtgtcttataacaatactcttaggactcgtttggtatgcatgacaagactacattagacaaactaatttgtcaaatccagtgttgggcatgctagttgtctggataactaatctagctaatctcatctatatagggttgtgtatctaatccaacagggtgggataaataatctcatacaagagattttttttattgtttttattttttaattttgattttgttaatatattttaaatttaataagaattttaa

SEQ ID NO: 324757 - DNA, 1945 bp, Cannabis indica
tttatttttttttatttttaaaacagtttttgttttatatttttatgaaatttttttataaaaactcttataccaactaacggagtaacttaaatcataactaaaatctacatagtaacccacataaaaattacttgagaaactaccagaacaaacccaaaccgtaaattttttttaaaaaaaaaagttaaaaaatggtatgtagggtaattttttttaatgtgtttgtcaatatgaacaagtcttggctagctccttgtcaatagtttcttgatgcttcattatgttatttttttggcaatctggtctttatcgataggattttggcaatttctcaatgttttatcgatgattttttgttttagttttagcatttgacaatctgtttaattatcgatagtttatcgatgatctttcgacatttttttgataggttttcatgctaaccgtggttttttttttttatgatttgtagattctttcaaagcttatagttctatcctcagagtatttacatgtcgtgactgtgacatttagccaattttgataggttggtactctattcttttcttcagtgttatttcacctgcataaaatgaaacttattgctgagaagacggaagatatgtggtcttacattggaaagaatgagattagatttgtgattgttaattaagtttgcactaattacaggccttaacttcacacaggggctaaaaaatgaggagaagagtgctcacttgggggaagaccggttgataaatgtctatttcaacaggtttgatagtgtgaagatagaactacttcgaaatcaattcttaaactgtgagactctggaagaggtgcacaacttaggtttgtgcttatttatggaggcagtgttactgggacgtgagggtaacactcacatttcgtctgatatacttagatatgttgaatatcttaatttatttttcaagattctttgggggaagtacttatctgccacacttatgtccaccctacaaaaaaacatgttcaatgtaacaccctattctttggcatgctactgtgactttctaattactgtacactcctttactaataaaattttttcttaaaaatcgtatcaaatttgaactttttaattaaactttaaacttgtaattatatatctgaacataaaagtcgggaacccatttctaaaatttataaacataatcaaaatacattttataaacatgtcgcacaacgactataaaaataaggcccaagtcgtcccaagactgaactctccaggtcgaaccatcttgacatgtataatcatctccgagctctggactcactattgctcagtcttagcctttcctttactacacatgtaaacaatatttgtgagtcgacagacatagtaagaaaagcatataacaaataacatattaccgacttgtatttaagcgctcatacacctatccacaaggcttaacagatgatcaagaagattcttaacagaagtacaacctctgtaccacatgcactaagtactcatcatgtactagtattggtagggatgaaccgtaccctcagtactactgggtgttgtacgacatgcactacgtacttgtctgtactagtgttgataacaccggatcataccctttgaacatcatatattgtaccaatgtaatttgtaccactactgtactagtattggtagtatatgattcacataacatagcatgtaatttatgtacatacacatgcatatacatgttttatactaatattatctcgttaacaaattcaagtgtgtcggtcaatctgaatgaaaaaatcatgcattaaacgaacaccctatgtcacaatcacataaatgggtaaacaacttgctaaaactttctcggggacctaaactcaaaactaaaaatttttctatcgataaatagcatggcaatactctaaatat

SEQ ID NO: 324758 - DNA, 1859 bp, Cannabis indica
actataattataactattgaaagaaaatattgcttattggagtaagtaaacactttgtattgtccctaaagatcaacgtgcatatattcgagtatctttttagttgtgtgccttgctggagtgaacttcagtttatgttgttttcctaaaacacatgcttcacaaaatggtaaggcacaagaatttgaatttttaattataccttgtttgtgcagttctttgaggccttgttcactgatatgtccaaaagtgtgtgatgccacaacttcatatttaattctagccctttcaccatactatcttctcttgctagaatagtttctccttggagaacatgtaaaccatttatcttgtcacctttcattactaccaaagaacgtttggtgatccttaggctttcgtgcatggacttgtatccgtatccttcatcttcaagtgcacccagggatatgaggtttcgtctaaggtccgggatgtgtcgtacgtttgttagcaccttgattctgccatcatactatctgatagccacctttttggttcgaatgatcctgcatgaatgatcattacccattagaagtttacctccatcaactgacttgtaatcaaaaaatgactctcaacgcagacacatgtaataagtgcatctggagtcaagaatccactccttgttcatatatgactccgagatagagaacagctctccatccgtggagcattcgtccctatcttctgcgattatagcaaaatccttctcgtggtaatggtgtcgaaagtccttcctatctccattgtgagatttttttaagccttattgcttcttctacttcttgcaaaacctttacaagtgtccagaccttccacagaagtgacagttccttgttttcttctctctcgacttagatcttgattgagagtgatggtatttactcttcaaacttattttcttgggtgatcttcctcttgccaaatacacttcttctttctttgataccttctccaactataatttgaaatctttcgacttaagtggggcaagaacatcttcaaaagcaatcacgtctctgccatacttgatggctaccttaacttattgatatgcaattggaagtgatatcaacaggatgatggcctgcctttcttcatcaaccttgtgatttatgttagccaaacatacaataatctcattaaatctatcaatattctcatctaaagaaagggacaaaatcattctaaaattgtataacctttctagcaaattaatcttgctagcaattgatgtctttaagtacaagttttccaatttattccaaactcctttcaccgtcttttctgcgatgagttttcttcgaacactgtttgaacctattcttctccaaggatgaaaggtgtacacttaaaaattcattctcctctattttgctacgatgataatgctcgttgaaagaaaatttcttgttgataagaaattatattttgagtgatcatcatccatatggtgttgttaacattcttcaagagagaaaatgggcaggttcattggttaatttttctggttatgtagataggattgttaaagagttgtaggctagtctcaataatgaaattgttgattctaactctataatgttttgtaaagtgtttgtgagaggtcattggttctctttttcaccacaatatgtagcaaatattagaatactgtaaattttgaatttagccctaattaattcaagagaatcaaacaatagaatatagattagcggaagcgtacctgtgtctatagaagcaacctttaaatggtatgatcttccaatttgcatcaaaacctttctctgaaaccttatctcttggtgatggggata

SEQ ID NO: 324759 - DNA, 1678 bp, Cannabis indica
cccattttatttttggtgaagcactatattatagcttgtgttttgtgtttagatgagacgaggatgatctggttttatggacgacgggaaggagctaaattacctaaataaccttggttgttaaataaaccaatgtcacttatatattatattaagggtcaaattggtcagtggtcaccttcatcatactcatagtgacagcgaaagcttattctatagttgagtcgcttaaacaggcggcaaagcaaagtctataataataataataataatattatctctagaatcttttttttttgttcaatgccgataccacccctatgtatctaacccaggatggggattaggtgagggataagcttgacttttcagaatgttatttccaacatctcattatgcctttgttttttttggttttgaagggataataatgggaagaaaaataataattatgaattatgagctctaacgatctagaaatgtcagacaccacaaaaaagaaagagttctacatcttcttctttttcttttgtaactatttaataaatgaagattctttttgcaaaaaaataaaaataaatgaagattctatatatgatatcatacatttaccgatgaagttgtctagagttttgattcggaaaattttttctgaactatactgcattataactcttgaataaagagttatttgtcatttttctttagtttaatttgtgtgtattttacttatatttagtttatttcctcttattttgtgagaatatatgttattttgcatttttatgttatttggggtaatttagagttgttagtgaaaattattaaattttatttgagttttggtgaaggaaagagcttaatagagaaattttttcttcaaaaattcattcagacccgattgagttttgtgatattaaagttcatatttttcgtgttttcgatacctaaaacctacatggatctccttattattgcatgtagattatttttgaattgaaaatacaaaatttagtcgtcggaattgagagttccaatcgggtatgggtcaggtccgaacgacccgagttgcagaaaacgggtcaaagtgacctactcaaagacttgaagacgacctaaacgacaagtcgtgttccctccatattggaaaacgacatgtcattcccccttcattactgtattttttgtggtttaaaaacaatgtgtcattttcttaaggataaaaacgacgtgtcattttcttggtagattttttcaaaaaaaaaaagaaaaaatttaaaaaaattttaaaaaattgaaattttattattttgatttattttggaatttttttattttcttatttttgttaatttagtcaattaaattacatttgtttaaattttccacttttatttaacacatatttttatatatgttatttagtaaaaataattatggaaaatttttaatttggtaaattaattatgtaataccttagcattaagaaatagattagcaaaaccctaattagatcattgtgaataattgaggaattataatattatatcgttcaatatatgagaatttatttgattaattatatggtaagaccctgttggaaagtcaggggcattttagtaattgtgacccgagaagggtaaaatgatgaattaatttaattacgtgcttaatggaa

SEQ ID NO: 324760 - DNA, 672 bp, Cannabis indica
atgatatattatttaattaaaaatatacataaatcataaatcatctagttgatatttttagatattcaaaattgagttcttttccaagaaaaaaaaataataattaatttaaatttttctaaatactacataatattacgaacttaagagagtaactcaaaatttatttaacttttacattttacattcaaaaagattatattaagtcatctgattagtcatatattaagttaatgtaattaattaaaaaaattatactatgtaggtgatagaattttaatgggttaaaagtatttagagttttagattcgacaatctattttattaaataataaaataaattctgtatttaattattaagaaaaaaaataaataaattctgtattttttaaaatagtacaagtaagacttcaaattgatttttatcgaaataaaatttaataataatcagacatagagatgttaggacaaaattggttaaatttgctgtttctgtttgtgttaggaattatcctcaagttggttatataaaaaaaaaagaattaaaaattgagctcaaagtcctatttgtatcattttaaaaaatagagggtttattttgtcattttaaaaagtcctatttcttaattgctcgtcccactactggatgaggctcatcgtgtcttggagttg

SEQ ID NO: 324761 - DNA, 655 bp, Cannabis indica
cttaattacaacaataacgatataaaccccagaaaagtgttaggcaccagcagtgggccttttagcatttctcataaataagatgtaaaaagttattaaaggtattaatgagtagtaaaatagtaaatagaaaagtaatatttagtgtggaataaaatttggtctattttatattttatgtcaaatttaaaccatattatacactaccattagaatttaattttatgagcatgggctaaaacatacatatactcaatctttatagtactccattgaagatgcttttatacttttatttatatatttaatataattttatatatatacattcaataaaaacttaatgtttttattgatatttcttacaactttcttttaaaataaagtttattttagagtattgttatttgacaccagtggtgtctagcaccatctagaggtggcgttctacaatcagttagcgatattatttagataatattatcttaagttatatgagaatatatacttaattgcactaatagcaatatgacactgaggaatgtgttaaacaccactaatatctttaagtatttctctttattttacccctagctaatcaaatatagcattgattttttgagctaaatttagtataaaatttacatcatccatt

SEQ ID NO: 324762 - DNA, 1217 bp, Cannabis indica
ctcgaaagccaaaaacctcaaatgcccagatgaaatctactcgagaaaatgaaaatgataaatcccaagaatgattttgtatgggaaaattgtactctttgcgtttgtctagtatttatcccgagaaaagcttggaacaggtatagaaaaagagagagagagagatgaagaaatgggcaggaatatgccgttattgtttttggtatgaataaaaacttagagagagagagaagaagaagtcgaaaaaatactattttttttttatttttaaaacttttaaatattttaatttatttttttattaagtggaccaataaaattttgttgcgtgtacacttgtgtacacaatgacagtccactttcacttaacatatcaaagtagacggaaggagtacatagcaaaatgattctataaattggcagtctagccctagttatttcaatctaaggagttaacgtatcaaacttcaaaatttagggaggttgaccacaaattactctatatataatatacttcaaaaccacttataatgtgtttttggcattataaattattgtcaacaactacaacatacattgttatgtattaagaaaaaattaaattatgtaatatttttatgtgcgtataacatgaaaataagttattttgaatacacgtgtaaaaaggattattttgaaatctattttgggcatggtaaattatttaaaatgttcaaccacttgaggctagggttgagcatcggtcggttcagttttttatatataaaaatccaaaatttaattttcgatctagatttgtgcaatccgaaaaccgactaatcacatttttctatatttttctttaaaatatgatccaattaattctagcacattattttacattttacaactaccaacatacaaattaattgtctcattctgttaactttaatattaataaaataataatatattattattagggatattggcggctaaaccacctgaactttacggtttgtaacagttaaccataaaaaccaaaattttggcagcataactacctaaaccatggttctgttttgctctgtacacatccgtccaaaaatcacagttaagtggcacggtggactgtccacgtgacaaatttttagtggtctacgtaatattagttttaaaaaaataattataaatatttaaaaaaacttaaaaaaaaaattaaaattataaaaataaaa

SEQ ID NO: 324763 - DNA, 846 bp, Cannabis indica
ttgattttttattctaatgataaaaattgttccaaatattctattactctcttctgtttattaattcttttgaatttttttgctagtacaactctaataaaataatgctaatctccccagtacaaataaaaaatacatataataaatatataaaataataaattattaataaacttgatttttagctaatttatacttacatagtttctcatactgcaattgttaaggaatattttcaattacttttatcgtttttgagaatacttttttttgaaaaaagaaaaaagaaaaatcacaccacaaaactctatatatccaataattcaatcaaaattaactaaactaatcaaattcgatctagtattgcaaataaaggtcgggttttttgacatagcacaaaattagcacgagcatgattaggcacaaaaaaatataagtttagacacgatgctataaaatggcacgacacgacacaaaaatatatctttaaacacgacatagcacgggaagcacaaaaagtacaacccataaaaaagattaatagatcagtctgaaagacatgacacactacaaacccaaaagtacagaagtaagacatatgaaaaatcttatatataatttattattattattattaattatagtaataataataagttatgaattatcaattataaataagttaaataattataaaattttataattttataattaaaaatattaaaaaataaaaaaataaagattatatattaatttatttatacgatttatataaaaatttaagtaatttctaaataaatatttaaaattctaaatgatactaataatttttaatatataata

SEQ ID NO: 324764 - DNA, 574 bp, Cannabis indica
aactcctacctagtatatatataggtgtgaattccttcttgtcgaagattttgccaaattatttgtcattgttaatcttttatatgtacactattatataacatcagcggaaaaaaattgtattgttgtggaaaaattataacaaatgatgaaagaattaaattaattaaactttaaacagttaaacgattattaatgaaaagattaacaaacacaaacagtaattgaagaaaaaatagggaataacaaagtatgaacaaccagaaataattaaagcaataaaacgataaaatcaacaccaagatatattctggttcaagtccgatagatcaatataatctatggctctattccagatttggaacaccaccaaatcctctttattgattgagtaagaacaggtacaatacagccagatcgattctctaatgagttcttttaaagtgattcaactcttaaacttttacccaagaatctttttcatctacagaagattcttcattcaaaacccaacccctatctctctcttttctttgtacctttctctctacctctaaatcttctctctctctct

SEQ ID NO: 324765 - DNA, 661 bp, Cannabis indica
agtggatttggaaggagaaccttcatccctggatgaggatgatcctttggcgcgcaatagcaggtgctctgcccacgggagacaaagtcggagcaatgcaattgtgttgcttttgttcaaaggagatggaatctcctctgcatatctttgtccaatgtccctttgctgtagccttatggtttgggtcccctgtccccatccgatcctccatggtgtcaacaaattctctcaagtcctttgttattgagttgtgctctggccttgaacctgaaccaaggtatcgtttcctcctttgtctggctgtgatcattgataccttatggttttttcgaaatgaatgccggcatggtaaagatccgaatctcaacgtcaatgactcattaaggatagtttggaagaaatatggtgaattcagccagtatgaagagaatggagaagtggttcttcagaaggaaaggatatgtactgaagtggactataccggctcccaaaaaaggaagctgattatggtggacggatcgttctctaaaggaaagattggtgctggtttcctcgtgtggaatcgtgacacaaatgactggttttatgaggcaaagtctgctgttggggagaatgcggtggcagctgaggtttttgcttggttcattgctctgcagtgggc

SEQ ID NO: 324766 - DNA, 1797 bp, Cannabis indica
cataaaacccaacacaaacttcaaggtgaaaaccaccgctgccaattcaatatcgtgtgtcggatactgctgctcatattccttcaattgcctagatgtataggtaataaccttatcaaattgcattaaaatgcaatttaacccttgtttgaaggcatcacaataaactacaaatttctcatcgctgatcggcaaggtcagtactgatgtggtcatcaatctctattttaactcgtggaagctactttcacacttgttagtctaaacaaacttacagttctttcaggttaattccattaagggtgtagaaatcttggcaaacccttccacaaatcttctgtagtatcctgctaatccgaagaaacttttgacttcgatagcagacttgggtcgaggctaatctcgaactgcctcaatcttcactgggtccaccagaatgctatccttatttacaacatggcctaagaagcttacttggggcagccaaaacttacatttctcaaatttagcatagatttcatgctcccaaagatgttgtaacaccatctgcagatgtttttcatgtgcctcttttaaatcaaaaaagaccaaaatgtcatcaataaagacaatcacaaagtgatctagaaattctttgacaactaggttcatcaggtccatgaatgttgctggggcattacttaatccaaaggacatcactaggaattcataatgcccataccaggtatgaaaaactgtcttgggaacattctcctctcaaatcctcaactggtgataaccagatcgaagatcgatcttagagagaacggtctttccctgtagttgatcaaacagatcgtctatcattggcaaaggatacttattcttcactgttaatttattcaactcccggtagccaatagacatccatagtgttctatccttcttctttatgaacaaaaccggtgcaccctaaggcgaggtactcagtctagtgaatcgcaaatctaacataccttgtaactgaacctttagttctattaattctgtaggtgtcatccaatacaggctcttagatatagactttatcacaagtatcaattcgatctcaaagtcaatctctcactttggtggtaacctaggtagctcctctagaaagacatccagaaactcttgtaccacctgaacacttttaggtcctattggtacttccctcgttttattgatatcttaatatcaaaataagatcatttcaaattttattaataaaataagtaaatatctgatcttataactaaaattaataaaacaaacaaaaataatcaaatttcaaaactaaccataaatgcaagtttgtgaaaaaatcaaatttttaaattcaaaggctaataatatctaaaactaatttaaatgaatcgaaaaaatttaataaaaattaattttatcctgataattatatttttatttaaaaatttagattctacacaaaattctaccaaaatttgaattttgtttcattgaaaatgatttttgaaactcaaaatatcacaaaacaaaaattggcacaggatgggttttgggcgaggataaggctattggcagccttcttggctgaggtagctcggtgtgacacgggctttagacagcccttgtccgagaaatctcaaacaagccttgtctgaagctcgatcatgatcgagtgtctctctaggctccacgcacgcatggtgttgcattagttttagatattttcattcaaatttcaaaaaatcataactaattcaataaaaatccaaattaagttctgtaaaagcctaa

SEQ ID NO: 324767 - DNA, 1565 bp, Cannabis indica
aatttttgtatttgatttcattttgtctttcaaatactacaacaattttttttttttaaaaaaaaattacacaaataagacacaaaagattatttacattagtattaaagtgaaaatgcctcaaaattaaaaatatattaaaccaaacaaattactataatcaattaaggacgttccttttaaaaactcaaatcattttatttgtattgaaaatatatattattctaattgtaaataatacatatatatatatatatatataaattaaatatgaagttagtgacacagttcataaattaacaaaagtttatgaaaattaatttaccaattaaatatttaataatagtaaacacaaaactatttgtaaataaaaaaaatagatgtacaaaaactcttcataaatagataaaactttttataaaaaaaaatgtgtaaagacatatttacaaataaacaaaacaaaataactttttataaaataaatataaaattgtcaaatacacaaattactataaataaacaaataagtttattctttataaataaacaaaactgtttataaaaggtgtcatttcctaatactttttttaatcagttttctatttttaaaattaaaaaagtgaaaatatttttcaaaaacatgttctataaaactgttaacggtctgaactggttaacaatatagataaactttttcaactaataatattgataaatttcaatgaaaccttgactttaatactaagaagaaagaactcttattaaagaagaaagaactctagagtctttaatatctttgaaaaatggtatctcataaatgctcttccaataatatagtgtttggctctctgaaaattcaaaaggaaaaattccccctctcaatggattggagagtcgaatttataatcaaccctcttgcccttacacctttcagcttcccccatacaccctatgaccagttgctttcacctatcattacactgtctcttaagcaacctgtcatgtctaggatcctaattaatttcactaaaaaagcttctttcattttgtacctcgaacgaactaaaatatgtccctgttatgtaagcaggttgagtcgtcattgtcccccctgacaccttctcagtaattctgctggtgtcatgaaggagaggtggatgggcataatgttgaggctacgggcatcaccgtcaatagcagatgtgagcatggccgtgtgtcacgggccgcctatttggacacccccaaataggtgggacgtgcggcacttgctggcacaccgagctagcaagtcagcctaaacgcgcctgcaggcaaacaagttcaaaggttaggcacgatacatgtctcgcacatgttgagtgcaaacaagaagcatgagcaagcaaacacaaagcgtccccaaggaccaatctcacacaacccacaagcaaatatatagacaaatggcacgcaatggcccaacaaaggcaacaaacaggcatcacaaagaccatatagaagcatacacaagaagcatggataaacatcattttattaatatatggccttgatagggcaaggga

SEQ ID NO: 324768 - DNA, 1668 bp, Cannabis indica
tttatagcggcacaagtacttaattttattagtaaaagtacattttctttgtcaatacaaattctattaatattttaaagaagatacatatatgattcaaattctaaattattatgttttaacgaaaacatatagtatgagttaagtctaaatctttatttattaaatttaaaatggagtctgtattgaagaaattgagcaaaaattacatttttacaaatattagatacttacactgccaaaaaaagtcactaaatttataccgcttacaaactaaaaattttaagtacttttgctatcattatcccaagttgtaataatcagtattttgtccaaggctagtgctggatgttgaggttggaaaaatatggactcaacatgatctgagcttatggtacttagtagagctatttctaacttaattttattattattacttttacatttcactattatattattaattaataaatttctttaccattacaatgttgtttctttcaagattcaatcaatagagaaagattttaaaatagaagtggttgttattgttaaataataattagggttattttagttttttttctatattttagtattttatattagttgtctatgtaagactttcttattaattgtatttcaacactttaaagttttggcagacgtccgtacaatcatgtctgtacagttcgacagtccaaatttggtattaaattcttcaacttttttcttgattcgcataacagtttttgttttgacttttgcatagcagtttgcggtttgattttcaaaacacagttttgagatctttttaacacttttgtatttagaaatttgtgcaatttgttttatttttgcaatggctactaatatagacgatttccttcaagcgattagtgtgagatttgatggaaagaattattcgtattggagttatgttaagaaaaaatttctgaaaggaaaaaaatgtgagttatatttctggaacaaaaacgaaacatgcagatggtaatgcagatctgttaaaaaattagaaagtagataatttaaaaattctcacattgataaataactctgtagaacaatctattggcacccaattagcaaagtatgatacagcaaaagaagtctgggaccatcttccaagactgcatacacagcctaatattgcaaagcagtttcagttggaaactaatattagagctctagaacaaaaagatatgagcattcaagagttctattctgttatgacagatctttgggatcaattggcactcaccgaatcagaagagctacgtacttttgcaccgtatattgctcgtagaaaagaacaacgattggttcaatttttaatggctcttcgtagtgattttgaagcacttcctggttctatattgcatcgttctccgcttccttcggctgattcagttgtcagtgaattgttagcagatgaaatctgtctcaagtctcaatcagggaaaggcattctctcaacacatagttcttttattttggcagtccctcctactacactatttcctccataagagaacaaacctcgcacaaaggttggtgttgatgagtgtagcttttgcaaacataaaggtcattggaaagctcaatgtcctaagcttgccttagatggcattgttgggttttatgccc

SEQ ID NO: 324769 - DNA, 1367 bp, Cannabis indica
gcccatcttgagcctccctaagccattttctttaaagcttctgcctcagcatctcccattgatagttctcccacgagatagttatgcttggcaatgcggagctaaaccctttcctcagttagggtgagcaggagtcatgataatacttggaggtgcaggatactcatcgacctcggaaggaatccctgagtcaacacttggaccgggggtatcatcccttcttggtttctttgaaggccctggctcgaccataacacctttgcatttccgaccaaggggatggacgacttcttcctcttcttcttcctcatcaattagtacaacctatcagttctcaagggcttcagcggtaagcccctggagtcacgctcacattgtgctgcttaggcagcttggtcttaggactgtaagtttgagtaagggcgtctaaaaaggtcctccataggttttgcttttcaaaataaataatggggtgagaacaatattaaaggtcattatggaagcatagcacagtagaactagtcctaccctgatggtctaattctgtcctaaaaaattcacaaattaaaagtctggtatcgtcatcccctagaaagctatccgagggagggaactaacttgaagtcatgaggaatggtccaagaggattggtgtaggaggaccagagcccatttgagactgacccaaaaagtgacttaagttcgaaaaataaaagcttttggcgttatcaccccaccgtgaatggggcatccaaaaactatatagttggttatcaaattctattggacttaggccagcgtagtctcaaaaagaagggacgaggtgaatgttcaaaggggacttgcaggttgcaaaggtgctggcaccggtggccctagagttgggaaccaaaaatgggaacttaggccgaatgggtgttttctctttccctgccttctcccgggagatcctccccgaagcgacatgcgctgggcaaacactagctcctgttcccttttgaatttatacttgttatacttatcctctcgaacgagagaatatccccccggagtgccttctcagtcccaagattctgagcgttttggcaaagaacctttgacaaattgaagtcgtccacagattggctctctaggatcaacttagccctccggtagttggcagtcatggccaggtctcccatgttcaactcctttttataaccagcaaacacttgtgtgtggtttagaaagagttaagtgagggcggtgcggtgcatgggagaaaccctgacccagtccgtcagaaggtctgggcgctcaaaggttttgaagctaaaggaaaagaaaaactgatggcggtatttgtaacaccctaactattttaggcgt

SEQ ID NO: 324770 - DNA, 696 bp, Cannabis indica
tttttttctaaataattgattaaagttgtgtatggacaatataaagtcaaaaatcgaatctttctctccagaaaggaaaaacgaagtagcagttgtgaatgagattgactcataataacaacattaagctatatgtgagggtaaatattaacggctcacattatgtaggcaagtattataaatgaggcaccgagatgccttgaaaaaaataatacttaaactaaaatatgaatagaaggcctaactattcatataaagcattcaaaaaatgtacaaagtaattcataagatgaattattcaaagtacgtttaagtttgcttaccaaattataaatgacagattataactgctcgtgcgaagtagaattgataagaactgctcgcaaatagaaagcatagcagaatataactgctcgcgtacatatatagtagattaataactacttaagcaatctcaaaggaaaaatgagatcaatggaagtgcttactttaaagcatcttaagtttgatcaaaatataattgtttaagctgtgattaaaaacgcaaataagcaaacatattaagttcaaatctaaagatgcgaggcaataaaagaaaagtttgccatccaacagtgcaaatttatctttacaaaaaatttccacaaggggcaaaccattgtctcggccgaaaggccattttcttaaataaaaaaa

SEQ ID NO: 324771 - DNA, 1712 bp, Cannabis indica
acctttagagagctactttagatcccattactatagtgatctgagtagtattatctctcggtatcaatacaactaaaagaggagtaggtcattacctactaactaagagcgctgaacctttataaaatcttgccttcattttactttattcttcttattgtgtaacacgtggtaatcatcatcattaaatacgactccactgtcggttggtaaaatctgaggtcaacaatactaatgagtgtaattagttggagtcttttaaatttaaagcttcctgaggaagaggtaaatgataagtaaaagataattatgtcttttttcttttcttttttcaagctactttcgaattcctatccagttaggaataggaataaaaatttaaaaggtaacaacagttcctatattgagattaagaaaaaattagaaaaattaaaaaaaaaaaataataataagcaaaatgccaaaaatctttaaatttagtcaaggaatatgtgatcattcgagtcaatattgtgtacttaattatcacttacgtttctttatgattaaatacttaatgtttataattaggctcttcttcctacttataagaaggtaaattgagctaattaagtttgggagagactttccatttcaaagtatccttttatactttagctagctgttctaaagaggctgccaactgatagactaataaaatttaatatatgtgaaatgaatacttgtttattgtgtgactttcaggccgaatccatggagcatttttactttaactgttatttcagtgtgacttgtttaaattaaaaagtagtttggttggagatgcatgggcactgatttgaacactattttgagatggattgatagagcgaaaatttctaaattttcaaaggtaagtttatactgtttttatagctgtcttggtgtaacatatatggataattctaaataaaacctttaagtttcaatgtgtgcaaactatcaaattagttgttatacaattcagcaagatatcaaagatagaataataatggctattcctaaaaaagttgcaagaaataaatgtgcaatggcttaagcaattatagattgtattaaattttgttgcttgaatatattaagatgaagctgattgaacaaaatataattataattctaattagttataaatattgtagatttacatgtatgttcaatctaatgtatttcacatagaattattcacatatcctttagtttttatatatgaatctatcaaaaagcaccaacaataccaaggtcatattattataataaattaataagaagatataatggtaaagggcttccttttccttttttaaaaaatccactatttatgtttatcattcttctttattcgaacaaatattattcgatggacatggtgatattgtgtgtggtttaatttgtgttttaggtttcaaactttggcatcaaaatgactcagcaaacctccaagtgatatggcaatggtggcatggcattttacggttggtcaaaaagaataagggtatctaccaataacaaagagatatgatataatacacatataaattattggaaaattttataatgtacatttttaaaagagatgcactaatacatctttatcttatttagtatccgaaattattttttaattaatttttttctcatagtcatgtaaaatatagttatttaagatatcttgt

SEQ ID NO: 324772 - DNA, 536 bp, Cannabis indica
atatatatatatatgataatatataatgtatataggttgaattttccacatttaaaaaaaaatagaatgtcgaaatttgatttaaataatctattgtatgcaagcatatgttaaaaaaatataattataatttatctcctatataccaaaaatactaaaggtgttttgaaaataattgtgtaatataaggggtgtttatatatgaaattaatatttaatttttacaaataattagaaattacacataatatttagtacttaatatgaaaaatattttttttaataattacacaatgtaattatacttaattctcgtgaggtatgagaattgaagagtataattcatcaataatctcaatttattctaattatacaattatagtataactacgtaatcatataaacacgtaaaactatgtaattgtttctaattagatttaatttttattctctcttagtttttcaaacgcacaccaaaaatatataggggtcttttcaatattatacctaaaattgattttatttataaaaatacc

SEQ ID NO: 324773 - DNA, 1107 bp, Cannabis indica
atagaagttcatgatttactcagagaatggtagtacagttaaaggttttgtttttagttttttttttttttttctaattttgtgtttagatcgagattattattctctaatagttttatcagtgtttttcaattttctatataaaggagatcatacaagacatcaagcttcatcagtccattatttgattatgggaagttgaggatttgaaatcatacaatatggtattttatgttttatatgaagcaaagtacaaaggaaataggtgatggggtgttagtctataaatattttcaaactatttttattatttatgagtcatatataaatttttttttaaaaaaaaagaatcatttacattaatagaacaaaaaaaaaataaataaataaagaaatgaatattcatggtacatattaaaattgggaacatatatttaaaaaacatttacattaattaggagaaaataagaaataaaattaggattatatttatatttttttctgttaaatagaaagtttaacaattaataacttctctcaaaaaataaatatataataagaataataatattaattttggtaagaaaaatatttacatcaataagggaaaaataagaaatttaacaatagtaataataacttctctcaaaaagtaaatatataacaagaatattaatattaattttgataaaagcataaatactctcaatatatatttatgtaatttattaatttttttttcagatcattattaatcagctataattatcctaatataacttataactatcacaaaattacttataaaaaaatgaagaaactaatttactttaatccataaaagtgtacttataaaaaaatagttcaacaaaaattaattacttcgtcaataaatactatttaaatgattaagttattattcttctttaattttaactttttatatattctgttcaaaataatataattttgttcgataaatatattttttttcgaatatatatatatttttgatgtaattgtaacacatttacataaatatatatttttttatatatatatttcgaatatatatattttatgtaatgattaaattattcaagaaag

SEQ ID NO: 324774 - DNA, 2549 bp, Cannabis indica
attaagatttcacctaagttagcggaggacatggtcagatgaagaatcgagtttgttttaggtaaattacataacttgacgctgcaatttgatttattagaacgaattaaagctattcagttaactggtccagaattaatgaagattaaggaaaaggtttcatctggtcaagtcagagatttatggtgtcaaatagtgggatgctgttgtttaagaccagggtttgtgttccaagtagtgctgaacttagaaacaaaattctttaagaggctcataccactccttactccttgcatcctggcaccactaagatgtaccaagaccttaaaccctacttctagtgaagcaggatgaagaagaatgtggtataattagtattccgatgcctaacttgtcagcagactaaggctgaacatcatcgatcggcaggtttgttgtagcctttgacacttcctgagtggaagtgggaggatatcaccatggactttgtggttagattacctagaaccactggtttgtacgattcaatttgggttgtggtagatcgatttgcaaagtctgcacattttctactagttaaaacaacctttacagttgatcagtatacagatttgtacgttaaggagatagtaagatcacatggtgtaccaaagtagagatccgaagtttacttctaaattttggcagagtttacagtgggctataggtaccaaattgaaattcagtatagctttccatcctcagactgatggacagtccgagagaacaatccagatactagaagatatattacaagcctgtgttatggatttcgagagctcctggagcaagtatctgccactgatacaattttcatgtaataacagctaccagagtacaatagggatggctccctatgagttgttgtttggcaggaagtgtaaatcgcccatttattgggatgaatcaagagaatggaaatacttaggtctggaatcagtgcaacaaactaatgaagcaatagaaaagattaaggctagaatgcttggctcccacagtaggaaaaagagttatgcatgtcctaaacgcagaaatgtagagtttcaagtaggagatcatgtgtttctacgggtgtctccaatgaaggggatcaaacgttttgggaaaagaggtaaattatgccctagattttcaggacctttcgagattcttgagaaggttggataagtggcatatcgtttagatttgccaccagctctttctgcagtacacaatgtatttcatgttttcatgctacgaaagtttgtttcagatcctgttcatgtgttgagttatgaaaatcttgagctgtaacgggacttatcatatgaggaacatccagttcagatccttgacagaaaggataaggtcctttggaacaagaccatagctttggtcaaagtactctagagaaacagtaaagtggaggaagccacctgggagttagaatctgacatgaggactcaatatccagagttgttcatgttagatttcggggacgaaatccttttaaggggggataatggtaaagaccgcttaactttaatttagaaattaacagataattagggtttaattatgaaacttgcatgttagttatgaattatcagcttatggagatttatttgaattcagaatgcattttatatgtcatatatggagttttataattttgcatgttttgtgcccgacaacattggaacgcggtgtttggctattaaaatcacatattagtatttttagtaaagcaaggaaatatagttagacattgagaatgtcaggaatagtcaagattctagaaatgaccaaaatacccctaggtgattttgtgattagctagctttgggaagggcaaaatagtcattttacctaaattaaccttttgtcttttagtgagtttaaatgaggtttttattctgaatattaaaccaagtttattagataaaactaattaatctttttattttatgaaaaaaataagaaattaaccaaaaaagaaaccctttctctctagtctttctccctctctcgtgaaccctagaaaccagcaaggaaccatggtttttcttcagcaatttagagattatttagcatctttgttgaggtttcaagcttggataagctttttagttctttttctatggtttctttagtttatatagcttctcttgcatgatttttgagatgttgggttttgagttgttagagttgttagattttgtattatattatggttgtttgagttgatttgaggttaagggatcggttaatttggtgtttagacaaggtttgattttagaactcaaactttggtctctaatggtaaaattttattttgagcatgttatgtggttctattgcttgagttatgtttattggggtatattatgtaggcctggaaggtttggtaaggttttcaaaatttttaagttacctgctgtaaaactggttaatcggttttacaggccctgtaaaaccggttaaccagatcagaaactggtttcctaaacttttcgtgttttcgattcatg

SEQ ID NO: 324775 - DNA, 1275 bp, Cannabis indica
taaaaaaaagtaaaattataactagtggggtacatctcatggccagccactatagggtttaatttgttattattttatcatttttattccatataatttaatcataaccctaagttaaatagtataaaagaatatgatggtctcattatccaactaatctctcataacttagtttacattctgttagaaaactagagttttgagacctccattctttcttcttctaatttcaaaatctcttataatgttcttcatcaaattttgagccattagtgagggagtgcatgcccacccatagcaagtctagtactcaatcatagtgtgtaagactgtgaagaatccaaatatctgaaggagaatcgaacttagatcttgataataatccgcaacaaaaatgaacaagggttagagttctgagtgggaggaatattcctttgcaatcaatgtaaggttactcaaactttatatgtgtttaaattccattactttagaaattcatatttagaatgttaataaacatacttgttagtaaatctagatcctagtaaaatataatcaaacggtacctctatagccacatcatcatccccacccaaatctaccacaagattattgttgtaaaagggagtaccaaactcatctgaatgatcaaatgcgatatcagctctatgatcatctatattagtaggaagttgctcattcaagctaacccctagatcaatttctaggataaaggtcccaacaacactttgaggggttacattttagggagtaggctccaaattcacatttttcctcaccttagtcacacatagtggcaacaagttgtccactcatttttgccttcatgctcaagaacactcgtagttggctatctttcactaaaacctccagcgaaaacttagtgcctttcatgtacatgtaacaaacttctaattttagttgatacaccaatgggtccacatccaactcctcatgcaacacttcacacacctttttcaatgtagtgtcaatctcaaacatcaacgtcttaccttttagggaatcgaatacatagttgaaacccccccacaaccccaaacatcatcatacagtatagacacaactacagttgaatctgttctaaaaaaatgcacataaatatgaaaataaacagaaaaaaatcagcataatattagcacaataatcgcacaagatatcgcacacaaattgtcaaaccaacaaattagcaaaaaattgcaagacatcgtttatgtcgccaaaaagaatgaaagt

SEQ ID NO: 324776 - DNA, 814 bp, Cannabis indica
gtttatttatggcatcttattttacgtaagtaagggcgttacatattaatacatgtgatccatattaataatcatgaaacataacattattaagaacttacagatcactcattgccagtaatgagcacatttgatgcagagattttgagggactttctaaaatatatgcaagaggatttgcaataaagaatctgaccagcatatactataagtaaataatttcaataatacctgtaacaaaattagaaaacagacttagacaaaaaaaaagtaaataaggcaccacagacttctttctttctcaatgttgcagttaattaataattatattcaactctctttcgcaccattttttgtctgttttgatttactgtttcatagtttatctctatttaattagaatcattaaaaaactgaaatgatgagattcaattataagcataataaaagtctacaggacccttgcacataaattgacctataaatcctaagaaaagaataaaaaaaaaatgagaattgtcaagtgattttatgtgtataaaaaaaattcaaagcttcagaaccaaagctagaaaccaagttcagtaattttaatagtgagacagagagatggagtgcataggaagaagagacagttatatcccacctcccactatcaaatatcgtggggtaattataaataattattattattatttaacttttataattttcatatatatatatagtaacacttttgtatagaacattattttttttacttcgtttcaagaaatagtaatacttttttagaagtgttactgtaggttatttt

SEQ ID NO: 324777 - DNA, 1907 bp, Cannabis indica
aataataataacaatataattgtatcacacttaatataccaaataccaatatatgtagataaactggatattacagttggtcaatcattttcctttatttccacaaagacgaattcgagcttgcttctcgggttcgacttgaaagggttgagctttggtaaaaatgaggattcttgaagtagtaataaagactgattacgcgcaaaagttattttaggttgtaccatttgactaattatgaagaacttgtaaaataatgcatttaaaaaataaagattatctctgatattgaattgaataagtggtaaatggtaatattgtaaaacctcagattgtcatgagcttacttctttggattgttcaaatgcacatatcttattccccaatccaagtatgggcatggtactatggtgatgcttggacttgaatcttatttggattttcctcaaatgcttatatattttttcaagcaagatcttgcgatgttagagggtgtggtcgacgacaaagtcgttgaccctccgatgcttaagttagtattggaatcttggagtaaaatttaattgattgaagtttttttacctgacggtcaagtaccaagctctcgtgatgtttgtatttggatcttgaaatgtcaggaagcgcgctcgacgttcgatgcttaagtcaagaaggtgaaaaaagtatgattgaaattaaaacttaaaattgaaaataaatttgatagtttagagatggtattgtcttagatgaacaacgttccaactattgcttatatcacgtccatctgaggtttgtagtttgtaggctccttgtccgactatccttgaaatcttataaggtccttcgcacgttggacctaattttcctgctcttgcttctctcgcattttggaaaactttccttagaacccaatctccaaagttgaaccaaagaactctaatgttcttgttaaaatgttgtgccactttatgttgatacgctgcaacccttatcaatgcttgttctctttgttcgtctaatgtatcaagcgtgtgagccatattctgctagttttcagcgtccatcgtgtgttcaaattttatggttgggagccctatctccgcgagaatgactgcttatattccataggttaaggagaaaggtgtttccccgatggaagtctttgtcgtcgtcttgtatgcccataacaccccttggagttcatctgcgcatcttcctttaactttgtctagtcttttctttaaagacactaccaatgtcttgtttatcgattctgcttgtccattcgattgtgggtatttgggtgttgagaatgagagttgtactccccattcattacaaaaaatttgaaagtctaagcttatgagctgcgggccaatgtcaatcactatttcttttggcacaccgaatttgcatatgacattgttccaaataaagcttttgacttctcaatccctaacatgtgcgtaggcttctgcttctacccatttggtgaagtaatcagtttttgccaacatgaagactctttatcctagagatgtaggcatcttcccgataatgtccattccctattttatgaaaggccaaggagttagtgttgaatggagcttttctggtggcaagtgtgatacttgagcgaacatttggcatttgtcgcatcttttgacgaattcatacgaatttgtcctcattgtcagccagtagtattcggttgtaaaagccttgttgcataagcttcttggtctagagtggtttccacattcaccttcgtgtaattgttcttattcaaactgattattcaaccaacctaaacctagtttttattctctgacagagagacaccttctacagagatttcgaatctcctttattgttcttcaaactcgagccatagtgatagagtg

SEQ ID NO: 324778 - DNA, 1042 bp, Cannabis indica
taattaaaaataaaaaagcagtaaatttacacaaaaatctgtttatttgaaaaatcactttaatacaataaaacttgaaaaatatatatcagttatcttttctaaattttatttttacggatttcaaacatcatgaaaacccaccaccaaagacgaagttagtacaactcttctctaaggttacgaaaatattttggttagctttattataataaaagactggcccaaaaatttagtgggtcatagaaaaaaatattttgggcccttacatagaaaaaatgttgtatttttccaaatatataaaaaatatttgattttaaaataatttttttggagcatctgagctaggtgggtacaaggtaaaggcctagcccgcctatgcctaagactgaacgtgctatataacagagtccaatatataatctaattctttaatacattgggctcaaccaaaacttttattgaaagtttcatatatagtttcttgtcatggtctatgaatctttctttctctgtgatttaattgttggttatggttataagttttgtcttatgaaaagctagttattaatctagaaatgagctacaagaagcttggtgaccctccgaatagcttgttcagaaagttgtggccaatctggatggtttttctagcaagctagtcatccgtaaggatcttctttccagatagcttgtcatcaacctggaacattcttcgagatagcttgtagttagtccataacgttcatctagaaagcttgaaccaatctagattgactcatccagatagttcgaatagaaagcgcagggttgacgtggaatatattgtttaagcttacttggagactttaaagaagcattagttagcaacgatacaagcagagttaattttagtaataatacaaacctatacatagttatcacctttataatccatagtgtatcagatcatcaacaacttgagaggaatcttgttgtgtaatgttagagagagagagagagagagagagagagagagagagagtacgaaagtcggtgtaag

SEQ ID NO: 324779 - DNA, 1004 bp, Cannabis indica
agatcctggtaaaataattcccaacaccattttgttcatgatcatgagggcaatgatgctaaaaatggattccttagtcatgttgaaatctagaaaacggtctgtattcccctcccgaatcagactgaacacttttaataggcaaattaaactgtttttcaaccatgcttttgaactttagaatgacatcaaaggcttgagatttaagtgttaagggatatatcccagtatacctggtgtgatcatctataaagtgaatataatatcgatagccttctttagatgagacatgaaagggaccacataaatcaatgtgaattaacttgagggattgtgaagcatggctggtggacagggaataaggttgtttgtgacttttacctttttaacaggcaacacaaaattgcaaatcttttaaagtgcctaaatgtggtatggtttttaaaattctgcttaaagtagcagaggaaggatgccccaattttttatgccaaatattaatgtcttgattaaaagtagttaaagaaacagatggagaacactgtgaagaatagacaaaagtagtttctttattaatattggacatagtacaagagttcactgaattaacagtgaggttattacaacagttataacaactataaacagtagggacgttggtgaactgagacattgtggtgagattacattgaagggtatgtgagggttgactggaatcaccaagcacatagagcccatctttacctggtcctttgagaagaatagctctagtgagtttgtccttgacaaaacaacaattcttatgaaattcaagatacacattattgtcatgggttagcttagacacacttattaaattcttttttcataacaggcacatttaaaacagattaagtgtaaaagcatgacaattggtggaagacaaggaagtggatctgttgtgatattttgcacatgcaagtgcacgcatcgttacaagtaataaactcaccaagagtgaggtc

SEQ ID NO: 324780 - DNA, 1655 bp, Cannabis indica
tcaatgagtacgtgtagttttttagcagtatatcttctctaggtggtgccagtttagtaaatgtgttttgtgcttttgtcctattaatatgtgtccattgttgcaccaatgctctcaagcattctagcagtgttgtaattggaatctcccttgctgctaaatttgcagcgttcagtgattctgctatgtttgaggtcatagttgaatacctctagtttttgctgtgaatccttgaccatttttcataaccaacttttttcaagtatggtcttatgcgtttgttcaatccatctagtttagccatgtgggatttaaattgtttttctgtataggcttttactgctccaaagaatggcaggttgtacttggcagcatgttgtttgaaggttgttttgaggttgctcaataggtgatacctgcagtatctgtgtgaaattgctggatatatttctcttgttactttgatgaggctctcattcatgtctaaaattagatattgattttctcagacgccgtatgcttttgtatgctttttttttaattttttaaaaaaatatttccaagatttgtcattctcaaaatcggcgacacagaacgttagcaaaaaattgtgacatgctccatcttgtgtggatgctcacatcaatgttcctccataaagctgctttcaggaatgtaccatcaaccaccacaatcggtctgcatgcttcccacccttttatcagtgcatctaaagcaataaaaacaaagagcaagttgttgtcttctgctgttttcatatcaacaactatccagtatttatttttttcaccatgcaagaaacttagtattaggctgtatgagtcactagcatttcctcttaagtcatttactacaagctccttacttctccaagctttcatgtagttcatcttgatgacaaacctatattttcactctccttttatatccagcggtgttgattttatcattatgttcagaaactttggtttgatgtattctcctatcaatattgacatctcttgcctttggtcttcatatctaatatttacttgacaagtatgaatttttgagaacctcctgattatgaatgtatttgtcggcccatttttggatgctcatagtgaccaattatagctttcacaaacatatttcagattgtattcttgagagcacaacctccacactttgtattgaaaattgtttttgattgcatagtagctgaggacattcttcagtgcttccttgtccttgtatgcctgacgtttttcaacttcagggaggtgtttgtctgttatgagctttgcgttgtatgttgatctctggatctagtttttttactgttgttttccaactttttttaccatttcttcaccaaccagattcacatagtcaactatgtcaaatttgtcgttctcgaattctcttgtttctgattctcctctttcttctgattggtgttcgatagtgtatgattctattgtttgtatatgttcaatttttattttaaatatcatattttttcctgttaagtttccttaccatattcatctaaacaaactttatttttcccatatctatagaactacgctaatgtatatgtacgtagttttgcctaagtgaaaattacaccaaatatgagattctataaaaaa

SEQ ID NO: 324781 - DNA, 776 bp, Cannabis indica
tatatatatatatttaaataaaagatgatatcatttattagtaagtggcatcaaccattacaatattctttagaatagtagaagcatttagctcattgtaaattgtacataacaggatactttaattatacaatggacgatcttattagcagattgattaacaaaggaaactaaaacattatttaaagtagataaaactaaacaattttccaccaacaaatcaaactcagatgacaaatgaacttaactattaattacttgaacaacaactaaaaaagtcagatacactcaaataaataaatcaaaatgagccatacaataaaagactatttggatatataatctataaagcaaccccaaacatagattcaagttcaacattttcttactgtcttatgtttaaaacataatgatatattataagaaacgttaaaagcaacagttagtatcatttaaaatgtaattaattatcgaatctcacatgacgccgaataacaatgctataattcaaaatcagattcgtaagcaaacgtaggtgaatgtgaaaatggactcttctttccttcaaattcctgagatgagtaaacacaagttaagaatataatatatacatatatatatagatatatatatatatcagctgtattagtactgagaagagacacatgcagaacaaattaaatatagaattaagtttggatacttacatttaaactcaatttttgagtaactttggctctttaacaattttacattgtctcttcaagatcttcaat

SEQ ID NO: 324782 - DNA, 634 bp, Cannabis indica
gtcaaagttcggggggaaaaaatccttatcaaacaaattacaagaacaaccttaactaatattattaagattagtatgttagttcagttagttgagtcggttaaagtctgttataacctgtttatttggaatcttgattatgttaccgatcttgattctattagtcttatttggactaattctactgctatatatatagctctctttgtatcagttaaacataataataataataatacagagcaatattcacttgatatttgtcttttcttctcgagtactttgtactctttttcctcatatggtatcagtagaaaaccttgtcccttcatccatggcgaggccctccacacgctcacaagatggtcttcttccatccacagatctcacaatgaagaagacaacactgcaccagtccattcctctccaaattgtccaaatcacaacaactctgaacctgctgttgctacacgaagattgactcctgttgatcgattagctcatgacgatgcctccagtccattcttcctcagcacagcagaccatccatggctcattttggtctcgacagttctcgatggtgctaatgttggatatattttatcaggatctagatttacttccaagtatgttt

SEQ ID NO: 324783 - DNA, 1049 bp, Cannabis indica
gtatacttttttgtttggattttcattacattatattttaatttaatatgtaatattaatggaaactcttaagcacttaattttatttgaatgaattttaaaattaaatttaattataattgctaaataattatttaattaaaaaataatttactttaagtaataagtataattaattaaattaatttaactctaaaagcatatatttttttttttaagaataacctgttgagaacatattataatagattataaaaaatgtaattacatttgtaatatattcattgagtaattttaatgatctttgactccaaaacaaactttaatagcatagcattgaaatcaattaaagcatgtaaataatttgtagtaccaaaaagtaattagaatgtaaagattatagtaattatactttcactgatatagttatatattatttatataatatgttcaatcaaatggttggttttgcagatcctgagagatttagatttacaagagacacatcatttggaagaagacatttgaacatttggagccaatcaccatttcactttggattgtaagtactgtatatttttactataagaaccttattatagagaagaaaacaacaatttaatttgttcaaaagttttttatataggtctataaatataatataataataacatttttctttttcttgtttatcaaatgatcaggtatgcttttttcagacaattcttcgggtcagtcactaaggttgattacatgacactgaggcatggatttgtaatggtatgttgcacaatgatcttggcctgaaaatagcttcaaattacacatatattgatcactaaagctcatgaatattaactatgcttttaccatttcaggcacatttggctccagaaagtgaaacaagatttgattttcagaagtacatcagcaaatcacttgatcaggattttgtagttattgttgggataacgttagtgttttctgcctttgaaatcagcttataatataaatgtatatatataatgataataatatctaaactttgt

SEQ ID NO: 324784 - DNA, 956 bp, Cannabis indica
tcctggtaaaattaatttcaacagaaactcctttgagcattactgtgaagcattgaaaccttccttcgagagtaaccctcttcaacttcatcaagtcattgaaagtgtccaaattgtactttgggcctaatgttctgtcataaggaacgatgttaggctccttaaagttgaaaggtaataactcaagttggatctcctttgagaagagagagtcctcattatctcatcttcatcatagttacattccttagaagtggtcgatggtatctaccttcgcaaatcttccatctctttatcaagctctttcctttgcttatttagcttatctcggttgtccagcggagtggacataaactttctcgattctttaggggacctcgcgataagtgtagacctttgcgtgcacactagaagaaagtggacttttgccggcgcatttggccaactgtgctggcaaaagtcgctgggaaaaggtgctggccccaaaattaaacgaaatcatattgcatttttaccagtgcaataatgcgtcggtaaaagtacttaatatcgacgaaattcatgaattacactggcaaaaccagtgaaatgaaccgccttatggcgcgaacaattcccaatggttcattcactttggccagcacaattatgtgcttgcaaaaagtaaaataaattttttgggggattttaaccgctcagctaaaattttgggaggaaacttttgtcggcgcacatatgggctggaaaaagtgtgtcaggtaaaaagaattttagttttatcggtaaatgttacttttatcggtgcaaattcgcgctggcaaaaggtcctaaaaaaggtatgaaaaatcccgcgtaaaaaggtggtaggtgagaatacttttcggtgcatatgtgcaccgataaaagtgttgccaaaaacacatcgtttcaatttaggttaattttaaatgctatgc

SEQ ID NO: 324785 - DNA, 1771 bp, Cannabis indica
ccgacaaggagggttgaagacgtggcatgcccttagtgatctttcttgcatgaaaaacaacatgcacacgagagtcacgttgaattttatgtagcaagcttcgacttccaggaaggaaggctaaagttgcataaaaaattcaatcttagactatgcttgaaaagattaaagggtgaaagagtcattaggagtaaaggagacttcaagcagtccttcccttcagagaagcagggttgaagacgtgcagcacacccaatgatctttcacacacggaaggcaatttgcatgcatcttccgagctccaggaagctttatgggatgaatgcatgcgctctaggatctcctaggctctctatttcttacggtgaagtgcagggcctctaatggcttctaaagcaaagactcggactcctagtaggattagcagttgactggcagaagcttcctaactggtttataatgtctcaagttgctttctctgatgtaactttggggtttgagtcacatctggagatagaaaccttgtgagcgcattgagccataaatggcttacttcaaccaaaagtaccataaccaggcttgactggaggcccagcatatgtcgacggtattgatggtctcctctcagccgccgccattacaagatcagtttccaaacaacatcaccacctagcacaaaggcaaaggaagtagttgtcagacaacagatccgaccctcacattagcaccggcactggagtctcgatctagatagagtcgttgcatctgagaacccctcatgagttagtcatcataacagcatcgggtcgtagcctctttgcctagccccaacaccccttgcacctcactgtatttgtgtagttacgccttcgtgaacggcaagaagtgtaggtctgaagataccagtgcccggtcatccttacagggagttggctagccagatctgagcttttaaggggcggaaattggtgcagcaggtgttctaagatagcatgtgtttatcctttgtatttttatcttgatgattaaggcatcgagtctgactctgggaaacgcctcctatttgcacatttctggtcttcaactagacctcggtaggagatcaggaggtctcccttcttttctcgcacaagttctctttctaacgggcttgcatcagtaaccgccatgcatatttttttcttaagctctcaatgaaagcactaaaatgtttaccgagttttttgacaactaaatattttaaagcttaagaaagtaataatggcgtaaatagttaaataacaaacatgatatttttacatggttcaggcgttaactatccttagtccacaagtcaattttattaagctcatcggtcggtgattgtttatacaaatacaaatgcaatggactttttactctattccaccgtgttcttcttgaacaagaggaagcttagtaggaatattctagagttaatggtaggattacaaaaaaatatgtttgcttgggatgatgaagaatggatctcccatccccaaaaataaaaggtcctccttatcttgtactttttttggggtatttataggccaccttcatgtatacactgccttggatggatctttgtagggatgaaattctaccattgattggtaggtggaatattttccatatggcatttctgttgaaagttattttaccaggaacttagatctactcacaagtatgttgatttaacaacctaaatatgaacttctaaaatgatggaaaattaaacacataaaagtatcag

SEQ ID NO: 324786 - DNA, 1218 bp, Cannabis indica
attagagaaaattaacaatatgagttcatttttcttcaaaaaaaacaatgagttaatttattgcaaatattacctgtttctttaattaatttttcgtcaatactgcattggaagtgattccaactattccatctgaacattattaattagtaatattaaataaacaaaattataaagaaattaagagaaaaaaaaaacaatgtggtgtttacactaagaattagtgtaagggctttttagtaatttgtaattaatatgtaaaacttataaatatgtaattgaatagttattaatggatatagaatacgaaaatagaactttgatttaattgggagattgtcactatctcgaaaagtgtatttagagtttggcattgactcaaaaagtaaataccgatacaattgatattgtatcatacaattaatggatccaaaaaaaatttgagtgtgtattttatctaaagtaaaatgtgagtattattgaacttctttttataaaatttttcaaaaattactgtttttcaatgcaaaaaagtatactatataaaaattttagaccatagatttgagtggactctaagcacggacctaacccgccttagctcatgttccctaaactacactcaagataagtgtatttgaaatagttcatcactaataaatagaataaatattccattttgccaaattataggaaaaataatttttttccatctatattctcacaaagaagaatatctataatctctatatatgatttaattttattgtaaaaagttctcttatacccaaaactagctatactatttacaattgtatttttttagtctaattattttcaacttttatgcattaagaattcaagtaaatataatccaataaactatatataaaaaattattaacgggtggatttcaagtaaaaaatgtttttttaattaattagtggatgatgaattccaaattaatctttatttttttttaaaaaaaaaaaaatctatgagttgattatttttttaagagagaatttttccactatatgataaaaattgtaattattcttacattctacaatttctactcataccaattacaaaatttgaaaaaaaaaataataaattaagacattcatgaatcatgttaggtgagatctttaggatcccacctaatacatcactctttttcactctaatatcattttcttaaaaaaaaaattgtta

SEQ ID NO: 324787 - DNA, 2140 bp, Cannabis indica
tttatatgtgtttaatttataatcggtttagaagttcatatttagggtgttaatcaacatacttgtgagtagatttaagatcctggtaaaataatttccaacatggcaggccccagcctctaagggaggaccctctataggcgcctccaactgaaggaagagtccttgagggcaccccctaagaacaacaaccgagtttttcccccggtactatgcaggatagacgagaccaggaattggcaagccccgcgtggacgtgggagaagatctcgagttagccaaacttaaagaggtcgtctgccaaacaggcttaattgaagaaccacatgctgctgactgcaatgtattcactcagcagagacgtgaattccttgaagaaccacatgctagtgactctgatgtatgccctcagtagagacgtgaattccttaaagaaccacgcattgttggttacgatgtgcttgctaagtagagacacgaactcctgagatgaatggatgaccaagagtacatccttcgatcttaccaagtagagttaaattatcacaatagagaggccagtgatatgataaggcggttcaaccagagaaccaatcgaagtggccaggatctcatcagaaatccacttcaaggaagacttgctaatagatcaaggaaggtctatcaatatgctgagcaacccagatcctcaggaactaggacatatcttctcttgcaagaggaaggacagatctttcctcaaaggtcaaacatcaaaaactgtcagatctcggcaactagcgacatgggggaccggccagggatttcaagctcaacaacaggccccactatccatcctgtggccaactaaccacctctaggagtccccatggctggccaaactcttctagaagtccgtatggccggccaggcgtacaggcaagtaccaccaactctgcccaaaccttagatggcaggatacttaggggtcgtcattgatggaccccatattgcaagcgagaccaacaaagccagagagcactatgctcggacactccgtcacgagcccaaaagtgacttcctggtaggcaaagaacgaggctctaagcaaccaaagcttggaaagcccacactctctttctcaaaaaggagatcctacccaagacagtttcccgcacaacgaccccctagtcgttaacgcacaaatcaagaatataactgcagcaagatacatggtggacaatgaagcctccctcaacattcatttcaaaatcaacacatgaaaaaatgaggctgcaactcgctaacttggcaccatacaatcaagtgatgtatggcgtctttggccaaggcatcacatacattacgtatatcaaattacccctcactgttggggaaatcccaaccactagatttctgatggcgcagtttgtcgtaatcgacgttccctcaactttcaatgccatgataggctgaccagccttatacaacttgaaggagtaacatccatctaccaccctacttgaaattcccaacaaggcaggggtaggatgttgaaagaagaccaataatatgtccgtcactattacaacttgcccttgtccaaagctaagaaataaaagatgcatccatcaaatcaagagcacacaagcttcatgatgttcaatgatcttattaactgcaacatggaggtgtgcgttgacgatatgcttgtcaagtccaaaagggctgggggcatatggaggacctagacagaaaatttcaaaatccttcgcagctacaacatgaagaagctcaaacccaaacaagatccaagcccttttgaacatgaagtctcccacaacaatcaaggaagtacaaagccaaataggacgcactactgcactaagcagacttgtgtccaagtatacagataaatgtgtacccttcttcgacatgaagtaaaagcaacaacaaatttgagtggataaaggaatgtgaaactgcattctaggagctgaagaaacaaattggctcagccacctgtgttgcccaaatcccatgaaaaagaagagctaggcgtgcacctagcagtcacagaacatgctatgagtgctgccctcacaagagaaaaaacacgtacatcaaaagactcccctaggatcctaacgtcacctttgag

SEQ ID NO: 324788 - DNA, 858 bp, Cannabis indica
gatagactcttactatgtaggtgttctggacactagaagatctcagtttgaattcacattccatggatgtaccggctagaaatcaaaattgcaataatattgggacgggtgagcaaagtacaaaaaaaaattaagggggggcaaaatataaattttctaaagaaaactaataaaagttttgaaaaatgcaataaaaaaaaatttgggaggagccaagactcctttccattgccatgggtttgtcccgaccttttttactactaaggaaaatacatagcatgtacagaagttgtgatcaaggaagccttatggctaagaaagaatcacatgagagcgagctgatcaaggtgaacacttcaggaacaaagtattttataatatttcatgaaaggactaagcatatcgatttaagaatttacacttccttagataaataatctcaagtggcaaagttagtctcaacagaagaaaatgttgcaaatatcctcaccaaactttgccatcactgcctcaagatacttaatgtagccgaagataatactgtcatctataatattctacccagtattcaagtcaagatggaaaattgttatatgttgatgactaggattctgcttaagtgttatttatataaatatatactgaataaattatgcaattttatattaatagcaatcagttaaaataatagcatacaatccaatcaaagtatttttccgttagagacacgaccaggactagaattagaaaaacatatcaaataatcacccgcctaagtcccagattgtttgacaaaaaaaaaaaaaactaaaaaataaaataagataaaaaagattgcagcatcacaattaatcttaa

SEQ ID NO: 324789 - DNA, 1020 bp, Cannabis indica
aaattcagtgtactaacaaatcatgaaatttaaacttttgaacatataatcatgattatattccactgtgttgataacactataatcatgaataaataaatattttgaacttaatagaatttatacattaaagatataatcatgaaataaattatgtgaaccatgcaacataaaatgatttttgatcttttattaaatagtaaatctgattatattgaaatagattttatttagggcacaaaatccaacataaactatgaaatttctaatatgggaaaaaatactaacatttcaaatgcaacaacaacacaagccaagtggcgggtagcagtgatacggtaaactaaacactaatttaaaaaaaaatcaaatttaaataaataaaaagcaatcatcaatattacacatacacatacacatatataattggagtcagctgagcccagagcggctgagggagcaacattgtttataacaacgatttctcaagcaacttcaacttgaaatcaaattggagatttgttgattatggttacaagttttgtcatctagaaatgaaattgttaatctggaaaatagatatggaaagcttggtgtggatctgaaaaatcttgtgtggaagactttgtagaattcggaaggtgtttccaaataagcttgtattgtgtatgtattatctctctagatagcttgtcattagtctgaagatgtattttcgaatagcttattgccagttttgttttttcatttgggaaggagcgcttgtacgaattcaaaaggcttatgagtaatttagctcccggatggttcgtactgaaagcacgtctttaagctaacgtgaattattgttgctagtggtgagctggatcatttaagacagtgtaaatgtgccacgatattctcggaaataatttaggcaacaatgtaaatctataaatagctatcaatatttgtaatctaaatagaattaaactattatggagtaaaaatcgtgatagtgtaaagagagagagagagaga

SEQ ID NO: 324790 - DNA, 737 bp, Cannabis indica
taacctacatacatgaaaaatttatatattgatgcaaaataaatttaaaacatagaaatctaatatatatatatgtatataataacagtatatgcatattgtataatgtcttcgttattgcaaattattttattcaaaaaatacatgattttgagaaaataataatactatattgtataatataccactcattcaatgctaatattttgtaatcacaataataatgaaaataaaaatttataagaccgcgcgaagcgcggcttagttgcctagtttgtgtataaataagagaacattgaatattgaatagataaacatattatctattggtaaattaatatgtttttttatatctaatatttctaaatatttgtattattatttgagtattccgcattagtcttgggttgttactaacttgagtaatgttaaacatacatttaaattatacataatgtttacatacaatcatgtatatttaattttagctatatataatttcaaaagtgggccacatcactttttctttttaactttggtgaggagagatttaaatttgagaccttttctttgtgaagaaaagtgtagaattactaagcaatgtttagtaaggctatacatcggttggtttgggctatttatcctatatattttctaacctaatataaagtttgggttgctaaaatttaagtgcaactcgcccaatttaaaaaaaaattgtaaaccgaccaacggtt

SEQ ID NO: 324791 - DNA, 885 bp, Cannabis indica
cctgtcctcaaatgtcactataccttccggttaactcattttatggtgtaggccttatcgtccaaaaaaaggccaaccgaattcaattccaacactataggtgtcggtttcgaagagtcggctactgatagcttattgtccaaaaccgacgctatggttggtaatattcttactaatttttttccatcgacgcctactctattcaattttgcatcggtagcataggcgacagttgtaagacgagctgacgacaatactttacccgatgttgaaaatcatggggttccatctcaaaaccaattggcaatgagcggagtagccgatgttctttatatatggcttaatacttttacatttaatccatgtgggacaatattctccaatacccgactatttaaaaaaaaaattcattttttagtagtgcttgtatctatatatctagctgtttcttcacacgtgattagcaatcttttattaaattaaaatatattaaataattgaatttgcatgcatgccatccatttcgtttcctgtatataaatatagagctttcacttcacatatctatacacaatatcgtagcatatatataacacatatattataagaaaataaaaactagaataatacagaaatggaatcattcattgcttatattttatctctgtacttaataattttatgtgctaattttcatcctcagcaacaggttctggcgttagctacctctggatccgattatggtatgtatacacactacaaaattttttacttttagtctcaataaatttataactaaaaatgaaaaaagttgtgattaactataaattattattcttatgtaaatagtctgtggctataaaggtattagtcacaaaaattaca

SEQ ID NO: 324792 - DNA, 521 bp, Cannabis indica
atacaccaagatgaagcacgtgaggaaagaattctgatacaatgtagtatgaggaatgcaagagggaaagagagaaaacaatgtgaagaagatgatatgaagtatgaagtgtgtttatttagcaaaaggaaatgagtgggttttaatggtgttttagaattagatgatcaaaagggattccctttgtttattttcgtaccacttttggtgaggtgttgaaaatggcaataagactgtgagtaatccagtcaatattttcccgagaaggaaataaagctgaaggggtgatttccctgttttgtcaaattgagagctgtacgtttcctattaattggttaccactgcccgcccactacggtgcctcttcagtacctacctacctacagtgccttttcattaccaacttcatttcttctagtccaagaaaaaaaaatcttaatttctattcacccaatttatttcgtaattaaatctaaaacattaagttcagtattttttttttttgacttttttatttttac

SEQ ID NO: 324793 - DNA, 747 bp, Cannabis indica
aatattattatttattttttttaattccccccatcccaatgtttttagtaataattaggtggttaattgaaaataatgaataatgatctcatgagttttgtctcttcccaatattttattcagtaaataggtattcatatgtcttttactgagcatttcaatgttaatctaattaattgttccactaaacaaaatgaatgaaagatgaatatgcatagattaacgaaaatccttcaaaaatgatctcttcatcaactttaatgaagtaatactacatttacctcagttttcggatttattatacaaaaatgatctcttcatcgtctttaactccttcaaaaatgatcccttcatcttcagtttttggttatgtaattttattttttctttttttttttttttgtattgaattcgttatgtaaatttattcaaagtctttataaaaaaaattattgaaagcttattagtttaacaaatattattgatgtatttaatttatgattaaaagctacactaaattctatcgatcgagaaacatttgttacgataaaatggaataatttctttaaatatagtagttttttttttgtttttttcaatgaaagtgcttgattatatttttgatatttcatcaatgaagaaattagtgatatagtttaaaagaatactgtagcatcactacaaaaaacagctacttgtagtgacaattttttagtcacaatataaattttttgtgactaaatgaga

SEQ ID NO: 324794 - DNA, 475 bp, Cannabis indica
gggcataaaacccaacagccaacccgaaggtgaccaaaacccagaaactgggaatgaggaaactcatactaaagttggtggttatgtacctatggaggaggatgcttatgatcccactagataagtgccattggtagagtaggaaaattgccaactcaggtgatgtttggaggaggcgaaccaacgaaacgctgagttggaatgggaggcagccacagccagggcggcttaggaaaacgacgctcaaaaccaacctgatcctggagtgaggaggccccgaggtagacctcgctcaaggggaccgtcagaatgctcaggaagaacaacctggggaaattgaggatgcccctgaagatgagcaaccgaataaccaggcacataatcaagaggttccttggagaccccgggggtttgcaatccaggggaatggatgttggggattattttaccaggatctagatttaccaccatgtat

SEQ ID NO: 324795 - DNA, 602 bp, Cannabis indica
aataagatcattacattgcatcaaagaaaaatacagacaattgcagctagccaactctcaatcaaatctatacaagtttgagtctttgagagccaaaattgatctatcaatcctatttttgtgtgaaaagtttttctcaatctatttacaatcaaatgttttgcaaacaagaatgactctatttctttcagcccgtatgaaacaaacacaagaattaaagacaagaatataaactttggtttgctcactttgctccttctaatataattcaagttaccttggaaatggtaattatgagagccaattctaatccaattcaacatctcttttgtaaatctattgctcaaacaaatgcccatgagtttccaactcactcttacacaaagaacacacttcatcaaactctaaaccaaagacccttgagtctatttttgatgttcaactttttcaagaagccattatgtaataaaccaattctttggtatgctaaaacaagattcattattttattgtataaatactattattgatttttagtttcactaaaaaaaatacttttagtgacaattttttagtcacaacataaattttttatgattaaa

SEQ ID NO: 324796 - DNA, 1044 bp, Cannabis indica
tgcaatcactgtaagttattcttaacttttatgtgtttagttcatcgtttagaagttcaatataggttgttaaatcaacatacttgcaaatagatctaaggtcctggataaatataataccaacaaatagctcatgcgtggagctccccctagctgcggcgagctccctttagctgcatggagctccccctagctgcgtggagtagcttgtgcgtggagctccccttagctgcgtcgagcaactcgtgcgtggagctccccttagctgtgtggagcagcttgtgcgtggagctcctcttgggtgcattttagaatttacacctggcgaacttttgggcataacactaatgactccaaatattacacttagtaatttttgagggtcaatactttccccctagtctataagaagtctttcatgtgttcttgtagactaattttggtgagcttcatcttcatctcttagtcccaaggctggttcgtcagccatttgtcataggtcttttagacttaatctaatcgttcttcatccccttatcattgtattaaagtgttggtgtgctcatagagtatgcacgaccagctgatgcacaacaagcgaatgaatagccagcctactaacaaatgttaaactaaggaacaaccagctgatgggccgaaccagctcatggacgactagctgataaataaccagatgaaggaggattagctaatggacaactgactgagggagagccagctgagggatgaccaactgatcgagggctagctgagggacaactatctgaaggatgatcaggtgatggagggcaagctaagggacaaccagttgagggacaaccagttgaggaatcattagttgacagagggccaattgagagatgactagctgacagacgactagttgacggagggccagtggagtgacgacctgttgggttttatgccctaaataaaactccatttcaatgtaatccattttattcagcatcaataaagaaacagaagtatttttcattcatttgtgtatgttttggttcatct

SEQ ID NO: 324797 - DNA, 1229 bp, Cannabis indica
taaaataatttccaacacatacagtgtcccgttccagcaaagaggctgaatatagaagcatggccagcctcactggagaaataacttggatacaaagcttacttggtgaattgaaaatacaaattccaaggcctccaaccatctggtgtgacaaccttagcacggtgctaatgtctgccaatcccattctacacgcaagaactaaacatatagaactcgacctatattttgtaagagaaaaggttcttgctaaagctttgactgtcaagcacacccctgactatgatcaaactgcagacattctaaccaaggctctctccaacgctcagtttcttctactcagagacaaacttaggattgtatctctatccaccctaagtttgagggggatgttaagagcatagaataaaccctaactgtattgagttcattactttgtttgttagttatttccggtttttctgttgtaattagctatgttagttggtggacattatggtcatttcaatgacagtgtttatacctatataaagtgtattcctaccatcctttgattaatgagaaaccattttataataattcacttctttaacacaaaagtgttggaacttattttactaggatctagatttactaacatgtatgtttaattaacaccctaaatataaattctctaatacgatgaaattaaacacataagagtttagaaaactttacattgatgatagcggaataatatgactccttccgctcaaatctctaacccttgttcctttcttttgcagagtaataacaagatctgagcttggatctctttctctctttcagtttcggttaaccacagtcttgaacactatgattgagtacttgacttgctatgtgtgggcatagtactttatcactaaggctcaaatatgatgaagaacatcaagaagatttgaaatcactatgaaagagtcactcatctattagttgtccaatagagttagaaaatgaggtttagtttggttaaagtagttggatgagaatgagagcatcatgctccttttatagtatttcaactagggtttatgatttaattatatgaattaaaaagaatgaaataatgggcaaaaattaagtctagtggtctgccacttagtgggcctcactagttacaattttgctactttattttaaccatttatcttttctttcgataataccatatttttcaatttcaatcctat

SEQ ID NO: 324798 - DNA, 735 bp, Cannabis indica
taaatattttgaacagtttttttaaaacttctttaaatactttttgattgatcgtattaatagttaatcctctactcatactttagtttgtttactatttgtcaagacacactaagatatctcgtttatagtacatactataatatgcgagctgttatttattcaaatcgcattgagcttcatgttgtttaagaaacttaacgatcttgcttacattccatccactccaggcgcttttagcgcattgatttgggataaagcaagctgaacatccgccgctgtaaactcagagagcaggatatcattttgatgtctactgagtcttgaagggacaaatcattgaaggtaggctattgtatctccatcgaccatcgtggtaatttgctgaaaatagctcctagaagtgatcacagatggtcttctctatttcttcttttgtactcatccaattcaggtttttgttgaaaaggccatggattcgattcttcttgcaccgagaggaagctttttggtgaaagtatcttgtgtttctgtctccatgagccaaccaaatttccctactacgttgtttccaaaaaagttcctcctttgcaagatgcccattaaggtctctttccttctttttaagcatggaaaatctttgagttgagtgatcccgagagcacgtctccacttcttttttcaactctttgattttagctgttgggttttatgccctaaataaaactctgtttc

SEQ ID NO: 324799 - DNA, 1094 bp, Cannabis indica
acttgggagaggtagggaatcaaatggactattagacttgattttatatgtgttgaataacattaggcatattgttagtttttatggtccatataagagttataaaagtagaagcagaattttgataaaataattttgcgacccttcttgattaggctacaatcttggattggctagagcctggctgaccataccctgggagtgggtatgttcaaggctggccagccctaagccgggcaactggctttggccagttagccttgggttgggaaaatagccatggctggccaaccctactttgggcagctattcttgacaaaccagccctatgctgggtaggacctggtcgcccgttctttcttaactggctggttcagcctgtgcattgccagggggtagatcacaccaattgctgggtgtttccacacgttcccagacctagccgtttaaagactggcctttgggtacttgctcctagatgttctgggatgggagttcacttggctggctgtaggtgcaccactaaggggctggccgaccaaaggtttgccaattgggggtgtagttatgctagagaaacctggccagccccctaagccgtcaattgctagagtctggctgttctctccattagatctttatggcaagacttgtcctccttcgtggggaaggtctgtcctagttagactgtctgtttgttgaccctccccatttgtcgactagtctcccttggagaaaatctcagatgagatcctgacctcttccgacagttctttcattgaatctccttatcaggtcgctagcttttctgttacggtggtctagttccgcttggtgagattggaggatctactcttgctcatccatccatctcaaaaatttgcatctctgttgggtgaatacattgatgccaacaacacgttgtccttcagtttggcacacctgacagacgacctctctaagtttggctaactcgagatcttctcccaagtgtacatggggcttgccaatggcggctcgccaattcttggcctcgtcactccaacataatatcggggaccaaatttagtcgtggtgctcgggagttgctccac

SEQ ID NO: 324800 - DNA, 1396 bp, Cannabis indica
aagggctagagatcttgaacggaaggagtcattatattccgctgcgatcaatataaggttttcttaaacccttatgtgtttattttattgttttagagaattcatatttaggatgttaatcaacatacttgttagtaaatctagatcctggtgaaatattcctaataaataagactaaaagaaataactgtcattcttaaaaaaattataaatagggatagaacttatgataaaagggatggaaaaaatatctaggatcacctgcaataaattgagattgtattacttacattcccttattctgtaccctgtaacacaaaaaagaaaaaaaatccaaaaactaataaaaacttatggactatatagatttaattataaaactatgtaaatatcttatgccaagctatttattattatctattaacactaattagtagtaattattaaaaatttattttaagttataaaaatgttattgtaaatgaaagtctgagtgactaataacattgacacgtaggagagtgctatataaacacctctattgccttttggcgtttcctttctctttggggcagttatttttttcgcaataaattgttgtcttactataattacatctcccacaccattgatgataaaattacaaaactatgagaaagaagttaatttacatttttatgggcataaaacttatgtcattaaatgtggtaactagattaaaaaaaaaataaaaatgtaataggaaccccaacaaaatacaataaataaactaacaagatttttaaatataaatattaccaaaaaagttgtcgggttagtcattgtagttgaaaaaattgtcagaattgtcatcgtcatcaaaaaaattgtcaaagttgtccccgaccttaaaaaatcactaaaaaagtcttcagagttgtcaccattgcctaaaaggttgttggaaaatttttcatcagtggagttagatattagagttgttgtcggagttgaatgttggatgtcagaatctgacaaaaagaaattggttttgttacacaaccaaaataaaaattaatactcaaaaactagttacttaaaataataaaattaaaaagtgaaacttaaaaccaacttacataaataaaaagggatattttcaaaaatatgggaaaaataagccatcttatgataaatatggcaagaaaactaaatgccacaaaatatggcattaactaaccaagcaaactacaaatatggttttttctaaaaaaaaaaccataaaataacttaaaaacagaaactaattttaaatgaatgaaatttattatttttaaccatatataaacaaaaatcctctctctacactgattctctctctactgcgattctctcttctctctcctgcgattctctc

SEQ ID NO: 324801 - DNA, 1087 bp, Cannabis indica
catattgatagaccacttctttgggaacctccactacagcgccaactcaagaaaacccagtacaagagcccaccatagatccaaacagagctacaccattgtcgaccttgcaagaatccacaccaccttaaatttgacggtaccacccccgattggaagcacaaaacctcagatagatcgtcgaatcttcgatagagtcacacaacccgtcgaagaaagcccataaaaaattgaaaaaaaaaaagagagagaaaaatccatggcaacttgagaaaggaccaagaggctcttgtgcacacacaccacatacactcacacctgaccagagccacgccaaagcccaaggagaactggtgtggctctagtcaaaaattcaaaaaacttgcgattagggactaaataaaaaaaaaaagagagatgaaaccctaaaaaatctttttaataattaaagtgttagtaatcaattaatattattaaaatatttacaaataaaataaaataatttcatactaatagcagatagcagattaacattataccactaaaactgaaaaaattgataatgataaaatataactagttactaatgcgtcacaaaaaataaaaaatacataataaaaaaatagtattaataataagttcttaccaaataaattttcaaaataattagtttgacactaataactaattataataccaaaaaattatgtgctaaaacaatattaacaatccaaacgttaataataagacatataccataaaagtgcctaaattataatgttcataacacttacatatatacttaagctattgatgggtttccgtattggataaatactatattcctatcgtaagattttagtaattagataaatactatatttagtatgattctaaaataactaaataaataataataagaaaaaaatacttacatacttaagctattttttcaacaaaaagaaacaaacaatacctaaattaatttttagtggcgatttattcttttgtcggcgaaaatatataaattattatgttagtaacagttaaacttaagtgaattcttcatttcttttttttttttttt

SEQ ID NO: 324802 - DNA, 841 bp, Cannabis indica
tatattttatcactgtattatttatttttgtttgctatgtcatttatgtacactatccgcgtaaaatttatgtaaaataaatatatatattattgctaataatataaaattactcagttaaaatttatgtaaaatttatatatatgttattggcgagatctataaaacccgagctcgtcaaagaaacttcactaccgcaaccactactactactaccattaccataccatgaatgggtgcagatcctctatatttgaattgctacaagcatagttcaaccccaaataagacaacatactagtacatatgaccataataatttcaacacttactctgcaaacatttatttgaaaaaacaaatgtaagaacattttttagaaaaacaacatggttgacaaattactaattctaattactctatataatatttttttattttcacattttgggttgttttggtgatttttatataggttgttatatgaatttgagttgtaatttaaattgctctgttagttattatataaattgctatcactataccaaaatatagaattggtgacatttggattggtaacatttgtaaaaaatgtcataataatataatttaagtgacatttgataggaaatgtcactttaaagagaagacttgacattttaattaataacattttattaaaatgtaactatctatatactttagtgacatttgattaaaaatgccattagttttttcatatttaactttagtaacatttaaaaaatatcactaaaatatattaatactaacatatgtaaaaaggacacaaaatattaaatttaatgacattttaaaatgtca

SEQ ID NO: 324803 - DNA, 674 bp, Cannabis indica
  modified_base (452)..(452): a, c, t, g, unknown or other
actaagtgattatatctgcttattgttttacatttgtatttgtgttattttagtagttttttagttctgacctgctatatattgcattgggtattgaggttgtgcataactattttttagtttttttaatcatattttcctttcttttgtttgatttattttagtgttgttttacagttgttttgccacaattatttatttgacgtcaatttcactttctttttctcaatctcaccgaaatttatggttgttttccgatggttatggtgttcatgtggtgattctgttcgtaagtgtggaagatggatgcctcatttttttttttggtgtttacagtataaaagaaaaaaaattatccaagatagtataaaagtaatttctgccgtgtggcagtatttttgtaaagattgggccaagagtcagtatttttgtttttaagttttttttttttnttttttttatttttttattttaggcacctaaaataagtggaccctagacgcgggcctagcccaccaatacctagggtcagttctgaccctaggtatacatatatagaatatctaccaaatagcccaaggagtactgtagattttttcaaatatgggaatttttatttgcagccaaaaatttataagtaggcagaaattcaataatttttatttttacacaaa

SEQ ID NO: 324804 - DNA, 1350 bp, Cannabis indica
tttcggcatctagaaaaaaaatttaacctaattttttttttcatattcatgtacgctatagctatttaagatatgttacaaaattttgagaaatttggaataatttacaatatagaaaacaatgttcaaacagtctattttacacactgcttgaacacaattttcggcgtgttaaactattccgaatctcttaaaattttgcaggatgtcttataactataacttacatgactatgagtctcaaggtatattaaatgagtgtgagtgtacgtttctactttttaatcttaattacccctaggtcaatctcagccgtcagatcaaataactctatcatctgacggttgccgtacattacgaattacaatccgtaaaagtacaataacatgacaaaatcatatccctattttgtaatagattgtatttttaaaagaagcatttttgaaaattgtcttttaatttcttgagaaatgttagacacgcgctttgaagagcgtgtgaatgagtgttgggaagtattattatgagtgttataattagttttctttttattatttattattgttggatatgggcttgatccgctgtaagccttctaatcacaactgtattctttttcttttttttttttattttttctatttaaatttttaaattttcttttttctttttggcagtttgttctgaaaacacaaaacgacaataatttgtcatgatctttaaagatacatgatttattggttcaatatttcaataaggttagtttttgaagaagaaaagaataatgtaaaatgtacttattacattctcttgtctaactaaaaactagctatgttttgttgggtgagttttctatcatgttttttctttgttagaggagtttttaaagctttgaagctttgtattgtgtttgtgacaataagtatcttgtgatttaatattgagtaagttgtctaatctaatattatcggaagaaaaaaaaattataagacaattgaaaattatttaaatagactggtatgtactatttatatcaaccgtgtatatcttattggctaattatgatttttgccccctgaactttgacatgtatcaaatcatgctccttgaacttttaagatcgttaaaaatgccccttgaacaattgaaattggtggatttaaggatttttgtcaaatttcattcagttttactatttcaaagattttttatgtattaaattatgttcccaaactttgatatctaccaaattatgcccctcgaacttttacatgtactaaatttttccctctaaactttcatccatgttagacttttttactaaaattggaaaaaagtccttaaatccaa

SEQ ID NO: 324805 - DNA, 507 bp, Cannabis indica
tttttttttttttttgacgttgcaggctccacttgttgaagcgttgtaaatgtaaatattctaaggtctattaagcctttattttatttataaaaataccttttttttttttggctttaatgacatacaaatattattttattttttaaacaaggctaaatataaataaaataattcattataaaaatatatcacattaatttttttaaaaatattattaaaaatttaattagctttaattttcaaaataagaaatatgtacatttcttaacattactaatatcaaatagtacttacatctacaaataaataaatgatgtacttaatcaattagaactcttgtaataacaaataaatcaactatttcaaagtttaatttcaaatattcaagcttaatatttaaaattaggctaattaggatttttgccccttgaactttgacatgtactaaatcatgccccctaaacttttaaggtcgttaaaaataccctctgaactattgagatt

SEQ ID NO: 324806 - DNA, 553 bp, Cannabis indica
aaatttatatttactctattacataaccacgcgaagtgcatctacatttactagttattttataaagaacattgcaaagggaaatgggaccaagatcagttatgaactcaagttttttcttttttgggattagcaaaatattagcatcattacacccttcctcaaactatcctgtatcgaaaaaatcacgaacaaaatccaccacatccctcccaactataggccaatatctttggtaaaaagccagagtcataccatccagactcaagctcttgtcgagatgcatctaaaagataaatctcttaacctctttctcagaaaccagaagactcaattcttcattaattatacttggcatgatcacagaaacacaatccacaattccattacaaaaatttctcaaagcattgaaaaaggagttgaaataattaatcaccactatggataaaccagaatcctaatgaacccagtgttggaatatattttaccaggatctagatttacaaacaagtatgcttttaacatcctaaacatgaacttctaaaacgatgaa

SEQ ID NO: 324807 - DNA, 1826 bp, Cannabis indica
gagagagagagagggaaagtcagagagtgagcgaaagtttattttaggggtattttaggaatctttttgaattagtggaatcaatttgtacaaaaaataaacgggtctaaattttgatatgggatattttattaggggcaaaatatgaaatttcccttcaaagtaccgttgttttcacgttagtgctacgaaaaaacagtaaaaaacttgtaaaagaaaacaaggtggcagctcccccccccccctttttttttaaacgattaacgttttttaatttttttactgcaatgattgattgtattttggtcataactctctcagttgagaattagataattgaagatgttttagaaaattgaaagaaagatctagaactttcattggtaaaacatttttcttgaaactgaatggattatagttaaaaattaggttgaaggtttaaacttgatttttgatcacaaacagagcgtgttgagcatgcaaaatataaaatttttcactcattatatcttacaactccaaaataatacatgataaatctataaaattaattttatttaatattttttctctcatttcaacccatatgatgtatttgttaaaattttaaataaaaagtaaacaagcataaatctaaacaataaccaataaaaactactaaaaatatccataaaaatcgactctaaaacgtataaaaataaacctaacagcttatggataggtaacaatctttctatttagaaccttacacaaattataagaaaacttcgaataatttttttttctcaagaagaaaaacttttattaaacacacacaacaaaaaaaatccaaattatttgaggtaataaaaatataaaatatgttattttgaaatttaatttatacaaatatgttattttcaataaagtgtttaaatctaacgatagagattagaataccaggtgatacaaattgattttagattttgttgcatgcatgtactattccttgaaagtttgatcttttgtttttttttttttttttgaaagaaatgctaaagggtacctatagtgtttattatttttgtgaggcgtaatattattattggtacaatttaacattgtgtgtaacttattttattttaataaatattataaaaaattgctaaccaattataacgcgagactttatcatagtattagccacgatgaatacttcataagaatgcttattattatttcttcttttaataatctccagcatttacaatgatacttttgctgaccaagaaatgtcaattgtaatattcttccattacaattttattgtattatatgtatcaatttttgtgttgtatttgttggataaggaagataccaatgccaattatgccatgacgattttttgttcagttatttctcagaaaatcctcatcaaccggacgtagatcatctgttcagatcttgtgtccatttcactgctaaccagttagaatttgccacgtcaattatttttaacaccaaaactaacaagtaaggaatttaaacttttctttcattcttattattttttacaattattatgaatctttctagacaccaaattattgtatacaaataacaattcattgtatcttataaaaataaaaaatctataacataaattatgaatcttcccagacataccgaaaattttgggaaacttatgaaaatactgtaatttggattaatttttacaaaaatactgtcacacgaaaatcttttcaaaaatactgtgtttttataaaacaccagtaaaacacaaagcagaataactcaaaacatcagtagaacaccagtaaaacacc

SEQ ID NO: 324808 - DNA, 1091 bp, Cannabis indica
gatattttggtttatcatccataagtactctcactctattatgagttccatctagtgctcctaagcaattctacataaacaaagttttttttattagtattacaaacaaataaaccatttctacctaaactattttaattcaagaaattcaagaaatatatatatatataccttgaaccgtttttacctctcgtctgttaaattttcaagaacaagtttaggtcttttcaataattctccatgtagccaaatgattaaatgtaacacattatgaaaatatttgctaatagtctcactcaatctcataaatcaaaatctaatgactctatttttcacatgaatgagcaattacatgtaaaaacatagctacttgttcatctaattgtaaatatttaaatacttttaacgcacccctagtttcaagcattatgcataaaattctaaatgttttcctattcatcctaagttgatcaaaacaaatgacatcactctcataagctatttaattaatgtacaatttgcctattgacaaaaatatcaagtatgcataattgttttcccaaagagcttgattcaatactatgttcaataattttttcccattatttgaaaaaccattgcactacatgcaacacattcatccaatgcattaaaagagccgtgatcttcttttttctcaaaaattatctttctcttatagttaaacgagccattatcctatacaatgacaataattaagcaaaaactagagaacatcatttcttaaaattcagctataaacaaaaataagcattttgcttagtttagctcaattcaaaagaatgaataaagaggaaccaacatactttctataactatctaaatacatgtagctaaatcatgccaaatatgtataaacaacacattagaatcacacatttatagatacaaatacaaccttgaattgaaagtaatagatctcataatactttagtaattaatactacagtacaatacaatctctaacctctgtacgcagggccggccctgaaaatatatgggtccaagacgaattaaattttggggccctcaaaaatatataaaaaaaatta

SEQ ID NO: 324809 - DNA, 717 bp, Cannabis indica
tagtataaatgtattggttacaaaaaaaaaaattttgaaaacttttaagtatagaaaatcaaatttcccattaataaatgggtccacgattacttagagcattataagtagttagttagggatactattatgtttaatagttagggataattttgagtcaaaaaaaatagttagggatatttttatagtaattattatgcattgagtgattttagtttaattactacacttggaaagggtcttcttcaccttctttcgttcttgctccaatcataagtagttttagagaaattgttctatgcccattaaatctagagtaaaaataattaactatatatattaattaaataacaataaaaaaatagttattcttatacgataaaaaattaaaaaacactaaacatcaataacattaatattgaaatagatctaagatcatatctatttattgacgaaaattatacttcacaattttaatattgtgaacttactatatatgaggagtgctaaggacactctctttcacactctcttttgcactctcttactaatttagcgacacatgtcatcttttaaacaatatctatttttacttaataactagtcataatattacatttctattacattgatgccattttaactaatttactcaaataacttctatttatcaaagagaaaaaaaaatattaaaaaaaatcataataaataaataaa

SEQ ID NO: 324810 - DNA, 1348 bp, Cannabis indica
tagaaccttatttaagaaaaaacaatatcttatttttcaaaatcaattaaaaaatttgtatttttaaaaggaaaatttattttgggccctaggcacaggcctagcccacctatgcctagggtcgggcctaagcagagtacatgattggtgtgtgtcacgaaccatacgattctcaacatcataccgatgtagcgtgttgtaattggttaataattttttatattatttattaaatcaaattgtctgacatctaatattaatttacaataataatgatatgttatattttgtgatgtttgacatttatggtgccccttaatatttttctttgtattgtgtttgttattttttgaaattatttgggataagtaaagtcaattttgttacagcaattgttagatagaggttgtaagaacatttttaaggggcaccattctattattagtttcatttattttggtttgggctcaacttgtttgaaatgtcacaacttaaatgcagagtacatgattggtgtgttgatcacatgccatatatatcttttcgattggagcaatattgttattactgcatttattattttttttaattaaaataactaaaaagtttaaataaaaaattattttttattgttctaaccatattctttactatagctaatatttaattattttaacgatattatataatttaaatttgtcaaatataaatttattttataaaaataataaaaaaaataatagtacttttgattaaaatgtagggagagcttcctacatttagagagctctcaatttattcattattatggagagttattttttgtatagttgaagcttatttttccaagtaccactccctattttagctaatgagtaatgagtaagggtgttcataaaatagtcgattcaatccaatccgcacgatccaatctaatccaatccgtaaagggtgcagattggattggattgagaaatttaaaatctacacttgtatgaatttgatgttgtttgatatataaaaataatcgatccaatccaatccacacatatttataaaaaaaattaaaaattatatatacaattaacattttatgtaaagaaaatagcaatttcaaaatctaatacatatatacaaatatatttcaaaacttaataaatcaaatgtatattctattcttataaatatatatatatatatataaatatatatattctacatacaatttaaaacaaaattaaatattttttatacatactaattttttttcttcatttgaatttgttattttatttattttgatttgttgttggagatataaaataaaataatttattttattttgttg

SEQ ID NO: 324811 - DNA, 614 bp, Cannabis indica
tttttaaaaaaaaaaaaaaccttgtaattttctccaaattttattcaaaagcatcaataataattgtatggtagctaagaggtggcattgtgaagtacgtgttacacgaaaagtcactctcataagtgattgagcataatttaccttctactgtatttttcttaggaataataaagtgatcatgagaaaagaaaactgagggccaccttttctttgtccttacacattcatctattgaaagaaaacataaaagcacaagtaatgtatagttctatttattaaaatgtacaacatataatatttttagtttaattttataaaattttttaaataattttatttttagagtatatgataagagagcttttaagtcagctccaatagaacagtaaaatatcaaatttgattagattttacactaaattcattctaaacacattttaaaaactatcctatttataacattgtctatagtatcccactatatatcagtgtgacgccatagactataccaaatctttggtgttattgtcgacaatgtcccacatggaataaatggtagagaattgagccatatataagaacatgggctactccactcattgccaattggt

SEQ ID NO: 324812 - DNA, 1153 bp, Cannabis indica
atcaataaaaaagttaacttaatacattcgtcttctaactatatctttaacacataagaaaattgttataaaaaaagtaatttaaaattcttttccctaactgaggtgaatattattttttgaatttttcagaccatccaaaaatttccacatgctattgaaattattggatgacttttgtctagttccatttaattttactaataaatgtctaacacatcgattgctcatatatgtactgaattgtatttattgaactttaacatgtattaaatggtatcctctgaactttaaaatgtactaaattgtgtcctctgttataaatattgaacgaaaatttttaaatcgaataattttaataattttaaatctaataattttaataatttgatgggagaatttttaatgtcatataaaatttaagaacactatttgacacattaaaaaaaaaaataagcagcaaagttttacaaggatcatatctatatatgtacttatatagtaatagtatttttagtagataattttaattctattttttttttttttgctattgtgacaatgtgtaatatagttataggacaagactcataaatttaattaacatcctaaatcatttctgaatttcttgaaaattaataagaagtctcatataattacattatatatcttctagtaaaaagaatataactaaaacttactgagtaccaaatataaaaaattagctaaaagtacttagtgtttaaatttaattaatatttgttaaagtaaccactactatatagtgttagcctaatatatagaaaccagctctaatctttttattttcattaatttactcgcgcgtttttctaatatatataaaaaattattatctggattttattggactttaaacactatataaataagaggtgggcataaatcatctaatccaataacaatcgatcgatccaattataatcgaccgccaaatattaaaaatccaactgtgatcgtatcgaattggatattattttttaatatccagttggatcggatcggatgttggatggggtgtccaaaaattcaatcaaactaattagaatttcatttagtttagatgagtaattatagattttacattgttataagtaaaatatatatgtatata

SEQ ID NO: 324813 - DNA, 819 bp, Cannabis indica
cattgttatcttggtccaaaatcgtgaactgcagatcactcctccaaaagagacagaagccctttctctaattaatcgttgtaaatttgttcttttatctgtttcttctttttccaatctttctttttgcctttgtaacttctctcgtttttccctttcccctatttctttttcaaaccttgcttgttcaaatacttcgcgttgtctctttttcgattcctcttgtatttcaaactttgtagctatgtaatcactcgagttggcacaaacgaattttgtagccaaaatagttttcttgagatgacattctaatttaaacaacaaattgattaaatattatatcaattatctaattaagtatataaataattaatatatattaaataaattaattaggctagctaattaccttgttggaataatgaagatggagttaaattctgagtcttaaactgatcgttcattattatattctgttataatattaagccaaaaaaaaagtattaacactagcaaaaccctaatcccattaataaagttttagtaattagataaatattaatatgtttggatgtaataaaaaaaatactagtaaaaagaaaaacacattttatatatttattaacgagttaggaaaataaaaatacttgaataaattaagaacacaaatttaaaccttttctatagaaagaatgggcttatattgatgatgatgacccgatagagcgtgagttggtgctcgagtttcagatttgtgcgataatcttgagaatggcattctctcagtaaatttttcaatttcaaattgcttctctacct

SEQ ID NO: 324814 - DNA, 929 bp, Cannabis indica
ccccgttaataggatttcgtcctcaaaatctaacctgaatagctctggatgttgagtcctcatgactccataattgtagatcatgtttccagccatctacattattagattctcaaaatagaagttataagaatcatcttctctagaaaactttaacgagtgaatcaaagaaattaatagtatgaacaagagttcatgattgctcaagatttaggccgatctaccattaatcatattcatgatatgaattaggtctttgtagtaaacgataagtttgataaagacaactttattcatatcgatcattgtcatatataatttcaattatatacaacaccttcatttagatgtcttactacatcagtaatttaaatcgagattacttgcacctaataataggcatcaatgaaccatatttgcaatcattgattaaagattcctaaactttaatacgttactaactgttttattcatggttaagcgttcttaattttccgtacaatacaagtcacaacctcatgtatggataagaatttttttgatatttatatataaattaaccaatattaattattaataatttaacactcaagcatatatgaaaatttttagtttatatttctaatcaaaaatgtctttacaggcttttcatgacataaaccctaaaaattaataggtttagccaacacttacatcttgggaactaagtagtataattgagtgagagtattaatcatagatatgaatatttgtaagttctacttgttagaagtaaaatggtggttttctttcagcttggttaaaggggataaatggttgagatctcatttcagtactaatattagtttactgaaatataatttataataactaaggtagcgtttggttggaggtaatgaaatggaattgaatgaaaaggaaataatttt

SEQ ID NO: 324815 - DNA, 1001 bp, Cannabis indica
ctggaaaatacataacacttatccaaggtgtaagtataccttatcgccgattatcatgtcagtctaaatccagtgaactgacaaattataaaaattaaacttttgaacatgtaatcatgattatattccattgtgttgacgacactatgatcatgaacaaatatatattctggacttaatagaatttacattaagtatataaccatgaaataaatcatgtgaaccatgcaagataaaatgatttgtgatcttttattaattacttaatctgattatattgaaataggttttatttttaggcacaaaactaacacaaaagtggaagtacactacgggtatcgagtagtatgcttctcacatttgttatagtgcaagggaatagcgggggagttgtggcctcaagtagtggtgtctcagagaatccaacattaagtgagcgaagtaggtacaaagcctatgatgtgtaacgagggaaaataatatgcaacatgagttagtaatcagatttcttgcattcactgttaagacgacgatgaaggaaaagattttctggaaaatagaagttctggtctagagttaaaaaatgggggactttgaaaatctgaagtgattaaaaagaagaagtgggcaaatcaatttatatcctaatcagaatcctcgcaatttgaatagatggtttagatttctccttccaaaatcacactccgatatgatgaatgggaaattaaaagatggcatttaaaatttgcccctaccatttattatttatcattgtacacctcgagtaccgcatgcattaaaggaggggtcatttcaatcgtcctgccatcatcacaactcctcccaagaaatgtgcccccaacatgcacatgctgtcaacgaacacattaaaggcgtcacatgtgtgtgttgggttttgtgccctaaataaaacttatttcaatataatcagatttactaattaattaaagatcagaaattgcattttatgttgcatggtt

SEQ ID NO: 324816 - DNA, 2303 bp, Cannabis indica
tatatatatatatatctatttgtctatagaatagatctacattaaagagaagaataaaaattatctatagaggaagagttattggaggagtttattgaatagtcagaagaagcagagttgtaggaattgaaaataagagagattttgagcttaagagaagagtcaaaaatgttctaattaatgataataacatcaaacacacccacttttttctacatcatcacacacttttgtcggctaaaatgctttggataagattcctcatttggttgttcttcggagttcgattccctgtgacaacacttatcttgaaccttaaaatttttactattttaataataagaaacttttaaaaattcaacagaatagtcaaataataaaaaaagttttagaatttcacattaatgtgtcaaatatgatgttgataatacttgatgtttctgttaatattttagatatgacatacaaccttaaaataactcttatgcaactaatgagttgctcattacaaagaaggatgtattattggttgttgttgtgttgttgaccatgttcacacatagtagatgctattgacgtagatttttattaataaaaaatattaaccttttgtaataaataaactatagaattatttatggtaataaataaatgacagaaagtttttaacgtagttttgaagttaatttttcatagtccacgagtccatcttattaggaataatattatttgaatacaaaatacaatgatattagtagtaataatatcttgttttttctctagattggttgtcccttttaccctgggttgtgtccctatttatagatgtatagggtgtcagttattttcttaggatctattcattcataatcgctcatgaaacattaacattcatcatgttttatttttgtgcatatgtgataatattaaataaccgttcaactgttcttttatctttatctatagacggttatgctgactgtattagatgattctcatcgagtatacattatccttctttaccgtctttgtaggaaaaatgctaactgtggagatacaatacttattgcagttctcttttaccattttggaaggtattagcgaggcagttattttaacgcataaagagcgagatgaatgaatgttaatatcactctttgaacatactcatgagtatgtgggtcaattagctgcaagctcttacatgtatgtgggtcaataagttgcaagctcttactctcacgagtatgtgggtcaatgagctgtgagctctttgtttactcttcttgaacaactttctttatgtattctgttcatcccaagatggaggtgttgtctcgtcgatcttattcgttaatagttattattcttatctcgcttttgtctatgccgttgcaagttcaaatatttctatcaaccgtgattcccgaggtgagttattatatgtgcatttaataatacactgctttggctgattcgtattccttccctgatacacgtgttagcttctcattattagtcgaaatttaggtataacaactacgcactatgtaactaattttgatagggttggtttttcagattgggacatctctactcttaatccctttgacccttatatgattattggttctagggagtttagtaattattatagcagttcatcctcgtttgatgactatggtaatattctaagtgggaaatttagactcaccacccttgtgttatttgtttatataagtcttgatgtgatatcttttatcttacagatatggattttgaagacctcttttgtagtccatctggttccactaagcgaggcaagaagcgaacaacttctttggaagctacttttgggtaaaacctagtggcatgtttacttaaagggaatgggaatgaatggtatggtattgattcccatacaattgtttactaaattttggaaagagagaagctagtgggacccacacaaattagagagaaaacaaagggaaaggttctccccccattttaatagggaatttctttccctttccttacttaatttattttaattttaattttattaactaaaaatgaaaaaaacaaatatgccccttaaaaatctataaacataaaagtaattacatgttctaataatgacaattttgtcaaattaaagcattctgattaccttttctagttatgtaaacaaaataatatgattctagttttctttccggacagtttagtaaacatcataataaaatattgtttccgattattttctattctaaaccgatacatttctcccattgattatt

SEQ ID NO: 324817 - DNA, 997 bp, Cannabis indica
actaggaatcctagacaacctctacacatccgatgttttgcttttgaaagtgttattctaggtatgcgcgtctcctaaactttacccacaaacactgctgggttagcactatcgggctcaaacaccaccatcttctgcttgcagtcgatcgttgccccatacttagacaagaaatccattcccacgattatgtcaaaatcagacagttgtaactaaattagattagaggttaattcacaaccgtcaatccaaaaggataaagatcgaatccacctagcggatactataaggtctctcgaaggtaacagggtaccaaaaccacaaagcatacacatcacatggtttatggaaactttttattgccctacttgacatgtaggagtgagtagctcccgagtcaaacagcacagtgtaagaataaccatttacagataactgacctatcaccattgatggactagcatctgcgtcagcctgagtcatggtaaatagtcgtcttgagtttagatttgcattcttcttcggctcttctttcttggcctgaggacaatctctaataaagtggcccaccatgccacactggaaataagtgttggcccagcattcaccctgatggtattcttacatttcggacactcagggtatgatcaaaatgaagatccacggtcttgataaccaccgatgttttcccaaaacgttttgttaccccttgatgttttggaagcatcagccttctgtttgtgatcagggttactaccgtcggtccccttactgacattaccacttgcaggaggattcgatgtcgtggcggcatccttcgtagtctgctcctttattaaatgttgctcagcctcctaagctatcaaggctaattcaagcactttcttataaaaagtgtcgtgagcaatgataatcttcaagtcccgactgattgtagcattcagtcctctcatatattttttgtttcttggtgaaatctgtaggcactagatcacca

SEQ ID NO: 324818 - DNA, 857 bp, Cannabis indica
taacagacataacatctgggcccgaagcttacatatatactaccgataaagaagagcatttgtgatctaatttcatcatgctctgaaatttttatcatatcattgagtcattgtatccggtggtagtaggtgggcatgcgggaacttatctcatacagaggaatgcacgttatgaggaaataattacttaaataatatattcgttaaattttagggtttttttttaacacttcaaaatatatatatatatttttgtatttttatgaaattccacatagcaacccacatagcaaccaacaaaacaacctaaatcacaactaaaatctacatagcatccacatagattctaccagagcaagcccaactgtaaatttgaaaaagaaatgttaaaaaatggtataacaggtaatttcgctaaattttaattctatatattgagagcttagattttataggctcatggtccccacagtatctaagataatatctgaccagtgctcgggttgacattgacccctagtcaccaacatgcaagttgatgaacacaataatttttatactagtattaataatttttataggctcatgatccccacatcttgcttaataatgtattaattgtaatgaatgaagatgatttttatttatatttaattttttatttaatatatacatataataacacccataaatttagagtattaatgaacataataatttttatactagtaatatgttgatgttttgtataaaatgttgtactttatctttttttatacatataattgtaatatattatttgagttgtatatatatatatacaactaataaaaagctacgtgcgaggcacgtatact

SEQ ID NO: 324819 - DNA, 922 bp, Cannabis indica
tttttgtaaaacttaactcaaattccagtatttttataagtttcttaaaaaaaaaataaacagtatttctatataacaaaaatatgaaacactattgtaatataagagcaagtgtgaaactcttacctaatattttttaaatttctattttataaatactatatatatagtaagaaaaattgtcaaaaattaatagataggtctagctaggtgtactgaccaaagaagggaacagtcaaggccacaatcaaagttgagatgactaaaactgttctaaagataatggagacaatataatattgtctcaaagccattggcaaaagtccttctaaacccaatgtcacaggtgtgagtgtcaaggcatatttggttattggtaacaccacctgtaaatatataaataattcattactatttttcaaattaaatcaagaaaaataataggaaacatatttgtactataaatagttatacatataattatgaaaaccatgcatatataccattgttcaaattgcaattttagaagcaacaaattgtttaggcatgtttaaagtaaactgagattgagttgagtctccaaacattagaaaggcacacaccgcaactccaacatagagaaaactacagaaaataaagctgcaacatccaataacataagataacacttaattaagtgttatggtagatataaccaaacataaatataaacattaattaattaccttccaattaaaacaaatggaaatctggagggtttcttcattgaaatatagatgtttggaaaaacagaatggccagagaaagcataaccatatatgccaattgtggaagacaacttgctatgtttatgtatagtggtccatgcccatgaaacccacattgttcaccacaccaacccataacaagcatacgtatcact

SEQ ID NO: 324820 - DNA, 528 bp, Cannabis indica
atattttgaaagattagttaggaatattattagttcacaccatattctcaggctcaattaattcatcatgcaaattgttaaagacgatatatcatatgctggttcataatcacaattcacatacaaatattttcttacttcaaattagaatcaaacattatctattcatattttgctaataaaatataaatatagtaaattattaatatgaatgagaatttattgaaaaaaagctaattattaccaaagaaattaaccagatcaatttgaaagagtcttcttcatgaccttctctcgttcttgctccaatcaattaatagttcttgaagaaattgtttctttcaattttctataatctagcatcaataactcactgtcctcctttgtatattagcttgaaatttcattgcctctatgttcattacttctgccatatatctaaaataaaaataataaactatatattaattaaataataataaaaaataattattcttatataatgaaaaaatagaaaaaaattagaaa

SEQ ID NO: 324821 - DNA, 1915 bp, Cannabis indica
ccgacgctaattgttatatttttagctatagtcacactttgaagcataaatctccccttattttttgcctcggtcaaccattttggttagacgcgttcaccgacgcaaatagtactttttgtagttgtgtcaaaaacataaaaccaaaacacacaatagatacaaccctaaattactcctggcagtacgacatgcaggctggtgaggtcaatatgtacattgctggagaagactgtcgtctcatggctgctttaacttctttaacttttccttgcccttacctgcaccacagagcacccgttcatcatatagctaatttacatttcattatcataaattgattaaaacataacatttgtaggtaatataatcagccatatacatagaaatagatatgctcatataactgtatttcctaatcaagcaagcccgtgccataatgcaatatcatatataatatcactgcaccacctaatataggtgagcccatgcaacaacttgacaccaatatatcctatcacctaatcagatgagatatgtgaaggaaataaagaacgagcagtcggtctttgccccaaaaccttccaagaaggtgaaaacccaggaaccccccattacattcactgaggaagatgagaagaatgtgagatacccgcatgtcgattcggtggtcataaccattcaactcgccaataagaggatcaagagagtgttaatagacaataggagctcggtaaatatcatttataagtaaactctaaagaaaatagggctcgaaaaggccaagttaagaccttgtatggtgaatctttacagattcactagggatagcatcgctagccttggcataatcgatctcgcattaaccgtaggcgaggcacctttaactgctattgttatgcaagcctttttggttatcgacctgtcatcgacttacaatatattgttgggtcgtccagcactgatcggactaaggacagtcagctcgatcaagcacctgtctttaaagttccaaaccccagatggcgtggtagtagtgcgtggcgaccaaatgctagctcacgattattatcgcatagagctgcaacatagaaaagtcgttcatcatctgatgatgatctttgtaggagaaaacgagaggaaagatgaagatcttgatccctgagttcaagatgaaagaaacctactaaaaccaattgaagaattggaggaggttactctcgacccaggaaatcccactaaatgtgtgtacgttgggaagaacctggacgagcagctcaaatagcaattaataagctttttgaaggcgaaccaagattaatttgcctggagtcatggggacatgatagggatcgaccctaagattatctgccatcacttaattgttgatccaaactacccgacgatgagagaaaaaaggaggcccttggatttcgaaaagcaaggggcactaaaataagaagttgacaagctgttagtcaacgattttatacgtgagataatttatccctcgtggatagccaatcctgttcttgtcccaaaacctaacagaacttggacagcttgtattgatttctctgatttgaatcaggcgtgcccaaaagactattttccacttcccaggattgaccagttagtggatgcaactgctgggcatgagcttatgtcttttatggacgcatattctgaatataaccaaagaaaaatgtatgtcccagaccaagaacatacaagcttcgtaaccaacatggtactctattgttataaagtcatgccattcggactgaagaacattggggcaacgtatcaacgactagtaaacgaaatgtttgcaaatcaaatagggcaaaacatggaggtttacatcgacaatatgttggtgaaattgataaagagtaaggatcatactttagac

SEQ ID NO: 324822 - DNA, 1192 bp, Cannabis indica
aactaatgatgttttgaggtattaagcaagaaaaaaaaactattaagaaataaggttcctggcctcaactcaaaaactatatcaacaatcatttcttttaggccaaaatcaaatgttgacacagatttaaaaaccctaaattaacaaagaggggaataaatgccgcaatttcttagttctaccaaaacctaattcccaattccagataatcataaaaccaaagcaacacagaatgaatgaaagttagggtttttacataaaagataaaaacgaacctgggctttatcggcgagttgaacaacgagtcggccaacggggagaggggattcgtaggtgtagttataattgatgcactcggatcgcatgtagcgggagagaacccgaccgtcagcagtgagaccggcaatggcgacgccgatgtggtcatcgaccttgaagatcttcttctggtgagaagaaagctcggaattggtcttgttgacacaggccaataccacatgggtcttagatcgaagccctatggcggcagaaccttgcttgacagcttccatggcgtactccacctggaacaaccgtcccgccggactccatgtcgtcacatccgtatcgtactgattcctaaacatcctaacgtcgtcgtttcacgattcccactgcaaatgcttctctctctgactgaaatcgtagtaagagaattgttaagaaaagaaatggtaagagaatggtaatgttcaatattaacatgttttatttattgcttttcaagattaacatgttagtttgttacaagggttttgggattttattttgggattttattattattattatagaccaaaacaaatgtaaaagaattacataattaagatttaaaatattattttggtttaaaaaaataaaataaaaacattcctttgcttcaaagatttaaaatatttttttagtaatattaaattaaaatacttcaaatataaaaatactgaactataataattataattgtaattgtaagagcatctctaattatactctctaaatatattagagtgagtcttaaaaaaaaaaatgagctccataaaatggataaataattctctaaatgtaagtaatttcatattttttttgaaatttttacatcaaaaatccaatttattcaatttattacaaaaaaacccctacacgcttacatcat

SEQ ID NO: 324823 - DNA, 1412 bp, Cannabis indica
acaatgttgctcaactacaactttctcaatcccagctctctctctctctctctctctctccatttctcactctaacttcactctccattgtgttgtgtctctcttgttattcttctttctattcccctttgaaatgagataagtagttctctttatatataggccaaaagacccaatatacaattgctgtcatatttgacaattaagttagttaataaataactaactaactgaatattgattggggatttaaggaataataccacaaaatttatagaggttcccggaaatttaggtacttcctcttttgagcccgcctgagaagtatggttcaattccactatgaatcttcaagattaacaagttacaattattgattccaagtcacacgtaaatggctggtaatcctctttattacaataacatttctctgtgtttatctctctttttctctttaattgttttcttttcttctgtgtatgtcttcttctcccttaggtctccgagccctaaattccaggctccaccacatagctaagtctctcttctacgatctaattctgtttttgttgtagatttaggtatatatagctttggtaaggtgttaggtgagctggagttagttgcaacaatctttaatcttgcaactaacttcagccttgtgagtgagagagttaaatcccacgtgccatgtaatttttatttttgtaatttattttacccttattgtaattttgtatatgttgatttggacagtacatatggagatttactccaatagtacatctaacaacgcatcagaatgatagatattcctcctaagaagtacaattttttttaaacctactaataggaattactattaagcatgcaaggaatttttcttctattgtatcttcctttgttctttcgtgctacatgctgttctttgagagatgaatggaactttgtgaatcacaatataatacaacttgtctttgtaataattaaggttgtgtttggtttacttgaatggacaatggaatggacttgtcattccttaagagggcccaataaagtatttggtttctttattaaagcttgaaagtctattccaatggaattacaaatcacttaaactagggatttaattttccattataaaatcagtagaaagctaattccttactaacaaaagtccattttgctctatcaattcttctccaagaagttactttctcatcctttttttttttcgagcatttcttcttcttccttcttcttgacacgtgattgtgattgttgttctaataatcataggcggacccacattgtagcgagggggggcagtcgccccccctgaaaaaaaaatcgagaaaaaaatgtatatgtattttaattagttacaacatatatttgtattaaaagatgat

SEQ ID NO: 324824 - DNA, 493 bp, Cannabis indica
agagcttggcctttggtggccatgctctgttgtgaggtacttttatgttggttgagtttcaatggttcacttgagtagttggtctgatgctctaggtttctatagaacctaccgcaattgctgatcggtgtacacctttatagggtgtaactggaagtgtagccttagctttctggaagccaagagtaagatgtgggtcagcttctccacaagtgagaaccaacttagtgtcaatcaatcttttattgatgtagtatatagggtgctatgcactgtctttttctcttgtgagggtagcactcacaacatgtcatgtgattgctgggtgcacgcctaactcttcttcgtctagggatctaggcaacacaggtggccgagccaatttatttcttcaggtcttggaatttagtttcacattcctttttccactcaaattcgttgttgcttctacttcatattgaagaagggcatgttggaataattttaccaggat

SEQ ID NO: 324825 - DNA, 520 bp, Cannabis indica
ttcggaatcaaaagttatgcattctcaaagttggaactccaaattgcccagaaactcgagggtgggtcgcggcatgcccaagccatgctgcggcacctgggacgaactcccaggttccaacaacaggggcgagccacggcatgctcagaccatgtcacgacacgtgagttgaaaacccaaaaatacgccatgatcaacatgaattcaacaaccaaaattcaagaatttcaccacaaatcacaatcaaactttaaaattgtcaagataaggttgcgaacaaaagatagggaactaaaataccaacttttatgcattgaaatccaacaataaccctttatttcagattgcacataaaagcatgaaattaagctcaacttagcaacttcaagctcttgaaaaagagcttcaaacccaattatcttaaataatttctagcaacaaaacaccatagaaacacatggattagagctagagaacacccccaaaactccacctaaagctcaacaacataactcacaac

SEQ ID NO: 324826 - DNA, 1656 bp, Cannabis indica
aattggaataaacatgacaagttcacaacattaacttgcatataatataataataatactaataataataataatagtaataataataattggaactggatttcttttgtttgtttaattaaccagggtgaatcacaataagacaaacatcaaagcagaggtactttcatctaataagtctttttttagaggtaaaaaaaaattaaatataagtaactaatcgagaagggttcatcaaaccgtacaaactattcgcaacacactacattgtataaaaaatgcgatttaaaattttttgtagtgtgatttgtattttcaccaaaccatgcggcgcaatttacagttttgaatttaataatcgtagtttaaaccgcaccgcattatatattacaaaaatattaatttttacactataatttctttttttttttatatatatatatatatgaacaaatcatatacttacaaaacttaagtcataggattaaatttaaagaatatccatataaattattcttattttttttgtttccttttattattaacatatttttattgatatatataataaatatgtacattatataatgttttagagataattcaatacaataatttaattagtacatatgttatgatgtatgtatgttatacttgattagacaattcaagttgataagatatttttttctttttaattgtaacaccttaattcttaggtacgccacgcatgtgcatttataaactagtttataattataactagcagattaaataaaatagcgatttaataaaactttactaactaatttaaatcataaatcatggtatactcattttttacgaattgaaatattacaagatatgccattacaatattattataaaatacatttaaaagttcgtaacatttgaaatacaattcctaacaactcaacaccacttgtcatattagccgatatgtatatttgctggaaaagattcttgactcatggttgtccaaacgtctccacctattacttgcaccaaatagcacccgtgagtcattagaactcagcaagaaaagtaacaacaatcatataatttattcttcaaatattattatttatactcaaacaatcataatcaaacaatcacacattactcataagatgaaatccaaaccactactgacatttgtcacaaacaaacatcagtatataaatattcggtaatcaaaatcattgtactaataatagaagtcatattcatttaataatataattatatatgttacctcataaagtaactatctttattacatcacattgcataattaggtaagtcgatgctttaatatgataatcatgtattgcattgcctaatcaggcaagcccatgccatcatagtttgacacccatatatcgcatcactgcattacctaatcaagtgagcctgtgccataagatgttacccatatatcgcatcgcctaatcagacgagcttgtgccctatcctggcaccaatatatcgcatcacctaatcaggtgagcccgtaccaaaacatggtatccatgtatcacatcgcctaatcagacgagcccgtgccctatcctgacaccaatatattgttgggttttgtgccctaaataaaatctatttcaatataatcagatt

SEQ ID NO: 324827 - DNA, 1271 bp, Cannabis indica
tagtagactagttaatatctgatttttaacttaagtattcttagtaacctctttgttttatatataataaccaattagagaaagaaagttggaagaaatgaaggaaaagaattcattgaattgggtgagtgtttggtaagatgcatgtcagagatatcatctgaaaattatttggtaatgagagaaatagttgatgcaacttatatatagtatttagttttcacatattatcaatgtgaggctccctaactattataaaaaaattatttttatgaataaaatctaacacaactcgtataataatagagttatttaatttctctcttcttctcgtgctctcttctctcattgccctaaatttagttcgctgggacggtctttgttgacgaaataacccaaaacatttcttgtggcagagctttgattttcccacggatactttgttaccaggtatgatgctaggatgggacttaagaaccgatgtgaatagatacataacctcgtggaggagctcgacagacccttccatcgaagattactctttcaatttggattaccaaggattcccagaaattttcttgcgaaaccaacagaagatagtgtattgcagcgggccttggaatggagaaagattcagtggggtaccgaaatccggcaaacggtcttgaattcgactttgtcacgactcaaaaacaggtgtactactcgttttttaccacagaaggaagctgaataatctctcgtttgtcggtgaactcaactgggtatctcgagcgatacacgtggatcgaaagtagtcaaagttggagtcggttctggtacgccccaaaagatcattgcgacagttacaaagagtgtggtgtttacggaatctgtgacttgaacgcctcccctattttgtcagtgcctgaagggttttggtcccaggaatccacaggcctgaaatctaagagatggctccaacggttgctttaggagctttggtcgtcgtctccggcaaccgaaacctccacatgtcgactttgagctcgtccaagggcaactctgttgacccacttcctctaaccacttcctccacatttcaactgtgtgagccctcacatcgacagtgaaacccgtcatctcggacatgggggagacgctggagtttcttgtgggtcagaatggtggtggacggatagatttagggtaatgagagaagatagcacaggaagaagagaaatttaggggaattagggttttttttttttattattctttaattttatgat

SEQ ID NO: 324828 - DNA, 658 bp, Cannabis indica
acccgaaaccatacccgaacctaaacccgaatggattattgtcatggtatggtgctaaaatattgatttgttttcgtaagaattaatctaaaaacaatttttaaaaatttgtgccaaacaccattaaatttttaaaatgacaaaaaattgttttctattcttacttttaaaaacacaattttaaaaactgaaaactgaaaacacagccaaacaaattctaatagtgagtgaaaacccttttgccctgttcatactcttgaatgttgaaaattttgaaatacatataaaaagtgcttatgaaataactatatactatccttttccaaaaaaaaaaaactataaactatagtatatgtaacgtggaccgtggtccatggattgatataaaattttcaaaagagtcggttgaaacttttttgactttatcgagtcctgagaagtttaattggaatattcaaaacagtactgaatcaaaattaacttcagaatatttgaatggaatcttacaacatttggaataataaaaagtgtttaataagttggaaattttgaaatatattttatcaatttacaacttatatattagctgcgaaatttttgaacttttttttttttgtaaaagtcaagcgtatgattatattaaataagaaagctagac

SEQ ID NO: 324829 - DNA, 1459 bp, Cannabis indica
tctctctctcttattttttctcttctccttcttcttactttctccaaatgttacagtaaaaatgaaaaaaataaaacataaactgtataaaagtttaaatatatgtctaatcgtatttttgtaaataaaatatataatttcggataaacttgtaaaattcccaaaaataaaagtaaaatttgtatttttaaaattttacttttaaaaaataaaaatatattctataactatatttattttttaattttaaaaactaaaacaaagtgtgttttataatttttttatttttattttttgattttatcgaagtctggtccaggtccgtgtttgaggctggactggggctgtggtccgagtccgcaattgggatcggggccagacttcgggtcccaaggttcaagttgaggttggagtctaaaatattgatggaagaaaaaaactgtttaaaaaaattataaaaataattttttttattttaaattttttaaaattttgattctcatttaaaaaattgaaaagatgaaataattttataaaaattattttcacttttttaatttaaaaaataaaaaactaattaaaaaaataatacaaaatgtaccctaaacatatactatttttatcttatttagacaactaaaataaaataaatggacaacaatgctactttattcaaatcaaactaaacatcttgtgtcaacccaaaataagcttaaaaacaatacacacaaacaacctggaaaaataatttaattgcattcttttttcaatatttgagttaacaacaagtaacaacgtgagaagtagttagaaaacaggggagtcatggaatgtagtacgttttctataggctaattagtaatttttctccctgaactttgacatgtactaaatcgtgccctctaaatttttttggccgttaaaaattccccctaaactattgagattgttaaatttaagaaattttgtctaattttagtaaaaaattactaacatggaggaaagtttaaggagcataatttagtacatatcaaagtttgaggggcatgattttgtagatatcaaaatctggggagtatggttttgtacatgaagcagtaaaattgaatgaaattagacaaaagttcttaaatttaacaatctcaatagttcgggggaatttttaaccgtaaaaaaagttcaggaagcatgatttactacatgttaaagttcaggagaaaaaattactaattagccttttctatatttatttatttgttaattaattaattaaatataattaatattaaaatcaatattaatagattaattaatatttcaataattaattttaaactttgtttttaattataaaactatttatgctgtgatttttttttcgcatagatatttatttgcacaaaacttagcgcaattatctcataataataaaatactttattaaaaataaataaaaaaa

SEQ ID NO: 324830 - DNA, 1006 bp, Cannabis indica
tttgaaatgtgaaggggtagtttaggaaaatcattaaagtggtcatatatgaccaattttaatgattatacatttaggggaaaattataaggtatttaaagcatggaatttcaaatttccctaagagattgatcttagggttagctcatagagaagatggttaaccatttgacattgaatttggagtaagaacaagaacttgttcactcctccactagaactattataagtcatattttgtagtgcctacatatatggtttggtcaacgattcaagattttctcttaggtgtttcagtgattcttttgtttttcttagttaactttttattagacttttagttgaagtttttgaaagactttattctatattaattattgtaaatgatttagtatggctgtgttagttaattttgctatgagcatcattttcttataacgaacacatctaattgacttatttgatatgtatatttctcttctttaataaaaataagtacttttttttatattttgtattgatgttaggaatgttttagtacttgaacactcaaccacaattaaaattgagatatgaaaatgaaaatctcaaataagataattgtgcaattgtagaataattttattatagccatagagattacaatttctctctaagagcacctccaagtactatcattgtgtatatgtattttttcacccatgttcatcaaattgaattctaatagtactgtataacagcatctccaatcaaatacaaaaaaaatagagtattgttatctttgaacacactaaagaaaaatttatactttaataatgttttaaaaaatgtgctaaatttggtacaagatataatattgtgttaaatttcgttagattaaaatctctaatgtgggctcatatatatttgtgtgtattactatttgaagtttaacccaaataaagtgatcattttagtaattatgagtgttattgggtattaaagtgtcatgggctaaatgtgtaga

SEQ ID NO: 324831 - DNA, 1592 bp, Cannabis indica
tcggttacgttcgtaaataaaaccgtaaccgaccggtcggttataaaattgtaaaaaccgaccataaccgactaattttcacccctaccttttagtcacaatataagactcacgatttataattagtcacaattattttacttttagctagtcacaagttttgttatgaataaaagtgaaattttttgtaatgtgagaaggtgagagggcatatgcgagagagaaagatgtagatgaggataataactcaggtaaagagaagttagaagggtggaggcagctagggtttttggaggagaagagtcaggcaatggaagaagaaaaagaagaagaagaagaaaatagaaaagaaataggaaaaatattttatttatttaacattttaaattttatgttatttatttttaactattatttatttttataatatttaaatgattaaaattacatgtctcactagaaatttattatgtgtacagctgtgtacgttgtggcatgcctatggcattcaacaacaccttatagcaacagaataatgaataccaaaaaaaaaataaagtttgaagggttttgcctttaaaaattcaatttgtgttgtttagtataacaaaatgtgtaattcaagtagtttttctattaattaatacattttttttattattatttacttcaatctagctaatagtaaaatgtcttttaagaatcaaatgagattttcaacctcatatgtttaactttttgttcttatagagaggagaggtcatgaattcaaattaagattcaattcatcatctaaatttatgaggctttggatttttctattttttcccttgtaaatttgtctttggtaaaatagctatacaaaattcagcaaaagtgataaactttaaagaagaaaaaccaaacaaaactattgaataaaattacttatttatttaaagaatattaataatgtctcaaaatttgaatgattattatttatttatttagaaaaaccataaaagaattatctttcaagcaaatagcttaaatgaaagggaagggaaaactgattataatcacttaaaatgagatcatggatacaagaaagataaccaggccactaaatcttattaataatttctgacaatgcatatttagctaaggaataggtaacaacattaatagatctaggacaaaaaaaaatactaacataataaaattcatgaaagttattcctaaagtttgttaagactgttgataatcatggggttccatttcaaaaccaattggtgatgagtgaagtagcccatgttcttatatatggctcaatatttttacatttgatccatgagaaaatattgtccattattctccctcaagatggtggctatttttactcaccaatcttgaatctccttatcataagtagtgacatttgctcacttatttttttgttttgcggttgggagtttcatttgctcggttgttcttgttctcggctaggagtaccattttgcttgcttgcggctggctaactctttgataggtgtggatcgaaagctcgttagggatatggctctgataccatgttgataatcatggggttccat

SEQ ID NO: 324832 - DNA, 718 bp, Cannabis indica
gtagccacgtgagttcagcaacaacatttgccaatgatcaaaattcagcttcagtacttgatcttgatactgtatgctgctttttacattgccaggttataagatttcgaccaaagaagatggcaaagcctgaggtagatcttctatcgtctggatctgcagcccaatcagcatcacagaatgtaaccaagtctatggatgttggcttttttaggtgcaatccaaagtccaattagcctccaataaacctgagtattctcttgacagcaatccaatgagactgtagagggttttgcataaattggcagactttattcacactatatgcaatttctggtcttgtagttttaagatattgtaggccaccaacaatagacctatatagttgcacatcctcaacagggtcactgccataggcagaaagtcttagtccacttgtcattggtgtggaggaagtagaatgaccaacatgttgaatagacaaacctgtaccatttcctacaaagagtttttcagcaccattgtatgcagctatagacaggttgtaagcatcaggagtatagtgatttgtggctccagagtcaggataccagttgggatcttgaccagtgtgattggcaacaagattagcttgtgcagaattagatttagttgaagtggagctgcttgggagatgaggtgatacacctgtgaagcttttatcgaacctgtaaaagca

SEQ ID NO: 324833 - DNA, 509 bp, Cannabis indica
tttaatagtctaaggtattaatcatatgcggtctttacaaccaatcagttacttttttagaacatataatctaaaatggtattaattttttgttttgtttattagcatgttttatttgtatagagtttcgtttccttcatgaattgataaaatgattctttatttaaatttagttttttttaatatattttaaccaaacattgtcactcttcataaattgttttattaaaacaagttataattttttgtgttatttgtttatatatttatgaattactagagcaaaatgaatttcaatccaaatttaatgatattgtctaacaaaattatagatttattttaatttaattaatttaaaaatatttaatagggtttgaaattcaattgtagcacataatcttgtatgtgctcatttaacttcaagagagagaaaaatatgtattaaaattattttgatataaattaaatttatgtactttttaatttatcatttatatatatattatata

SEQ ID NO: 324834 - DNA, 657 bp, Cannabis indica
gcataaaacccaacaaaaatatactagtcaattaaacctacacatatataagatttgagagattaatcaaacttaataaatcaaatgccaactaaattaactaatttgttaaaaaagtaacaaaactcaattaattaacaaataaatgataaaaacaatgatataaaaaaaatcattcaaaattataaaaatataattaaaagcattttaactttttttctaattatacataactttgtaagcttttttttacttgttgcgcagggcttagcagaagttttcctatggtctttgctcttttgtattttactatattcttgtttaaatataattttttttaacaattgtttaaatataattgatgaaagtaagatatataattataaactataaattttgacgtaagttatgtgcctgtgacatatcttcacacgcttaatttatatatgtagatttataagttatagtatgtgttcccctgaataaaatatacatttgttttatatactaaatagatgttacgtgccaagtcacgtaggttaattttattttagtttttagctttttttaatatcataattttaaaattaataatattcaatgtagtgataatcattgaaatttgaaagcataatagtgatttaaataaaaacaaaa

SEQ ID NO: 324835 - DNA, 873 bp, Cannabis indica
cttctttttttaaacattataccaattttgcccatgttacttcaagatactttccatgtgactctcttatgtcagggtattttaggtacaatacacataaaaagaggtatgtttcaaataaatatgaaagtagaggtaaatttgattaattgattaataaaagtggtatttttcaacttaccccatatatgtgtatacatttgtgaaattagtcctttaagaatttgaaaggcacctttctaattttgtaatctatatttttatatataaatttccatatatgcataaaaacccttactatacatagatatgactttaatctactgataatatcttttttaatacgttcaaataattgtaatgtttttttttcaaagaccagtacaataattattaattcccatatggtgacaatgattaacagaaattagaagcaattaaaatttgattaattatgattcaaatcacgtctctcaatttcaatttttaagactgttaaaaatctcttttagagttgtttttcatataatgagaaatactaaccatgttgctcatggtttagcaatagtggtagaatcagccaactttgttaggggcaattttttttatttaaagatgttaatgaaaatataattattattagataataaatgcaaattttatggagatcaagaagaaaattttcaaaagcaaaaataaaaattagaaattatatatataggaacaaatataaaaaataaaaaatttgtgggggcaaaacatggtttagcaacagtggcggagccagccagctttgttggggcggggcattttttttggttaattaggatttttctccctgaacttgacatgtaccaaatcatgtcctttgaa

SEQ ID NO: 324836 - DNA, 579 bp, Cannabis indica
aattattaatgtatattattatttttgtttgattttaaaatactttttatttaattcttaaatttttaaatgaagttttaattaaaaaatacaaattaatgatgtggaccaataagagaatgacagttggacgcttatttggtacttaacggggaggtacctacggaagttccaaaaccttaacagaaggtacttttaccgccaaaaatttttgttaggtatttatctacaactccgagttaaagttgggtatttttgccgcaaattactcatcaagtaatagttattatgctttaatcataatatattacatacttcagatgatgaattttacataaatttataacttatttagataatatattatcactgcatcattaaataaagccatatatgtataaatttaattttaaagtttgtaacataaaaaataactacttccactttttacactttatttgtagacatgtgaagaagttaagcaataatatttcagtttttattattatgagatcatttatattttggtttgggtcaaaagttattgttattattattctgatctcttcatcttctttt

SEQ ID NO: 324837 - DNA, 663 bp, Cannabis indica
actactattcatctagctaaatgtggagaaagttttagatcaaaattttgtgagataaaataaagatgaggtaactcatatgatggagctaatatttagcatctttccttaaaaattttacattttagctattataaagcaccagtagttgggagtgctcttagctatttttttttttacttctgtaactattttatattaattattgtgaatactcttaaagcttccaaataagagattatgggttgaatgtcgatgaagctcggtatggctaaagcttttgatacaataaagtggtctttctctttcttagaaaggatcatgcgaaaatttcccttctcgtttccaatccctcattatgtcttatatcacctcagcctcttttaaatttaacataaatgaccatactcttggttttgttgactactaagagcactaattttaaattatataaaattagatagtttttaataaaagcgcttataaattagaatgaaatctatttcaaatttttttggcttttgaaataatgtttatataggaagaagatcattcaaagttattaattttgatattaatattttttttttgataagagatccatccatccatggttgttgtttttttttttttggaataaaagagatcccacaactccttttg

SEQ ID NO: 324838 - DNA, 1796 bp, Cannabis indica
accccaagaactacgaccggccactcgcctttctcaatggcgtacggttgtgaagcaatggtcccggtagaaacgttattcccgtcccacaggagaacgacttatgatccagctacaaaccaagctttgttacaggaagcgctggatcaggttgaagagctccgggacgagtctcaaatacgaatggcagcttatcaaaagaaggtgactaaatattttaactccaaagttaaaaacagaaaattcactattggggatatggtcttaagaagagtcttcccagccactcaagaacccggagtgggggtacttgggccaaattgggaagggccatatgaaatcgaggatgagatcggctccggaacctataagctaaaaaggatggatggaaccattgtgccaagggcctggaacgctgatcatctccggaagtattaccaatagtccaaatatgttaacttaggctttgtttaaagaatttgtaccgtcaaaatgtatgcaacctctaaattttaaataaaactgagtgccttaaaaacaaagttttcatgccactcaggggggtactaaggcataccacacggacagatgtaaaacaggccaaaagtaaaacaaagtcaaaaagaatatgcatcaatatgatcatatataaaatatcctgacccaaagggcaggtccaaaagaaaaaatatgcatcaaaaggatcatatatataaaaatatcctggccctaaagggcaggtcaaaaaaaataaatataatacaaagggcccggggacaggccttaataattgtctccccttaaaaaattgaatttggagaagtctattttgtctttctcaccaaacacattaccatcgattcaagttagccagcaacagcttctgcttatgccaatctacccttgtcatgaacgttaccttgtcttccatcttattcaggaagagacaaaaagttttatttggagagattaaagaaaaactatggaaacttctttcagcctagcaagagcaattattctctattggtggcaaagaaattatctttaaagttgtggctcaatctattcctaattatgcaatgagctatttttgtctctcaaaatctcttatctataaaattgaggtaatgatgaataaattttggtggggttcgaattcttcaggtttgggtataaattggaagacttggaaagcccttttcagatctaaggttgaatgtggtttgggattgaaaagctttgttcatttcaaccaggatttattagccaaacaggcttggaggatttactccaacccttcatcgctcttgagccgaatcattaggcctagatacttcaaaaactcatcgttcttggatgctggacatggctcttacctgtcactaacttggcaagggatcatttggggtaagaaattgttatcaaagactttaagatggaatgttagggatggacataatattgtttgtgctacggatccttgcctggcctctctcattttaatccattagtctttaagggtattgctcggaatatgaaagtctctaacttgattacagattcccggcaatagaattatcctcttctaaagactttatttcttgattccaatgtagaaaatatttagagcatttctttaacattgtcttctcaacaggatcaatgcatttggcatcatgaatctaatggtttatatgttggaaatattttaccaggatctagatttactaccaagtatgtttgattaacatcctaatatgaattctaaaacaatgaaataaacacataagagttta

SEQ ID NO: 324839 - DNA, 1814 bp, Cannabis indica
tttattgatattgaataatcaggattacattgaaatagagttttatttagggcataaaacccaatagatcatgagggcccaacaggtagcaatcgataatctctctttttgaaaattattaactaaccagacaacaataagtgggaaatactccaattatttaggatccgaacaagacagacgtatatatccctaacagatcacgatacaggctatccaattcgaggctacaggatcaaaccgtgtgggccatacggtagacaagtaggtcttgccagcgcattatcttggggggaatgatcagtataacattcatcctcatatgaatatactaaaccaatcaactgctaaaaaagccagacaagaaggtcatcaagtgtttatgttgattttatggtactaaatcaggtacagagcggaagagtttcgtattatttaattattattgtactataattcaatatatctcaagatgtgcatacattaaattaaaatataaaatataagtttagaacatatacctcttgaagactatcatggtatcctcgaaacttctcgtatatcgtatcccttaatccagatgatgaggatgatgcaattgaactgacactaatgtcttctaaattgatccaccacacacaaggaaaagtgtgagctattaggataaagtgtgtaatattgttcttattcaattctcaacacatgagcaagaacagctgagaaagaaaataatttccttttctccttaggtaattttgaaaattgatgtcatgaaaagtttttttaatttctcaaattaggcttctatttatagtagttaaattctattaattaaatcatatttacttatttaaataaataaatatttataaccgaattcgattactaatatttatgatgaaatctcttacttgagagaatatctcaacaactttgaaatatctttaatcactttttaaattcaaatatttatctaattgaattaataatttaattaatcaacccaaaaagacaaaaccaatagggatacctgacactagggataggtgtctaccttgtttgaattaagacaaggatgatctcttttgtcccaacaacttttgtccaacaaatattgtcttgacaaatttcatcttaacaatttttgtctttccctatttaattattttgaaaattattatttattataaaaatatataattactattttgtcaattcaaaatagatttttccgaacaacattatacaactctttttcccttcccttgataatgtttcaaggtggtaattcggggaccatggacctataattctaagctctaataaattagattatttaatgagtttcattaaccaaataatctttgtttattaattacatgattactccactataaatataaaattaaactcttagtaattataaaattatatttactaagttttactgcagtgtccattgatataatcaattcaagtgattagccctccttgtgttggttcacaattagttttggtaaaattaccgttttacccttctaattacttctttatcctttagtatcattaattcactagcaaaagtataattcagatcccatctgaatttgcgcacaacattctagtactagaattagacataaagggaaccaacatttgatccgttaggaaagttaggatttcataattgtagatcatatttccaaccatccaacattattagattcccaaaacagaagttgtaagaatcatcttctctgagaaattttaacgagtgaattaaagaaactaataacatgaacatgagttcatga

SEQ ID NO: 324840 - DNA, 1304 bp, Cannabis indica
cagccaggatgttagcatcccgattaatatgggagagccgagcagctgggaaataagataaagcattcttgatttgtttaataatgtcaccaaaaccaaaatatcttttttatgaccagaaagagcatcagtaatggctttggaagcaaaatctcttctttcagtgcttttattacatatatatgataacgtatacagataagtataaaataaatcttttaatttttctttttcagatggaaaaagataagtattaattaatgaggaaaataatatggttaaaaaattcacaaatatggatgaagaatatgctgatgacgatatgaaaatgcatgtaaattaaattatattattttaaattatgatcataataaaaacactagaagacagtgtaaggaggttagtaaaagagggaaataaaatgttgataaagacacatacggctgagtataccaaatgcatgtgagcaacacatggactcaacttgtcagaactataaaatatttatgatattatatattcaccatacccatacatacctctctctatctcattttcatcatatacaaaacttatgatgttattattattaacaaataacaataattataaaaacagtggaatgcatacaatacatatcatatatgaccaatatatatgcatgggtacacatacgtagcttatcatgtgtttcttgtttacaactaaaacatttatgaagggctagctagggctataggtagcacgtacgtactaggtagctattgttgggggtttcacaccggccttgtaagttgtatatgggtgtacatatatagccaatagttttgtttcaaaaagaattgttattataaggtatattatatggtgccgtgccaataccactttagtgtatgtagtactaaataattgaacattgttaagaggtatggtgtctagcaccatgattaccacgatgaaatgtaaattaattagtgattttttataatatttattaaagtaaaataagtgagatctgatattaaattacactaatagtgatattatacttcataaagatgctagacatcataaatactctttagtatttctctaaataatatcaagcggtacaacagaaatatacaagaattatggttaataccaacgccactattaccaatgtctaaaaatcctcattgaaaatgagggtatcaataacgacatttgcctgtcgttgggaaagctattcatatttttttttaaaaaaaaaaaaatagttaattaataacgacttttatttcaataacgacaatatcgttatt

SEQ ID NO: 324841 - DNA, 1425 bp, Cannabis indica
ttttaaatataatcataaaaaaaattagactaaaaagttctcaagagtgccaaaataaatataatgtattctatttatattaaaccttctaataataataattatatactttttctattcaaagaaagattgtttggctagttaggcgtgaaggtcttgaattcaatgaaggggccataaatacattaatgacacttaagacacatgatgggtgtggtgcaatgaaagaatcatttcatgtataaattttggaaaacaacaacatcaatgcttgttcccacatatcaaattgcccatttaaatatatgtgtagatatgcattttcaattctcttaatttgagaattataaaccacaaatgacacatatttcgtatactatatttatatataaatcattttcattctctcatcatgtttttctattgtcttgtctacttactctttgtctacaatagatgctatatatgtactcatttgaaaacaacactcactcgagaattaagataacgtgtaacttcatgtttattatgatcatatcacattctaattcatatatataaatatattttgtatccaattttattttcttggtcagtctctctgactttatctaattatgtaatctttaaaaatatttatatgtatatatggcaaaaatatagtagaacttaataagttgataaaagatctaataggttgggttctgcttattcaaatttaatgctagttaagtaaaaaaaaactcaaattattttattaaattagtattgattccaatacaactttaaaagaagatgatagaataaaagaatatgaaaggtttgataaaaaaaaatattaataagcagtagtaatggattttttttttttatgggagtgaccaataacaagttgttagcttattgaaaagtttaattaaaaaaaaaacctaaaaaaaatattaaagaaaaaatatattggaccctttatgtttttagaccttgtccagtagcccaacttgcacaccaataggactggccctaaactttaataaaacagacataactcactccattttgatccaattgacgcgattcagctcgcgtttcaaagacaataattcaatgctctataattctgaaaccatcgtcgtcaaaattcatcccaagaaagttacaaaaataagttccgggttactcgcagtgggacctgccagctccaaaaaatggccatcaccaacaagagcaaatttttattttttaccgttagatcattatcaacgtttaaaaatatcttatttgtatttttctcttatttttgtggatctccttcacctataaaaagaaaggtcatttttgacattcagaaaactacccacaaaatgagaacttctctctctagattttctctatttagaatttggagcttctgacacttagtctatt

SEQ ID NO: 324842 - DNA, 524 bp, Cannabis indica
tgcttagtgcgaccatatggacttggttctttgccaaacaaatggcaccttgactattgtaggaaacttccacgttcttctgaataatacccaaatccttagtcaaccagcgaatccgtatagcttctttgaatgcttctattacatccatatattttgcctatggggtagacaaagctactgttgactgcaaagttaatctccaacaaattggtccacttgccattgtgaacacataactagtagttgattaatgcttatccagatctctagtgtagtcaaaatcaacatattttacaagatgattaccatcaatcttctctctcttaaacttcaaacaaatatatacagtaccatagatatatcgtagaatccacttcactacttgccagtgacctttactgggattgtgcatgtagtgacttactgttggaatatattctaccaggatcttagatctactcacaagtatgttgtttaaacaccctaaatatgaactttttaaaacgataaaataaacacat

SEQ ID NO: 324843 - DNA, 1426 bp, Cannabis indica
atttttttgtttgaaaggtgtagatacaaatgaattgattatagcaaatgtaaattaattaaaatttatataggctcggtcttgtgtataggcagactagacctgtatttagagcctacttagtttaaaggctcaaaaataagttttcctcttttataattatatatttttttttacttagtttaaaaatactatcttttttctaaatagagtttttataaaaatactgaattttaggtaaaaatttataatttttttgttatacagaaattttttacaaaaatactgtatttttataaaacaaccgtaaaataacaaaacagaaaaatttaaataacagtggaacaattaaaaaataactgtaaaacaacagtaaaaacttaacacaataaacagtataaaacttacatagtattttttataaaaattcaccccatgataaaaaagtaaaaaaaattaaatatttctgaatgtggtgtaaaaaccacaatagagtttttcttttttttttttactccaatgactaatatatatcctaagtaagaaataaacctaaataatatgagacataggatttgatctgttgggtgtactagatagattattgccacgtgacagtttataatggcaatatttaatgctataaatatatatataatatataatattttatatagtttataaactgcatgcatgctttcgttttcaatagttgtatattaattcatatttttggaccactctatatatcgtacctaagatagtaagatctatcaaaatcaattattttatcacacttaatcatttttttaaaaaataaaataataataataagaaagcggttaataattaattagaagtggtgaattaaataattaaagattagattaaaggctttaattaattaaatgatgatatatacctgtggagacatgaactagaacctttaatttggtacactgcttggcaaagttcaatacatacttaggtcccattgtgttgagatatagtgaaacatcatatctgcacatacacatatgttaattataattaaactataaaaaactcgatattaaattaaattatattaataacaataacagtatgagtgacattataagttaagtattattggtgcccgattgagttcttttttttaattgatcgatcgatatgtaggtgttagacaataaaatactagtcatgttattcgtgttgctgctcgattttgaaacttgcagcatatacaaaaaaaagtactgttacatttagtgataattttttagttacaagataatttttttctgactaaatgtaactttagtgacaacaaaatgttacttgtgactaaaacataatatttagatacaaattgtcactaatttagttttaatcacaacaaagtattgtgactaaaaatacattt

SEQ ID NO: 324844 - DNA, 733 bp, Cannabis indica
tctccttatggccatattctttatgattgtatgactttggttgctgattttgatattgtttcttttatttttgctaaacggtctgctaataaagttgcgcatgttttggcgcaatcttctctttctgaggctgaccgtactttcagtagagactccttaccttttgtttttgcatccttggttttggatgaattagtttaatgaaatttaaccattatttaaaaaaaaaatgtaataataattattttttgattattaaatattataaaaaattacacaaaaataaatatatattttttttcaacaagcatattagtaagaatttataccaaaagaaaatatgctttaaaaatataattaaaatttatgaagaaggataggaacttggtaaagctacaattaatggtttttgttttaattttctcaatatagaaaaaagggtttaattaatttaacaatattttagattttttttttcactaagttttttagtgggagataagttaaataattttgtgtattatatgtaacatagacaaataaaactaaataattacatgtaaaaataaatcattatgattaggtaaaatttataaaagtgtatatgacattgaaaattataaataagagatgtattgaattttccaatgattttagatgtaagtttaattttataacataattagtagtagatgaagaatataattcaagttattaattttttttttttatt

SEQ ID NO: 324845 - DNA, 1138 bp, Cannabis indica
caaccaaaaggaatagaataaaaattgtttcttttccattctattccatttcattacctccaaccaaacgccaccttagttcttaccatgttcaaagtttggaataagaattacataataaaatgatgttttcatttgatctttcattaagccaagggaaatttcagaaccaaaaatgattttttttccactcactatctaaaaataaatttaatctatgtgaagttatatgcattgattacaatattaattttaaggttaaaaagaaaaaagaaaccaatcaaaagctttaaatttattggttggtcttttatgtatacaaaatattaaaaatgtttaaacatgaaacatcaatgcttttttctcccttcttctcttgaaatataattaatgtaaaataccctcaaagatacaaaaaaaaaaataaagtccaaaatcaacaaaggacaattgagcaactgggattcgatgatggagtttctttctcccatgaaagtgacaatcaacactaatactatataactacgactcgtccatcggttcatttcggttacaagactgagatctcaaatccttttcatcttgtcttgtttccgatgtctttgacacagaatcctccagcacctccagaaaggacagcactgtaaatttgactgcaaaataatgaaagacaaagttaaaacaaacacacaatcacttgacaataacacaatctatatatatcaacaacacttacagttagttgggtcaataccaaactgagtcaagtctatctgtccagttcgaagtacctaagcaaataattatcccggaaactgagttagcataatgcatagtaaaagctattgctacacatatgggatggatatcgaaattcatcattacatatgtaaatgaatctacttgttgtcggaaaggcgggctctgcaacaactccaatatatcctctggtgaccactggccctgtagccccaaaaggaattatatgacaaaaatgagtaggaaaatgataacaaattcagacaacgcgttatttattaccgacctctggtaagtaagatgctaaatgttgttctaacggcaatgtctctatcaatggcattatcaaatcaggcttcaatatatcatcaagtcccaa

SEQ ID NO: 324846 - DNA, 497 bp, Cannabis indica
aaaagataaaaagatggaaaagaagacgacgaacttaataaataaaataaaaaatagagaagaatcttttttagtatgtagcatggattttttcctcctcaattaataaaatccaccaaattaacacacatgcataacatgcagctaacagcttcatccagtcttggctttattcttaaaaatatatgagtaaaacaattaataaaaatatggtaggtaattgttatttgttatagaagattttaatgctgaaaatgacaaatgagaaaaaaaaaaataaataaataaaaaaggaatggacccatttaatgtatatgcatcttattataaggcaactcacccaactacttatttttattttaatttctttcaacaccgactgttatctatctaaacaactaactaatacaaaagcctttaatgtatagctttgaaatataaaaccacaaaaacaatatttaaatctctaaatctaatctctctctctctctttgctt

SEQ ID NO: 324847 - DNA, 939 bp, Cannabis indica
tttagttttcgtaaggtggttgcagcgctagttgcaagtaggggtttctatacgattttttgttacgatttaggttgcaacattaattgcaataagaatttactatgtaagaattacgtaaaaatgaccaaaaaaaaaaaaaaaaaaagaaaaaaactattttaaaagtgtaaaaataaaaaaaaagctcctaattattattatatcaaaggaaaaaaattcattaatcaactagaacaattacaatcaacaaaaggctagagccaaacaacttcaaaattaatagacccaaacattttctattgaataagttaagcaatcactctttgctctataaaactcatctttttccccagtatattatacaaacatgttgacctcgttcttaatcaacgacgctgaattaattaaagcgatgagaataaaaaataataaagaataattaagtaaataagaacacagagatttatagagattcgaccctgtaattatggtaatagtctacttcatttttagttgtattacttgtaagaaaaaaagtaagtaagatcttgatctctcttcttatagataatttgacaacataagagctctaaaaaaatatatgattttggatctctgttcaatggattgtctctactatttatacggttttccaaaataaataaaactaaaaaaggaaaactaaaaagatttcttattgtttcttgttggtgcaagtcattctcgaaaaatcagggatatgatcgagaccaaaatgttggatcatttatggaaagtatctttgaagatctttgtatgtcgaagtaccctgcttggaaaagttagcatctctggataatgaggatctatgcagggccgtctcaaagtgagaagaggcttggggcaaaatttaaaaataggctttttttatataaaaattaaagataaatattaatt

SEQ ID NO: 324848 - DNA, 883 bp, Cannabis indica
gagtcagatttcaacgtgtaactcgggtgatgatcgacgtcaaattttagtaacgacaacaactccgatgactttttcggtgattttttccagcgacaataccaatttcggcgacttttctagaacccactataacttcagtgacttttttggtaccgacaacaactctcacaactttttcggcactagtgacaactccagtgacttttcagtcgtcagtggcaactccggtgattactgttctttcatttataataatttcttaaaaatatatatatagagaattttaatattttttatggtaatttaaatttaaatggcatatcctatatatgttaagttttaattttaaatgtcatatttttttcttattaagtttcaaatgtaaaaatatacttttttttatatataaaaatagtactctatctaattatttttttatttttttctatatttattgaaataagccaatgctaaatgggttctcgatttccaccacatttttggccttgcaaattgcaatgccatgctatattatattgcttgtttttttaatatgctataaaactatctttattctttgctttgttcgtgcaatcatacccacataattaaaggatgtgctataaatatatatatttgtggcacaaattgttagtaatgggtcacaaaagtttgtgggaaaaaatgttttagtagggacagctgatttgattctttacatatcatttgtgtaaacaaaaaatagttaaggtgcgtttgtaaagcgtaattggatttgtgtgtaattaaaggtaattacacaatttaacatgtttgtctgaccatgcaactatactgtaactatgtaattgaaagtaattgaggggttccaattacactc

SEQ ID NO: 324849 - DNA, 755 bp, Cannabis indica
ttttttctttttgtatgatgattaacaagtgtgattcacctagatttctctttcttaccactatgcctttgtaattaattgacttgggaatggtttaaagtgaggttctttaagagctcttttaataaatggagcacatgtacgaaaatgggtaaagaccatttgggtttttgggcaccatttgggtctttcttatctattctatatgctgttggatttgtctttatgaatctgtaataattatatttcagagaatagtattctcaaagcacaattacatgtgaattgtaatcaaggacaacacttttaacaccataaaatagccatttgggtctggttgaacagtaaaatgatattaatgatgattactaggtaattagggttatggaagtctaatgatgaatttataagagaaaattaaataaagggaaacatttctacgtttaattttatttttatttataattttttatggtgttttataaaaatacaataaaaaatagtaatgaaaaaataacataaaatataatatacaaagataaaaaaatcaatgacgtataaaagacgtaaaaatatttaaaattatttttttgagatttttttatttttacattttaaaataatttatattttatgaaaattcacataacaactcacaacaactaaaataatttaaatcgcaacaaaaatctacagaaaaaattcaaactgtaaatttgaaaaaaaaaacatattaaaaaataatatataaagta

SEQ ID NO: 324850 - DNA, 1518 bp, Cannabis indica
ttaagctttgaaaattatcataaaagattaattttcacataactcaaatcttcattaattttgatactaaacaaattaaaattaaatacaaatgtagacagaaaatatgtctaaattatacacttaaccgtagacattggcttctcttaattaaaatgactttttgaggtcactttaaaaaatatcatttgacatttttagttttatcaacaaaattaaaatatcaaactcgcattactactcaacacataatgtgattatttttactcataattttaaggttatcccatccttgagattattccaaaattatatcaaagttaacaaaattcttattaattttgttcaatattttgattatttaagatacaaaattatttctcgaatttcgtaatcttttcacatttttgaatccatcatgattcacttttatttgagtctaaaattgtttttctaatttatgactaatttcacaagtttggatccacttttgatctatttgtttttgctataacaagacaattctcacaagtgtaactcccatagtttacttttcttatataatgagataattatcacttttaattcccaaatgatgtaacatctcaaaagtcacaatttttttcttttcaaaatcaccattagaaaagtaattctaaattttctttatttataatatagattataataattttcacatcaatatagtaataaacaatattattatattaatatcaatattattatcatatcatattactcatgttaatataatatgtatgttactaatcaatatcttatgtgtaacatacacataatattaatattaaattcacaaatatattagttatcatcattttataacatatgggccgggagttactaatagataacatctttaaatttctcgaatctagttctagtttgagcaattaattcctaagtgggggcagatttacaaattctcaccataaagttcctattccgtccaacaatctaaaataaggaggtaattattaaaaaagaaaaatgttgcttcaaatcctgagaagactgaagaacaagtccccaaataatctccaataagttctctttttgtaccatgtcgatcctaatagactgaaaactaccaaactagattgattttacaaaaaagcatctagcaaggatatgtagagaactttccacagcataatcacaaagagagcaatattgatcacataagaatggtaatttatacttagtaggaagagaacctgagatagccctactacaagaaaaatgagtattaatgaggacaaatttcgttggtaaaaactcatgttttcgtcagtatttctcatcaatgaggacatttcgttggtaaaaagtcgttgggaataattcgtcggtaaaaacgattatcaacaacgacttttgaagtcgttgggaatgaaaattatcaacaacgacattgtcgttgggaataatattttatttattttttattttttaaatctgagtgcatcaacaacgaca

SEQ ID NO: 324851 - DNA, 647 bp, Cannabis indica
tacttcatttcccaagtaattacatatttaataaaatatgtccatttaaatatcatttattttctgggatattacaaaaattttgcatgcccgtaacttgtgcaccatgactactccggcaaccatcgttggagctgcttgcttcaggccgatcatttggtttattcttcactgcaatgcctgatcgtaaccaccgtgaaccatcagcatagttcctgcgtcttggagcagctttcagttcaaggctatactcctggacaagttgttcctttgggacttcaaagagcttttcgcagaacctctcggagtgtccaagaactccacaaataaagcaaaaagttggcaagtcttcgatttaaattgaacctggcaagtcggaccaccacgaatttccagtttctttttcttcttcagtggcaaatccactctgatttttactctgatgcgcaaataatcgcgccaaacaccagaaaaattgttgggatcagacttaacaaaggttccaatgtaattaccaaccccttgaatcactctggctgacatgaaagtgtttttttttattttaaaattttgattatcaattaaaaaattgaaaaagtaaaacagttttatagaacatgtttttaaaaaatattttcattttttca

SEQ ID NO: 324852 - DNA, 1302 bp, Cannabis indica
tcaacaaaaataaaaattatttaaaaaaaatattatgtttatttaaacaaatatagttttttgggaaaattaaaattttaatatacttattttatatctaaataaattttttaataaaaaataattaattttttaaatcccttaatttgttttaagattttgatttctttttaatttttttaatcaatcaaaatgatgcatatgtcataatttaatggacaaaaatcctaaatagcgtaaaaattacgagacaactagtattgtagatacgtgttttgtcaatttacgttgacttgtatttcaaaaaattcttaaaactatgggtcatgttgtactatagtgtctcgtgccaactttttgtaagatagagtcggctcaattaagtccagtatctttgagtcgtgttcgaaattacagtttccaacatgctttactcagaataatatattttttctaaaactaatctattttcttatacaaactcaaattcatcctccactttttacctttattttttattttttacaattaataaactaaccactacgtatttttttagtttcaatcatttttatgtaatttttaaataataatttacacagtcatatcattactcatcacaaaataattatattaatagactttgaatacttaaaataaatactcaaatttttcatctacatctcttaaaataaattaatatataattttggttttatattttctagtagttttgataaaaaacaaattaataataaataaataaataaaaaacattgacttataatttctttaaggctaatttggatttttgcctctgaactttgacatgttccaaattatgcccctgaacttttcaggtcgtaaaaaaattcctttgaactattgagattgttggatttaaggactattgtccaattttattaaagaaagtctaacgtggatggaaatttactgggcacaattctatacatgttaaagttcagcgggcatgattttgtaaatatcaaagtttggggcacgatttagtatatggacaactacatattagcgaaattgaatgacattagaaaaaaaatccttaaatctaacaatctgaatagtttaggaagacggtatataagtaaatgtatatacataggggcggatccacatagtttgtgaggtataagattattagttaattgggttttatgccctaaataaaactccatttcaatgtaatctactttattcaacatcaataaagaaacaaaagtattttttcattcatttatgtatgttttggttcactttatcaat

SEQ ID NO: 324853 - DNA, 1573 bp, Cannabis indica
tataaatatatgtgaattggattagatagttatacatgttaattaataatatccaattggcacgcaagtctgaattttagattttccaatccaatccaatctgctcacaagtacggatatccacactttacggattagattgaatcgtgagaattggattggattattttatgaaggacctattagttatgggatgatgttatgcggcagttactaaaaaattctttggatagttatacatttattcaccatttcttcaataacttcaaccttcattacttcttcttcattaattattccaccaaatttgttattgtcttcctcctccttttctaaccactaaggttttactcacaaaaacatcagtgtacatgtactacaagaaatatgtgcatcaattaggataaatttcgttggtgaaaagctcatttttcgtaagtattacctattaatgaggatattttgttggtaaaaaatcgttgaaaataattcatcggcaaaaacattatcaacaacgacttttaatgtcgttgacaattaataatatcaacaacaacatagtcgttgttgataataatttttttttttttttaattttggcaaatcaacaacaacattgtcttcattgatgagtgtcaaaaaataaaaaaaaatgatttcgataaccaattggttactttatagtacactttatagtaatatttaaattaattatgatttcgataatataccaattggttactttccataaaatgatccactttaaataaaagtatctcttgtacataatattcaatttttaaattagttatgttaaaactatatattgatttttagtttttattatgttgattaagaattttatgttatatttttttcttttgtgtaacaatatttatgttaccttccatactatttatgaatgaatgttaactaagatttaaaaaaaatgataaaacagtaactaattacaatattagtaaccaaatagtttattttctagaaatagcaaaaagacatatgcttcacacatcttgaaatatttacattaaagaataaatcacaatggtatttttttagagtcaactgaataacaatgtggccataaattattttcaaaagtaaaaaaaaaaagattgagaaatagaaaagagagaatacaatgaagaaacaaaaagaatcaaggcttaaagaaaaatatttggtcatgtattgaaatatgctcacctattaaaaaacgttaataatacttaaaggaaaaaacgttaataatacttaaaggaaacttaaatttgatgttaaagttatttttgaaatggggagttctatttgcaccccttaaacttataaatacaccatattattaataaaatatataaatttaaataatttttaaaaattactcttaatatttttttaaaaaaaaattcttcaaattattttatgttaattttaatacttattttgattttattttcataattttttctaactcatgtgtattttttttttctaaaaaaaattcacataatttttattttaatttttttcataatatttaaaatacacttta

SEQ ID NO: 324854 - DNA, 3256 bp, Cannabis indica
aaaaatgtaaccatttaatagtcaccaatatatattacatattatatatggacccttctagtgaggcattaaaaaaatatcctataaggattttaaataaaatgggtctcattacattttgtggatataaaagagggttcatgaccactaaaatatggtgtattgtaggagattaaaaatgacttttgtcacaggtcccacttatttaatgttatatttgattgatataaaaaacacttatttttcgtatttaaaaaattacgcaataaattaaaactctcatttttcttctaataaaaattaaaaaaacacagataatgaaagataaaattagaagacatgtataatgtatattatctataattaaaaaaatagtaccaactaattttgaaagttttttatgcattcaatctttttttatttatatatatatatatatgtatattatctaatattttagagacaatataatgcaataacttgattggtatatatgtgatgacgttaaaagtttgattaaaattagttttttttttttatttaattgtctaaatattattagactaatcttttagtttttattttaatgtttgataatgatgatagtgtaaactgcctaaatcgcccagtgtaatttttatgattttaagattttgcggtgcgattacgttttaaaaaattgcaaaaaccacatatgcggtttagttttaaaaaatagtctaaacccacactatccgtatcgtgaacacccttatgagtgagtgttcctttactttcatgttactttgtgtttataacattttgttcatctttaaccttttttattcatttgtattttgaatatgtgttgtagcatttatttacttaaaatattagtttttgtattttattgcagtttatttgtagttttttgatttccactccattgataataatatatctaatataaaaacatacattagaatattttttcctaatttttttttcatagcaatttttgttaattataattacaatattaaacctgtaaatttaattttttttaaaaaaactcaagatagtgcatagtttcgacaacaattgtgatactccagtttattgcacatgtttaaaaaagcttcaaacttatttttgtcattgtaattttttttttataatatgctaaacgatgtaactataataaatactgcaataaaaagaaattagaaaaaaaatatggtgatatatgttttcggatgcataaattaaaaaagtaaaataaaataaaaagtttataattagcactcattgtgaataaaaattagcgctaagcattttactaatatgacattttaattattctttggacactcccatgatttagcaccttaattacacattaaaacctagaattaaataggataagcttcgaaatagaattcagggttgggaagggcgtattttatcttgtgcaagaaaggaggttttgctgaaatctattgctcaagccttgccgaattatgctatgaatgtttttctcttgccttcaaacacgtgcaaggagttagagcggcttatggctaagttttggtggcaatcgaattcgagtagtggtaaagatattcattggatgagctgggagcggttgtgtcgccataaacatgcagggggattgggattgaagtttgagagactttaatttggctcttttagggaagcaatattggcgtctgttggtaaaatattatgctagtggtaatctgttttctgctaaattgggagacaatcttagttttatatggcatagtattcttgaagctaaagatctaatccatgcatgtgctcaaagaactattgctaatggggaaaatgtctccattcttaatgatcctcggcttcctcataactctaacagctacgttgtctcacgacaccctgctcttgtgaataagtcggttagctgtctctttcaagtcgatactcgtgtttgggatgaggatgttgtgcgagatctatttatttcccgtgatcaggatcttattttgtccattcagcttagtgattaggccgctaatgatggttggagttggagacttgagacttgtgggaattattcagttaaaagtgcctataaattcttgcaacaatccaagagtgcttggtctcgagatgccaatactgatttttggaagcggctttggtcattaaaaattcctcctaaggtcagtaattttttatggcaagctgcttcgggcgtgcttccaacttgttttcaacttcaaaagcgtcatgttcccgtcagtgcagaatgccctttgtgcaagtctagtacagaaactattcaacatgcgttggttgaatgttcatttacaaaagttgcttggaatcgcaacatggtggacgtcgaggctggggctgcaacattcagcagctggttgttggggattttcaccaggggcaagaaggtgaaatggaggaagtggtgatggtaagttgggctatttggcgtgcgcggaatgaatttgtttggcaaatgaagagttggcttgctttaaatattgttacatcagctagaaacatgattgatcaatacaaattcgctcaaggaaggaagggtctttcgttgtctcctttaaatgatggggggcggaatcgtgagcgctggattgcacctgtgttaaacaagatcaaagttaatattgatggggctttatttgaacaagaggggcggtttggggtgggttgtgtagctcgagatcatcatggtataatgttagaagctttcaagaagggaaagattggttgtgtccaacccaaaattgttgagatcataggcatcaaagaagctttgagttggattgcaactcgttgttggatttaatttactaggatcttagatctactcacaagtatgttgattaacaacctaaatatgaacttctaaaacgaatataaataaacacatataaagtatgagaaatcttacatagaatgcagcggaataatatgtctccttccactcagatctctaacccttgattcctttctgttgtagagtataatcaagatctgagcccgaatgtcctcttgttgactctgaattctacacagtctcctcactactgactactctaacacttagaggtttcgaaacagagaagaagaaagagagagtgaaggtggcagctcaggaagaatttcagtgaaaggaaaataatgcaattgtgttgtgtgtgtttcctgaagcctttaccttctatttatagaataccacaca

SEQ ID NO: 324855 - DNA, 915 bp, Cannabis indica
accatgaaatggatattgagagggaattgaaggagtccttggaccttcgattgagcctttgatttttgaaaggctgaaagctggtgacaatccacgacttataactctgaataaattggctttttgggtgcaattacatgggatgatttcagggttcaaatcggctactgtggtgaaggatatagggaactacataggacagtttatagagtctgatcccttgaactttaatggtgtgtggaaggattatctaagggttcgagtctcagtctgtgtggataagccgttaaaacggagaatgaagcttcagatgaggggtggaccgtcatgttatgcaaccttcaaatatgaagatctcaccacattttgctttgtttgcggtgtgttgggacattcggaaagattctgcgacaaaactctagatattccgagacacttgatcactaaaagctttagcattgaaatgaaggctgctcctcggcgtcgacaacacacgataggggcaaaatggcttcgatcggagaggatgatcagagaggagagcaaacggccggtggtgggtcaaggaggtttgacttcagaaaatcccaatatggaaagtatgggattggaggtaaatcaggagagattggtaggggagcgtaataaggggaaagccataatagttgatgaggagaattttgtggtatttaataatccaatagggtcaaaggtggaccaacgggtagaagggggaaatctaatttgggaaggtaattcaaaagatggacctattgtaatcaatgatggcatggaatgggtggacccaaaaaggaggagattgtctagtgaaaataaagatgggcctttgtcaagcaataatggtatgggccaaaataaggaaagtatggatgtgtctgttggaaatttatttta

SEQ ID NO: 324856 - DNA, 821 bp, Cannabis indica
aaatcacgtaatacgcctaaattagttagggtgttataaggtgggtagccgtgtatcttgtagcatttttcaattgtgtgcccgaggatattgaagtgagtgcaaaatggcctattccttttctgttgattggatcttggtgcttgattgtcacttttttgatttcctttcttgtctccttggaaggcaaaagccatggcttgatttgagttattcgaattgggtatagcattagtacctctttgatgttcttcttgagtcacaagatggaacaccctattaacttcgagtaacagatccataagcaagatacttcctcaaacttgagaatatgaatctgagagcccatcaagaaggacataatgtactccatatggtagtgatcttaaagcttcttgactccaccgcaagtacaacccttgcaggtgcacgggggtctgtaattggtgagctcttcccatattgtcttgagtttagtgaagtacatactaatggtttgattttcttgcctaagattcataagattcttccttaaattgtatatatgtggaccatttttctggtgaaatctaaccttcaagtcattccaaatgttagaagcacattcatcatacagtatacttaaggaaatatccttagacacagagttcaaaatccaggaaataacaatgttattatttctataccaagcattgtaaagatttttatcagaaatagggggtttagagatagaactgtcgagaaaaccaatcttgtgttgggttttaggccctaaataaaactccatttcaatgtaatcgagattattcaatatcaataaa

SEQ ID NO: 324857 - DNA, 639 bp, Cannabis indica
atgtaaaagtttattgaaatagataaaataaaattttgtattttaaaagatagaatagataagttgttgtgagtgctctaataatttatagtatatttttggtacatgaggataggtcggggtattaaacaaaaaatatgtttttaaaagatttatatataagacttaaaaaatgggtacttttaagaaataattacattttgtttttcaaaaaatatagtggtaaaatttaaaatattttagtgatgtatttgaaggatagagaagaaaaattcttgtgagtgtcctaataatttatagtataaatatatttttgaaacttttataatataagattaaaagaaaattgggtatttttaagaaataattatattattttttttcaaaaaaatatagtggtaaagtttaaaatatacatatttttaaaaatgtaaaaacttttgaggaaaagaaattttttgcatgaatagatttctcaaattattcacataataaaacgacaataactcaagaaacgacagtggaatatgaaaacgacagcactaataagaaaaaatttcaaattttggagatgcggggtatcgaaccccgtacctctcgcatgcaaagcgagcgctctaccatgtgagctacatcccc

SEQ ID NO: 324858 - DNA, 1422 bp, Cannabis indica
taaaataatttccaacagttggatacccttaaagtgagccaacttttccaaccattcccattagtcggccaggcttaattttccagccacaaaaatagctttccaccactctgcttaacaaaagcacaatcaaaaaataattagttatgtatctcggttgccatttcacaaacaagacagtccatcgattctaacatgatattaaattgcaacattttatcacgggttaaaagatgagagtgaaccacttgccataggatgaaccgatatttaggcaagtttagagagctccaaatggctttgctggagttggattggtgttggggtaataggctgttatacaactaattcgttttaaacttaccaccagccccttccttttgaattttagtgcttggaaacttgtctctcaagtgacaaagcttgcgccaataccagctcgaatcttgtttgagatcatacgcccaaaagttgttattcttcaagtagatattattaatccatttaacccaaagcaagtcccttttagaagcgattgcccaaatgtatttggcaaggatagtttgattctattttattccatctttgaaaccaagacctccataagcttttgagagacaaattttctcctaagaagccacatggatcttacttctgtttccattccaaccccaaagatcttctttagtaacactatgaggaagaatgaatatgctcatccagtagtttcgtagcccaaaaagcaccgagtggatcaactgaactctcctttcataagaaaggtgtctgctagcccaagtatgaagcctttgtctcattttcttgatgattatgccacaatcttccgctttccattttgttggtcttaggggaactcccaagtatttaagaggaaaatttccttccatcaacccaaactctttcaagatactttgcttctcatctaatcccacccctccaaagtatatttgagatttggttgtattgatgaaaagacatgtcactgaactaaattcatcaagagtgtctctaagaactctgacagactgctgaacacctttgctgaaaagaattaaatcatcgacaaagcatagactcgtgaatttaaggtctttacacattggatgatacttgtaaggggaattgcaagcaatcgatatgtaattaagttgtctttatcaaacatgtcatttactataaagacctaattatatcataatgatgatcaatggtagatcagcctaaatcttgagtaatcatgaactcttgttcatgttactagtttctttgattcactcgttaaagtttctcagtgaaaaacaattacttacaacttctatttggggaatctaataatgtagatggctggggaacatgatctacaattaataaaatcttgatttttcctaatggatcgaatgt

SEQ ID NO: 324859 - DNA, 477 bp, Cannabis indica
ttttattattatataatttggcagggccatgaggataggtttagtgtttatgtacacgcttcaaaagaaagtccaactcatgtgagtcctcactttgttggtcgagacatacgtagtgataaggtacttgtatttcttctattctagactaatttttaatgacaatagaaacaatatatataccagttttggaagtgtcacatagataatttaaagtacgctaaaagcttatgatctcactataaattacgtttgatttatgttcattagattttatcttacaattgtttaatttgttcaatcagatcaatctatgtttgttcaaattaagtattaatcaccattccacaaattattaactcgttaattaaaaccgagtttcaaatttattatttcttttatagttgggtaaatagcggcataagtatacttaaagttttaagttattaagtggcataatcccaatgtttattttta

SEQ ID NO: 324860 - DNA, 567 bp, Cannabis indica
agtgtgcttgacctggggtaatttcaggatgggtgacctcttgaaagttttcctaagaagcgtgcgagtgaggacaaaacatgttgaaaatactcgtgttggtctatagagccagacatcaatctaggaagcagtcaaagtgacgtctctatatatgagagtcattgttctgtaaatctaaaggtccaatagaggcttaaaatagggacgttatatgcaaggcacatatgctttgttttattttagattatatattttgcttttataatgttaattcaattaaatagatgacatttttctaataaaaagatgtttaacgttaagtgttatgaaaaaaatatactaataattaaattaaaataatgcttaaagttttatgaaataattttgagaatttattgtacatgttacaatgttattaagtcacttcataattttaagaaaaaaaaatagaaataattatttaaattcctgcaagagaaatcaacattgttgagcccaaaatttgcctcatataagtttgtgaaaattacatgaaatattgaattttctaaaaaaaaattaaca

SEQ ID NO: 324861 - DNA, 622 bp, Cannabis indica
atgattccattaatcacttttactactaattagtgatgatatataatatggacacatagtacatatgatatgagtgtgcatatatatatatatatatgatcatgaataaaaaaaaaataaataaaggcaatatatacatttatcaacttaatttgatcaattaaggtttgcatattaatattatatatgcacaacaattctattattgagtcttgatcacttcatcatgcaccattaaaatatatttatacaattttttttttaaagatatctattaatagataaatcagtttattataaaaaaaaataacgttcataaaaatagtaaaattagtaagcgaaaatcctcgcaatatagatctaactaaaaatctaataagacacaatatcaagaactcaaatatttttaacattttgggcaaaaaattaaaattaaaccttttttttattaaaaaaatgtatttatcacctaagatttcattatttttttatttattactattcatttgataaattaatattttaaataaacgtttaatcaaaatatttatatgtataatattaaaaaaatatacttaaactatattaaaaatattgaggccctatttaattgggactttgt

SEQ ID NO: 324862 - DNA, 1407 bp, Cannabis indica
ttttgatcaagaatgagaaagagctgtttcttcatttctccatagcacaaaacagatgcataatcttgtttatttttgagtattttaagctcttttctgcaattaccaattcttttcttgaagttgcccgtaatttctttgccccaaatggccaacttttcagcacataattttatttttgaatcaatatcacaggcacttggagtgttccagcagtcacttacaatttcgtggcataagggctctttgagccaggcattttcaaagcaaaagcgacgaatagggactgaattatcaggtactataaactcaagcaacagcggactatggtccgaaggggaagtctcaagatttactaaccttgcattagaaaatttttggagccaagctaaggagacaagagctctatccaaacgacattcaatccatgttgcagttcctcttcctttttcccaagtgaaagggtgactaaccaactcaagatcgaacaaatcacaagcttgaagagtttgctcaaagccttctataaccatctaggatatgcattacctccacgtttatcattttggctcaatacattattgaggtctccgatgacacaccaaagcccaatattagtgttgacaagagatcgaagtaaattccatgaagcctcccgttgacatcttctaggctcaccatagaatccaataagcctccatttatcactgccttctatttccaccatagcatcaatataatgttgagaaaaacccaacacagtacactcctctttatttttccaaagtaaagccaatccaccactccttccttgggcctctaccaaaaacacaccctcaaattgcaaatatcgacccacataagcaattctatttttatcacattttgtttcacacaaaaaaataaaattgggtttcttattagacacagtctctttaaggaattgaatagtccgctggttcccaagcccacgaccattccagctcaggacattcataattcttggcgggcttaagaaccagcacccaccacaacagagttttttggcccacttattgtatcagataccaatagcccatcattaccataagtcagcccattaccatttgttttttctaacattttcctctttgaatctgatatcattaactccccatccacgattgattcatcctcaatcacattcctaatatcatgggaatttattgtatgtgagtcaaccaaaccagctggtgcaatatgggaattaactcccctatcaccattcaattgaaggccattaaatcccatagaatcagcaacatgatagcctttgccaagaatttgattgcctaaagatctccccggagttgatgaatctgccacctgactgtaacaccctaactagcataggcgtattacgtgatt

SEQ ID NO: 324863 - DNA, 818 bp, Cannabis indica
tcaatctcgttatgccattatacaaggtttgactcgattcaggcaaagagatgctcttaaagatattatgtattcatgtatcatattgcacaacatgactatcgaagatgaaagagaaacatatagttatttgattttaattacgatgaaggctccaccgataccccaatggttgaagtatgtcatggacctatttctgacttcttgactatgcttcaaagaaatgccgaaattcgtgacagaaacattcaccgcaatttttaggcagacttggttgaacacacatggtctaaatttaaaaataattttaattagtatttttttttaattatgttggattagttaattattatgttatattttcacctatttttaaatttggtgtaatttaaatttcatgtaatatttatttttcttaatatatgaattttaatgtattattgtaatagtttttattattaaaatgaataatatattaaattatagtgtgtgagaccatgatagcaattttagagttgctaagcattgtagtactttttagtggtaagtagctaaaaattaatgtggatgagagagaaaataaaatattatattttaaagtgatgtggaattttgtgacaatttttagagttgcttgcattggagatgctcttacaaccatggagaatacatatatgctcttcatgtaaccccaagccaacccattacatggagagcttgttgggctttgtgcccaaataaaattctatttcaatgtaatctttcctattcaattatcaataaagaaacatatttaattttattacttgtttaatgtg

SEQ ID NO: 324864 - DNA, 856 bp, Cannabis indica
ttacttataaatcagatcatattggagcttgctgagaagtacttggtactataatcatcggaggccaatacctaaacccgagaaaagaatctatttattctctcccaattggttagaccgtaggtgcgatgatttactttacgggcgaggtctctggttcaagtttaggatggcctagctgcgccaaggaaaagaatgcaagaagcatttgactccttcatgcatgctccacttggctcggagggatatagcttagttggtagagctccgctcttgcagttcatattctaaacacgcgagctagaatgctctgtagttggaattgtataatgagcctttgggcctatttgacttaagaaatgtctacaaatatttggacatcctttgttgacaacttagaacatgcgaattcattacgagtcatcacacactaattatttggaccaaatatgtaaagacgatttttacttgtcgtaggaaagacatacatgctcgtcacagataatagatatatgcgaccagtattaacttctcttggtcatgcttatcttttgattatgctggacataatttgcaactaaactctatcttgattacatcatcccgcaaattaaaattactcgagattggttctatgagagttatattattatattaacatattctttttcattaggaactgagttcatgtgttaatttcttagaggctgtaatttgtatttttgggcaaaaatttaggctataacacatttgtaacccaattaggggtgttcacaaagtatccgatccaatccaatccgcacgatccaatccaatccaatccgcaaaatgcggatatccgcacttgtgcggattg

SEQ ID NO: 324865 - DNA, 740 bp, Cannabis indica
ttaaaccaagaatgttaaaccaagaaataccgttagataggcacttttaatatataaagatatatatatatctatctattttgattaattactgcttatatttataataaaaaataatatttataaatataatattaattttgatgtaataattaatctaaattgcaggatagaagttaggttttctttttatgtttactttagcttggtgccttaaaaaaaattatgcctctctagctcattttaaatattaaatttgctattgtatatttatgtatgtaagttattttattcgctgcaaaaaatatgtaagcctacttacatttagcaatatataatttcactgtaaaaataataaagaatgaatattataaatgagaatatttttacgacgaacttaacgctgtttgctagtgaattaatatagaattttttttcaagaaaaaaaaaccttatatagtttcacccctaataaaaaaattggataagtttagattttgcactaataataaagttatcacaattataaaattttagtagtgtcatagtatatattcattttttaattaagtttttatccatctttttcatagtaaaaaatttagcttttataatggtggttttaataattaacgaaaattttcaaaatgttattattaaatataaggctaattagtaatttttcttctcgaactttgacatgtactaaattgtgcacctaaacttttttagccgttaaa

SEQ ID NO: 324866 - DNA, 679 bp, Cannabis indica
gtcaatatcgctattggtgtaattaagtatcgggtcccatatagtttaatataataatttttatggagtatcgctaaccaattgcaagtcgacacatctagaaggtgctaggcaccactggtgcccaatagcaatgctcttatttatgtaacatgattaatgacaaagtactctcacgcgtgttgtaagttctatcaagtttattaaatagttttttttttaatactttcaattattttagtataaaagtaagtaccgatagatctcacgaaaattatatttattctattatttaaagctaaacaataataaaaagatagattgtttttacttttccttgaaacaaaattaacaaataaaattgagaagagaaatgaaatgtgatactacaatatttaagaaatagttaaagactaatctccaccctcaataattatccttaattcctaataatgaatgttattttaatttttcaatcaaattattaatcccgcagattatactgaaccagtcaattatctcaatctctgtattgcaagtaatcaagacaaaacgctcaataattacctcttttaactaagcaataatatacactttagttaacttagataaagctttaaattcagtggagaaaatattaatttaagcaataaattaatgaatcatataattcatttaa

SEQ ID NO: 324867 - DNA, 551 bp, Cannabis indica
aaaaattatgaatatttaccatgctcaaaataaagtttaaacagttatttgctacacgtataagaaaaataatcacacatgtaacaaaatatttaaaatactaagactcataaaataaataaaaaatttcacaaaaaatatttaggagctcactagcaaattgtatcgctcatgtactaacaaattattacaaattttttaagagtttttgtgttacactattaaaatagtataagaatttattagtaatttacaaaggatgtgaaagcctataaatatataattgggtagttattatgaaatatagaatgagaaaatagaattttgattcaattagagtttgacactaattcgaaacatacatttaaaatttaacactgactcgaaaagtatgtctcgatacatttaatattgtattaatttgtttttggacatatttatcttaaatttttaaatatatatttatactagatgagagttacgtggcgagctacgtaaatattagttttatataagttctagtggtttttgtttaagaattcattaactaa

SEQ ID NO: 324868 - DNA, 961 bp, Cannabis indica
ttcacttagtttaattcttagtatcatgtatttataaacgttcacatattagcctttgtactatttgtctcccttcaaatttttgttggcaagtacatataattcccatgtccgacatatgtgagagaatccaaaggaaggtttccagttgtggaaaaaatttaaaattcacgcaaattttgtaaactttttttttttttttttttttttttgtaaaaagaaggaaatttcattaaggttaaaatggaaacaaagcccaaagagtcaggcataagcaaagacgtatacaaatctcataaagagttaccaaacaaacaattaaccacaccaattacaaaggtgcaaaagctcacaatacaccaaacacaaacggcaaaagctataatgacacaagggatataatcacaaagcaaatagggtatacaaaaataaataaataaataaataagaaataaacaaaaagatacacatcccttgttaggattaggaggactttacaaaatttaacaaggaatttagcaagataaaagaaatgtgagaaattttaaccaaaacatgtagaatcaaatcaattaaactttaaacaataaaaaattagtcgtgacaagattaacaaatcacacttaataattggaagaacacagagataaacagagtaaggaaaaatcaaaaaacaattaagacagaaaacaacatcaagatatatactagttcaagtccaatagatcgatgtgatctatgactctgctccagttttggaacaccactaaattatctttattaattgagcaagaacaagtataatacagattgattctttgatgagttctctcaaagtgtttcaacattcacactcttacccatgaattaatcttcttcatttacagaagattcttcttacaaaactcaaacccaatcactctcttttctttgtacctctcccccccccctctctctctct

SEQ ID NO: 324869 - DNA, 653 bp, Cannabis indica
ttttcttttacttttactttgtatataagccctattaatattgggtttctaccaagaatagttaaagaaagctctgaatgtattatcattattttttataatttttttttattgatcaatacaattaattcaatgatttactgtgctatttttaatcataacttctttcattaacctcttttctcttaggctacatttaaatttaattgttatattatgcttatttttttttatgaaacacattgtttactatattttatttttttcactgacattgtttactactatattttattttctcactgctttgttagctttttctcctcaaaatttcctttctactcaatattatatgatccaatcttctttcacacacatgtacatatactacatgcaaaaacacacataataaataaatgtatatatacatatatagatatactagatgagagttacgttgcgagccacgtaaatattagttttatataagttctagtggtttttgtttaagaattcattaactaagcaacgacaacaacaatggtagatagatctatttaagtttttcatatttgtaaagattataaatctaaacttttaactttcttgatttgagattttgaattattctgatttatttgtttatgaattta

SEQ ID NO: 324870 - DNA, 2087 bp, Cannabis indica
aagcatttggtaaaaataaaacaaacacagttgcatgatgattataaacagagaatgaaattcattaaagataacaaagcatgtaaaaccgggattagaggttgcccggtcagcccgttgtttgaaaaatgaaaaataattccaagtttaaagactgcttggtcggtcaccttgtcttaaaaaaggtcttatggccagatagataaaataaaagatagaaaaagcaagtagtcaaatggctggagttctaggctctttgtacgggtcttctaggttagttggaggtggatgatcgtttttctggatggagggcacgtcaacagtctggccagaggtagaagtggaagtctcgggttccccataagccacttgagaagcacagtactcgagaaacatgtctttggtatcgcctaggaaatcaaaatttgcttgaggattagccttctagaaatcataaaaaatctcgagacccactgtctctaaggcatttaccttcccaccaagcctcgctacttcattttttgttgctcggcctctgacttgtacttctcaacctcactgttaagctcctcctccttgttcttcttatcttcttccaacctatggaagacagcttgaagaacctccctttcttcctcaaggctggtcacttcttttgacaaggaggcaatggcagttttaagttgatcgacagcctgtagatctttagtcagttcggccaccttcttctcagtagcaagaagtttcttgttgacctctcccagtttcatccggacagccccaagctgaaccttggcttcatcaacatcattcctagccaaatccacttccgccagtatagtgttggaaatggcggcattcttagaggcagccgatttggcccaggaataagcgtaagctatcttcagaccagtctatacggagaaagagtgttaaaatatgaactatatgaagaaggataaagggaaaatgtcaggaaagacttactcttgcaaactccttcagagctcctcccatcaccaaatccagggaaaggtcattgtctgccccagccagctgctcgttcgcctcagggaccgatcgagtcacatagtgaatgagcatgtctttgcctcttttggtcttcgggtgcagcaccagaggtggggcaggtgccttgatcagcttggatccacccttcgattgctctggcctatccgagctacctcctcgagagtccttggccttagtcatttttgagacaggagggtccacaacagtttgttcctcagagagatcaatgagcatttcagctggtgtcttctccctagacgcagttgtctcactgcctttggacctcttagccggaggagataagcccgaacttccttccactctcttcttcagagcctcaagcattttcagagacatgtctgcacaaaatgaaagtaacatggttaaaaaaaaacatgaaaaatatgaaggcatgataattaagatggttgaaaacaagatggagtacgctgcactttggtagtggcgtctacccgaacaactactgaaggggcatcgtcatccgacgagtcctcttgctcctctaggacggctttcctctttcctactaaaggagtggatggtcgaacaggtaaactgggctccctgatctgaatcgtatgttcgataggcctgtgcccggtcagaagtttcttcttccttttgagcagagtctcctgctcttcctcaaccacatcttcctgctcaaaatgctcctaagcatactgcttggctcctgcacctcccttcaacttaacctcacgcttcagttgaatgggttcattctcttgatgagctccctcatcccggccagcactagatttcctcttcttctccttcataggctgtggaatgaaatcctttggataaagcccgtactccacaaagttggcttgaggtcaacaaagtgatattctgggcatgatccggtagctgagcgatcctttgagctatatctctaagagctagcgtgaagggtggatggtaatatatagggatctactggaactgagtataggtggtgcccatgccttccaccatgtaatactcgtcaa

SEQ ID NO: 324871 - DNA, 1196 bp, Cannabis indica
ccaaaccgtaaattttaaaaataaaaaataaaaaataatatataaagaaattctcataaaataaatcatttataagacattacttcatagaacaccaccctgtatatattgtacataaaaactaaatatacctaaataactatgcatttattaagtaccacaaaataataaataaaaaacctatgcatttattaaccttgtatgaggtgtggtcactttgggtccaaagctcctcaatatagttagggtggggcttcagtatgagtggtaatccacattataccaattatactaggcatcagtagtatctaacacaatctataaatgacatcttgcgattagttaccgatactttataaaaattattatattaaattatataacacttaatacttaattatacaaatatattaatatgacactttaaagaattagagtactagatatcactggtactttttaatatttctccctattacacatacataagatcatctctatatttgtgttaaatttacctcaaaataaaataaaaatattatatttagtcaaaattttataattatgctcaacaaaagttttaaatttttgttaaaagtatatattaaaaactattctattaaacttataaataaatagtaaaaaattatcaattcaataatatgtggtaacaaaaatataattaaaaaaaaatgtaatacttattgtaaaataaatttaactcgtgatatattttgcgttaaatttaatataaatttttagtatgttttaaatatttacccatttttttttaaaggtaacctaccttaaaatttaattttatgaatattggctaaatatatatatatattacattatagcatttcactgcaaatactgaaattcaataatttttgtggtgttgaaggtgttaaggtttgtaaaagtggatgagatagtgagagaggagcaataaatgcaataatttcatattaaattaaataccatacaaagtagacttattttatgtaatagttagaacttagaagttaaaaagtcttagcaccactatatcttagtatcttacccattttatgtattttcatatcaatccttttctaattgactttactctttcttttctttcttttgatttttattaattgaatcccttactaaatcttcaaaagaatatgtccatttactttctaatctca

SEQ ID NO: 324872 - DNA, 2059 bp, Cannabis indica
gataactaatcagattgtaaagagttttatttagggcataaaacccaacatggacacactacaaataaatgtgaatatttaaaggacaagattgaaggcttagtctggaataatcacttatccaattgggtgcggatacccgtcatctatcctgaacaaggaataacacacatacaacattattcttggatagcctggaaccataaatcctcccaagaaagtagtttttgcacaatctcttagaatacaagctctgactatacaggcccctcaaggggtacaaatattcccagtggcaagacttgtagttgctcctggaccaggagactcgtatccacctagagttattccaccaacttcagatggccatgtggtagcaatatctcgaggcccacatattgccgaaagcaccaaaaacgctcaaaagagatatgtgaatgagcttgaataataagaaacatacaatcttgtacacacacatgctcaccatcctcaaatgatgaatcttccaataacttttatagaagatgatgcttggcacatgcattttccacataatgacccattagtaattgaagcccaaattaaaaataagagggtgtcaaaattttagtagataacaaaaattctgtcaatattctcttcgaaattgcctttcaagctatcagtttagtggaaactattctaacatcttgtctagttcaactccatggctttaatggagataccctacttctaatgagaaagattcaacttcgagttacatgaagtggggacgtatctggaaataatgtagtcttaactttcaacattgaagatatcatgcatagccttggagttgtagtttgcaagttcaatctcttctacagtctaattactcattggcttgaccttttcaacctcatcctctataagagatctccaccattcttcaactaccatccaaacctgctcattcaatgccttgaaaaggcactcatcttggtcctccaataggtgtaattattagcaccctctattattggagggtgactggtagaactgttatccctaaatatatccatagaatacaagaaataaccttagtgacactcttcgagatgaaactccaagatggttagtcccaacaactaatacagtaaaaaataagaattaatgaaaagaaatcaagaaatgaaggggatacaagaaaaagtataacacaacctaaacaacacccaaatcactatttcacaaataaaaagtaggttctgataccaattgaatgtgctataccaaattttgatctcatttcttgaaactttggaacaattaatcatcacttggtaattataaaatcacaacaccaaaaaattacaagttcactataattagaaacagattttagtcaactactcctcgggtctcccaaagaactagggcaataactctaacaagtcaagaatgtatttaacaatagctaatccatattaaaaatttcacaatacattcatatacgaaagacactagtgaacaattaccctaaaccaaatcatttggttgtacacaagatcttcttgtgtcaattgccaaaatcctttcgacaacttcacgatatgaaatttctttagattcaaataaggccaatcaacactttagtagcttcaaaccttgctttaaacttcacccttcaatgaggttcctgcaagtatacaatatcaaagaaaacaaagagaaaaagaaagcattttttaacactgtaacaaaaattaatcaataggattagttaactaatcaagaatttgattacttatagtaactttaatttgtaactaattaccaaactgaccagttaattaactagatttaactcttctcaaattaacactaatagctaacgtgtccaaaataacctgcaataacatgtagatgtaacttgataccatgcagtttcaacaaagacaaatatagactaaccaccacaaaaaatatatgtgcttagtgataattttttaatcacaacataacttttttgtgactaaatgtcacttttagtgtaacaccctaactatcttaggcg

SEQ ID NO: 324873 - DNA, 939 bp, Cannabis indica
agagagaggtacaaagaaaagagagattgagcttgggttttgtatgaaaaattttctatagatgaagaaaattcttgggtaagagtgtgggaataaacactttgagagatccaacagagaatctttctcgacatgttgtacttgttcttgctcaattaataaagaggatttggtgatattccagggttggagtagagccatagatcacatcgatctatggacttgaaccaatatatatcttggtgttgattttatcgttttactgctttaatcatttctaaattttaatattctgttcatccatgttttccccgagtactgttttgtgtttcattaatcttatcattgctaactggttggtgattgaaattttaatagattttttttagcaaagtgatttgtaacaatagataaaacaaagaattcagttacaaaatcaaaagatacaggaattggaaccaatacaattccaaatcaaatatctatccgttcctagagcctttttagcaagtgtatgcgccatgacattgctttctcttgggatgtaataaaccttggcactaggaaaagaagataaagattccaccactttaccaaccaaatatgaaagagaagatctatctttccaattgttgtttattttgttcactaaaaccagacaatcagaacgaatggagtctaaaggaaatttgacagtgtcacaccattgaaggccttccaaaagagcatgagccttagccaaagttggagaaagaacactagtcttagatgaacaaaaaccagcaactacctcacctccgcaatcttgaacaacaacaccaaatcccatctttaaatcctctcttgaaattgttgcatcggtatgaaggacatacattccataagctggagaaggaaatgactgctgaacaggaggtgaagctgttgggttttatgccc

SEQ ID NO: 324874 - DNA, 997 bp, Cannabis indica
tataataggactgaatattttgatcgggtttgactcggacctggctaacctgcccaaacccgacccggtgaacccataaaattaaaaaaaactcgttctactcaggcgagtcggtccaacccgtaaagtttataatggtgtaatttttaccatatgtaagatgtatgagctattcctctcattatgcactttcatcttaaactttaacatgatatgaaattcaaaaaacaaaaactctaacaagtatctgatccaaaaaatacaatgttgatcgaaaaaataaagccaaaaagacaccaaaaatccaaaaaaacaatcaaaaaaagagagccgaaagagtcatttgtgattcgtgcggggatagtgagccaaaaagagtcgcttgtaatcaagttgtctaagattggtaggcaaaatatagtcatcatcttgatgggaagatgttagagagtctcacattgctaatgtagataacaccatattttgtataagattcatgggttactcttttcattgccaattaattttgagatagaatccccacaccttcatcctaaattctaaaataaaaaaaagtcgatcgcaagaaaatagaaccaaaaagagcttccaaaaatctaaaaattgatccaaaaagtagagccacttgtgatttgaagatagcgaaccaaaaagagtgacttgtgattgagctaaccaagattggtgggcaaaaaatagccaccatcttgacaggagatgttattgttggaatatattttaccaagatctagatttactaacaagtatgttgataaacaccctaaatatgaattctctaaaacaatgtaattaaacacatataaagtttaagtaaccttacattggtggcagcaaaataatatgtcttcttccactcagatctctaacccttgctcctttctgtcgcaaggtattatcaaaatctgagcccgattgtccttcaagtgttggattcttcacagtcttacacactatg

SEQ ID NO: 324875 - DNA, 1205 bp, Cannabis indica
gttacaattgtccaacaataataattaagcttgaataaggcaatttattaactaaatttatcaattaaataatgttatttattaattttatactatgaatatagagttattattatttgtctattataggagtgtaaatggtcggtcggatctgatccggctatgatcctgatccagatctgggttcggtcgtggtcttgggtctcgggtccggtcctcgatctcagtccaggtttgggttgggtcaggttcgagttcgggtctaggtctgggtcccagacgtggtccctggtccccatccaggtctgggtcccgagtcccagtcctagttccggtccgagtccgggtccaggtcctcgtcccgggtcagggttcggggtcagggtccggactaggtcctagtcccgtgtcctgggtctgggtcgaggtccaggtctaggtcccgggtctgggtcccagttcgggtctcgagtctaggtcccaggttaggatctcggtctgggtcccaggtcagggtccccatctgggtcccaggttagggtcccgggtcagggtcccggtccgggtcccgggtcagggtccccggtcaggattccggtccgggttccaagttaggatcccggttcgggttccaagttagggtcccgatccgggtcctgggtcagggtcccggtctaggtcccagatcagggtcccgggtccgagtttgggtccgagttcgggtcccggtttgggtcgtggtctggggtcggggtccggaacaggtcctggtcctgggtccgtgtactggtcccgggtcagggtctcggtccaagtcccaggtcaaggtcccaatctgggtcccgagtcccagtccgggtcccgagtcgcggtccgtgtccaggtctcggtcttgggtcccggatcccagtccagatcgcgatcccggtcccgatcgcggtcccgatcccggtccaggtttcggtttcggttccggtccttagtcttgggtcctactcacgatccaagtcccgggtcagggtccctgttcgggttttgggtcagggtcccggtctcggtctggatctcgagttaggatcccggtccgggtctcgggtcacgatcccggtccggattccaggtcagggtcccagtccggttctcgggttagggtcccgatccgggtcccgggtcagggtcccgatcccaagggatctgagtctggg

SEQ ID NO: 324876 - DNA, 680 bp, Cannabis indica
caatacgacccttatacggtgtaacaaacctgttatcttccattaccgaaaaaaaaaaaatagtgatatagtcagtcatacaacaacaaccaaaaaaggtaatcaaagtttggtatgatttttaattttttttttctatatgattttaaatcacattagtttatagtattgaattaaaaaaacgaaaaaatagagctgatcaaatttaagacaaaaattgtcttttgttccaatttttataaattttaccatgttaattagatttgcatgttttttagaaaagtaaataatctaaagtaatatcaagccaaaaacaaatataaaaatgtgtaaccaatcatattttaaataaaaataaataaagaatccaacataaaatttagctaaaacaaacacacataatataaaaggaatcaataatataggaaacataattaggatagataaatatagcataaaaagtaaatgttactaaatatggtattatttaaccaatcaaacttaatatgattttaaaaagggtaaatactattttggaccctctgttttacaaaagttaccaattggaccctgtgttttgttaaatgacaaaatggaccttgtattttctaaaatagtacaaataggaccctgaattgattttttgtcaaaataaagtttaattataattcgatctaaaa

SEQ ID NO: 324877 - DNA, 622 bp, Cannabis indica
gtcagttgtaattaaatcggtcgattgtcattgtattagataatgtatgcacacttctgcattcaaagaaaaaaaagataatttatgcacactcctagttaagtaagtccttagcacttctctgaatccgggtcccaacactataatttcctccttaggtgatactataaaccatacaatatacactcaaattatttacgtaattacatttaagtagactcttaatcttagtaatcattttccaaagagtccatccgctcgtattaaaatatggagtcattttaaaaggttggtgtaattttccattatctgtcactcgaccttttcactctactttcccagaaattgtcatcttgaaagaacactaattattaccctttatgttatttcggaaaaaccgctagttgttctttttccaaaaaatttatctcaattttctcatgtccattaattaaatgggcccacagcccactaaatatttatgttaaaattcactactacagtactactataggaatttaacttaaagcccaaaattgcaaaaatcccttaaggtgcctatttaccacacaaaattatgagaaaattagagcatgtttggtattgttttctgtttttattt

SEQ ID NO: 324878 - DNA, 775 bp, Cannabis indica
tattgtcacaaaatatcttgagtggtctttcaacattctccaaaatacgcaacctagtgacaaagtttctcagccatattccctgatttgatgcagcagtattgataatacaagttcagttggcttaggggctattatctttcagaagataaaagggtgagatcagctttatgcaagcctctcaaaggttagacattgctttaactttaaggcaaacttttttcgatttgtttaagcctttaaattttctaactttaagttttgaacagtattaggctcgatttacatggtgtggatttaacttttttgatgtgtacaagattttaaaatattttctagcttcaagtttgagtagtatttggtgttgctttatctaatgtggatgggcgttttagaaagattcgttagccattggttatacagttttgagcgcatttgtatcaagttttgatgtgtcatgccttaccctattctccttttgaagaaatgtttttttattgagtttttatggtttcttttactagccaaatccctttggctagttttttctttgttttgtattttgtttttatctttagtttgggtttcattttttctttgttgagttctatttgaagtttttacttatatcttgttattgtggtattttatggttttattgtgttttcaagtagtatttcagttttacaagtcgagatcttgtgtaacgccctaaataattaggcacgctactcaagatacttacgaaatcctaatcccctaattgggattacta

SEQ ID NO: 324879 - DNA, 712 bp, Cannabis indica
atctgtgccacattaattgtcagaatattttgacaattaattcaggaaatcaaatcaggtaatgaatatagaaatctgaccatatatagaatattacgtaattgattctgtccagattcaatgaatataaaatattcatttatcagaatcaataatattattttatttccttaattagaaatattctaatagacacgacccatatttttcaggctttttgaaaatgggtcggattgggccgtgccagtacgaatttacagctctggctggtacttagtactctattattattattgatataattaagtatcgaattttatatagtaaaatttaaaaatatcgctaattaattgtaggatattacctataaaaagtataacaatgctcttaaaataagagaaatgttaaaagacattagtggtacgaagcatcctcttatgtgtcaatattgctatagccaatcgcaatgcgacacatcttaagagtgctagacactactagtgcccaatagcaatactcttaaaataaatataaactaaattggttgataaaaatatggtggacattagggagcgagggagacaattattttctggaaagaaaaataaaaaaaaatgtatatacattttaattaattacgatatatatttataataaaaaatgatatttataaatataaatataaatatgcaagcattattttattttattt

SEQ ID NO: 324880 - DNA, 797 bp, Cannabis indica
ttttacaatacaatgttcatggcatgagagctcggtttctaatcttgaaacctggccatgcacgaccacgacaccccatgcatgcgagtttgggttcatggaggcaccccagccatgcacgatgttcacattcatggtattagatatcgtgcctagccccgagagaccacaaccgtcaatggtcgataacgagttattttcaaaatttaattttgagacctgtcggcctcccccatgtggctttgccgacgttcgaaccgtacgaccccgtggtcgttcttttcgtgcaaccatcattgtcccaatagttgggacatatgaatggttcatggacataaaaacccaaggagatttggtcctctttgatcatcggtgcaccaacacctcttggacccctcggcgaagctacaagcgtgacatgcatgagggacgtgagtctttcgatttgcatggacgagatgaccctttcgggtcttgggtcgagtaacccgtgtgcgactgaagctttaaggcttccatggccactactgccatggtggctctccagagccgccagccacggtggtggccatggtggccagtccattttttgacctgaacttgacacccgtgtatatatatacggtatgtatttatataatatacaatatatattacatatatacaatgtatatacactataaattagatattattattttaataaaaataattaatgttgttttggatatttattcaaatttggttttagattcataataaatattatagtttcaaatttaaaattcaaattcaat

SEQ ID NO: 324881 - DNA, 1037 bp, Cannabis indica
acggcaagtttatgatattttttccactattaatatctgtccaattcaatgtataaccaatacatttgatattaacatactttgctaatatcttggaaaggacattctacatattagtgtgtaagtaaactttacgttgatttgacattagtgtaaatctagttcactgataaatcatggaactaaatatttaaagcatataattacaatcactttttaccgtagtgacatccatataattgtgaataaatatatgttttgaatttaatagaacttgtatattaaacctataatcatgtataaaacatgtgaacaaagcatatgacaaggtcaagatataatttctgatctttattaaaagtaaataagattacaatgaaattgtgttttatttagggtataaaatcccaataaacttctacttgtactaatatgaaaaaagtacatttcttttaatctcatattcttgatgtattgattaaatgtactatttggcataaactatgaaacaggatctgatatttgtattcagtattaaccttttctactatcacattttccttggtcataaaatttatgattttgcgaagaagtttcagaagtagaaaaactaatggtgcttcactgtgacaacagtagagcggtggccaactcaaatgaaccaagaagtcacaagtgtggtaagcatattgagaggaagtaccatctaataagagatatattagagagaggtgatgtgacggtcttaaagattgtgtcaaaacataacctgtctgatccattcacaaaattgctacaagaaaaatattttatgggtcatataactaataggggattatggaagatgctcaattttcttttaggaaaagtggtagaatgttaggatttatgccttgaaaatcgtgtaaagatatttctgattataaataagagtttaacatttcgatacatgcatgaatattaagttattaatatttaatattgaataagttatatgtaaatatcaaaaaattcattattcatacatgaggttgtga

SEQ ID NO: 324882 - DNA, 711 bp, Cannabis indica
acatagatttcgatataggacaagagtacctacatagtttatgtagcatttagaatttttatgcctaatgccttctatgtattaaatttatcacgaaagtaaaaaatttacaataggttgagattcatatgttctagcctatatataagtttttttagtgaatccgctatcacatgaaaattcaaatttaagaattaaattatattaaatcatacaaagcagaagcaatagaaattaatcaccctaaacttgaatcattgttaagtttaacatcattaattattattatttttttgtgtattttgttatttaatttttgcttagattatttagttttaaaatcatttcctttgattaccaaatagaaataatatttaattatttggtacttaactatagtcctgttgtgaacgatctcacttacctgagtattacttgttaaaaaacaataagtatatgaaattccgtattttaatattcccagtttgattatttaattaaatgattaattaaatgcggaataataaaactggtactgaaaacagttttctgtagttacagaatgcaactccgtaactccagagaaacccagaaaaacaaacagtgcataaaagtaaaaacacacaagatttttgtacgtggtttcaacaatcctttcagattgttactagtccacggggccacgcccagagataagattcattagatcgg

SEQ ID NO: 324883 - DNA, 839 bp, Cannabis indica
gggcattatagtgggaggtcggctatggaaagatacaaggaggaagccaactcattctacgaaagacttccttgatagagttaatgaatttattaaactggaagaggttgagcgaaatgccaaaggcctcaaccaagctaagggaaataagaatggagcaagctttagtggctaaggctcccagggttaggggcaacaataaaaatggcttcaacaatgaaaagagggccagcaacgataacggtggaaacaactttattaataacaaaaagctaaacataaagttagcgttaatgactatgtcctcctaattaaaacaatcttcagacacgcgtgacattccccttgtccttgcctatgggtatgataacccatcatcccaccaaaggatctcttatcaccgagtacagagtagttgaggtcatcccacctggaatatacaagttagcgcattacggtgccaacataaagttagtactagagccttttcattggaatggagagctcctacaaaagtactaccaatataaattacttttcaacaatgacttaagctggttagtatacttgcaaagtgcattttcatagctagtcatcatacttaccagcaaagtttgataatgtaaaggcatgaattacccacttttgatgtactaaggcatgtttgcctattctattcatcaataaaaaattgcaagttatttttcatataacgatgcaacttgtatgattgttattgaatcaaattacaagcctaactaaggtcaagagtgtatgaaatcatagtggcaaacctatgacaatgacaattcctatgtgaaagccctagttacttaaca

SEQ ID NO: 324884 - DNA, 1304 bp, Cannabis indica
tcgaatgaggtattctcgatttaattactttttaatatggaattatttaatatttattaaaatatatgtattattttttcataactaacaataatataaattaaattattattgttttatatttctaataacaaattaaaataaataaattcaaagaaagaagaaacaaaatattttagttttgttttaaattatattttccttatgtataagaataaaatatacatttgatctattaagtattaaaatatgtttttatgatatgtattagatttttaatttattattttttacattaaaatattagttgtatatataattttattatatgtgtgaattggaatgaataatttattattacatgtcaatcaacacggggtcaaaccatgagcatctcacttaaaacctccgctaggtttgttttaatcttgacaagcttggtcgggtccgttgtgttaaagggaatttccttaagttcttcggctagaccaactcccgatttgattttcctaaaatgggggccaatgtcgtccccatcttgggcacaccttcaagtggatttaggtgccgtctctccatagtttgaactccggaggtcttcaccgtctctccagctttcacgagagaggccctgttcgtcccccttggtgccaaaacaacaaagaaggtcttctttgtaatgtcctcgtttcaagcctctattgggccttctgccatggactaatgactcttatattgctttatggaatgataactgacccaacaaattaacacgagtcttttcgatgcgctttgtcctcactcgcctacttatcgagaaaacttcctaggaggccacccatcctaaaattaccccagatcaacccaaagaatatggtttgtaaataaaaaaaaaattcatatatggactcaagcaagcttcccgtcaatggtaccataaatttcatcgagtgattctcttgtttggttttaaaatgaatgttgttgatgattgtctgtatcacaagtttagtgggagtaagtacatgtttcgggttctatatgccgatgacatattgcttgccactaatgatataggcttattgcacaaaaccaagaaatttctatctaaaatcattttgagatgaaagatcttggtgacacctcttttgttttaagaattcaaatacatcgagatcgttctcggggtattcttggataatcacaaaagagctatattgataaagtactcaaacagtttggcatgcaagattgtagaccaggtgatacccttgtcgttaaaggagacaaattttgtcttaagc

SEQ ID NO: 324885 - DNA, 748 bp, Cannabis indica
tatgtaattttttttgaattatagaaactgtaaaaatatataaaaaaatatttgaatgtaaaaaaatataaaatttttacagaaatattgtaattattcctaagttatatgatatgtatatttatactgaaactgatatgttgagaaacaaagcttatgggatttccctttaattatttatgggtggctactttggactttaaagtcttactttggactctaaagtctaactatgtcgaaatcaaagctcaagatttaccttttgtggtttttatttgttaggcaataaaccatggtatgtcagttgaatatttgaatcaattgcgagaaattacaagagagtttttccaacttccattggaagagaagaaaaaatacttgaaacaagaaaatgatattgaaggatatgggaatgacaatgtttattcagatcaacaaaaaggagattggaatgatcgtttgttcctttctttgtatccagaacaacaacgaaggctcaaactttggcccgaaaatcctaaagcttttcggtgagaacattgctttggaattacattttagatcaaaatcgtaaaacgcatgaagttcattgatctttatatattctattatcttttcacacattagcgatgtgagactctctaatatctcctctcaagatcatattagaaaggctaattaggatttttgccccccaaattttgacatgtaccaaattatgcccctgaacttttctgattgttaaaaa

SEQ ID NO: 324886 - DNA, 1214 bp, Cannabis indica
atgagctggtattttaaaaagttactgaatctaagggtggcaaaacaagtgattatcagctgacccttgcagtcaagagtgggaaattcagtgctacaagattctataaccaacagctgacagagaatagagttgattttgcaggatgggtttgggacagacttgtgattccaaaacacaggtttgtctattggcaacttctcaactcgctgcttctaactcgagacaagctagttagaatcatgccaattcatgacatcaggtgtcccgtttgtgaactgaaggaagaatcgcatgatcatgttttgtttgatcgcttgtttgctaaacatgtgattaatcatatttggtcttggcttggtcaagttacttggccaacttccatctctgatctttgtgacaggtgtttcttggctcggcatgacatccagaacagaatgattaatgcagtggttgctgccacattttatctcatttggcaaaatagaaataactgtctttttaacttgttttgttcttccccacgcaggattagccaggatgtgtagaaaatgatgaagtctagaattttatgtttgggccccttcaatagcagtagaaagaatagttattttattgatgtaatatcaaactggtagttggtttgttgtgccgttctttttgttgctcagcttgtctggttggggctggttttgcctcagttgttcttgtatcttgttttggttttttttgaataaaattattcctcttgttcaaaaaaaaaaataacaaatttttgttaaaaaatacctcaagggcctgtttgaactcaggattggactgaaaataatttgattgaattagattagattggacaagattagattatgttgaaaataattctatgtttagtttaagaatagactggactattttatttatttatttatttactaaaaaaacttaaaattaaaataaaaacatataataataaataaaataaataatttcctaaaaaaataaaaaataataattaaaataattaaattataaaataaaataaaataatgtatcatatacaatcaaatgtatatcatatatatataataaaataatttatcatatttatatttaataaataattacaatagtataataaaaataatttgaataatataaaattatttatgctatataataatttaattactaatttaatacaaatattatttttt

SEQ ID NO: 324887 - DNA, 651 bp, Cannabis indica
tctctctctctctctctcagtgttgatctaaggtttttcaaaaatattgtgcagccaccacaggccacctcagcggttctccgacaacccccaggccaccttgacggttggtgctctggtaagtcctctcctcttctcacttctcttattatattttcttatatgttgtttcacttttccatatctaggtgaagagggaggcaatttataaatttttaccatcttattttggtttaagaaactgtattttggtgttttatgatttgcaatttttactgtttcaggtgagcttttattgggtttctgtggtggtgttttatgtgacagtcaatagtcttgtgatccgtaaggagatatatcggataagctatttaatcccacatcatctagagtagatcaagtgtaatgattctgagactgtgtaggtatgtgactgcacaattgaagagggttgaaatagattgattgaaaccacctatatcaaaagttcatcttgttttctagagtcccatcacttaagaactttaaaagttaagtgtgcttgacttatagtaatcttgagatgagtgacctgttgggaagttttcctcggaagcgtgtgagcaggcctgaccctgagtataggtggggctaggcttgtgcctagggcct

SEQ ID NO: 324888 - DNA, 1562 bp, Cannabis indica
ttttctaaaggatccgccatttttgttgaaataatgagtttttcaaaggaaaatagtcaaattttcaccgcaacgctctcaatgaaagtactaaaccgttgtgtggtttttcgtcaactgatctaagaagatcataaaaataaagaggactgcgatgaataaatttgactaaataaaagcacaataaataaaatagacactaatttatagtagttcaccccccatatcgcgatggtatggagctacatctacttttgcttttattaattagatccaacacactagagttatgatacaaaaaatgattcatatgtgaaatctcaatcaagacctatgaacacaagactcatgggagactcaatattcataaatctaaccaaagttggtggttgtaaggttcttgggaataataaaccaataaaagtaacgaaagagaatggtctttgttcttggtaactgtgtagatcaatagtttttagatcaaggagatttggtgtcgactaagtatggaagactcaagaaaaaggtaaaggaaatgatttggtgttcttggcagctgtcaagtaagcccaaaaaaaaagatccccttttacttcagcttcttactctcattatataggctttaggatttgttagtgatcccccacatgttggggtatctcactaacaaatctcgtatattacccttaatattggataaaaacttacaaataaataaaaatctcctaatatctaggccaaaatcccacattggaaaaataattattttcgactaaagaaacaccaatttgaaatggagtgacaaagaatgtcacatctaggcttgaattcatgacattggtgagaagtattggaaaaaagacttttggggtgacactgctcgcacataatgccacatggagtgtggcattgtttccatgtggcattgttctccaacatcccacacataattacactactcaattcctaagtaaagtgtatcaaactgccttgtaagctaattttagacccgataacttcagaattgagctatgagtatgagacacacttagatccttcttgaaaatatcttattaatgcaagttgaaccaagttatttgaataaaaattgagagagttatgccaattttgttgaaggggagtttgtgttattttgttccaattgcaaacactgacatggccaaatggaaactcttggccatgcatgttctcggacctctccaaatgtgttttgacttattttttgatggtgagtcatattttagggttcattggactccaaaatctcattttgacgtctaaaatcctaacgggagaccattgccaccagttggggctgaaaaagtggcagtggtcgaccatggcctatggaaagccatggatgatgtttcttgattatttcagtcatatggatggtagaaaattactttggtcacattgactcttggccaattgcttaggagagcactgccacaattttttccaaaaaagtggcagtggccgcataagggggctatagagccttgggtaacttttctcacttttatttgatacatggatgt

SEQ ID NO: 324889 - DNA, 2201 bp, Cannabis indica
aaaactcaattttctagtagtgggtgttgcttgtttgctgttaagaaaggagagtcaaagtgccaagggaaagggaatggtgcgaggtcaaattgggcatggaagctaaaactaggatgaattgttgaagcaattgttgcaataaattcagcattctggacagtgatgtggacaaagtgcagcagaattttcattagttgaatcagtgcagaggtggtagtcatttaaatttacgccaactagctgacgtgaaaataggagaccaaggctagtgggctaagaaaagaaggaaatgggcttctattttagggtattggactgtaccctaatgacctaacaaaaaaaaaaataagttcagccaccatcatcacaccattaaataagtactgaaaatcaggtgttagaaagaaaagtactaaaaattaggtgtctaaaagaggaagttagccgagaaagaaggaggaggatacaagcttcattagtttgaatttctattcttcttcttcttctgttttcatcctttctttatatacttggagtttgttaattttaaagactaagtaggagccatagatgaactaccattatttttggattttaattactagtttaaacatgagctaagcttcttgagaattgaatggctatgaacccctatgtttggtatgattaatttaagcatgaatttagcaatgtttctttgttcattcaagtaagcttactgtttattaattattattacttggccatgagtaacaatttactaagctagatctggttctagaaaggctagatctagtagttacaactctgatgatgcaagtgaattcctaagtttacatttttgttagtaaatggaatagagatatttcattaccttgcataacttgagagttgatgtttaattgctattctgcaacttgatttgatataggaatatattgaactaagtggtagaacttaatttgtgagttttggaaaaatctcataaacacaaaaaaaaaattatgttaactttgtgcaactttgctgaagtgatgctaaagtaatgctgaaaaactgggcagatttaatatagggggacataactattcaagtctattattccacaggtacttcttctagcagataattttatagtatttgttgtcttatttctagtttatttttattgtcaccaattcgttttactttcatcaatcatccattctttatttttgtttattattctttcaaaagatctgaagttgttaattagttggttttacatttattttaatttgcaattcttatggagatgatactcaacctatttttatattacttgtttttgattgcgtgcacttaagtataaatataatttttcacaataagtttttaatgctattgtcggggattgaaactaaaaattgtatattatcatcatttttgtaatttatttctggtttgaggttctaaccttgcttgagtggttttttttttcttttttcaggttcactctagcacatggacgagtacaaagaattcatcaatcctgatctatttcctattgatgctaaaattgagcgcacattctgagaaagaagaagagcacaacaaagaacacaagggaaagagaaatggtggataaccaaggagatggacagcgagttcaaagggggatggcccctaaaattggtcgaaatacaatcattacaacaaatgatagagattaaatcatctgacaatatgcagcccctcttttcaataagctcaatttgggcattgtgaggctataaattgaggtaccatagtttgaattgattcaagttatgttcctgatgcttcaaactttggaatatattttaataggacctagatttactaacaattatgtttttaacatcctaaacatgaacttctaaaacgatatgaaataaacacataaaagacatgagaaaccttacattggttgcagcagaattaaatgactccttccgctcagatctctaacccttttatcctttctgtagcagagtataaccaaaatttgagcccgacactccttcagttgtttggattcttaaagtacacactatgattgaggactaacttgctatggttgagcatgcactcaatcactaaggctcaattttgatagtgaagaagactaagaatttcgaattagaagagagaaaagaagaagaagaagtctcaaaact

SEQ ID NO: 324890 - DNA, 943 bp, Cannabis indica
tctacgagtcaatagtattagccatctttgggaaatgtctaagtattacaagtgtttacaataacaatctctacattctttggttctctctaagaagaaaactctctaggaattttagcagagtttctgtaagtaagaattgttctctcttgtacatgaaatacagtggtatttataggaggcttcttactcaacatgcctttgaggccggcctcactatgagagatccaaccgttgatttgttaggtggttggtccatcatacggtgtacagagatgacgacctgtaccgtcttgacattttatacgttttaatcaaaggcctttccgttttacccgccctcaggaatggctactggataatgagcaggtgcggtggtgcgcatacctcgtactatggcctaacatggggaacaaaactgacgtcgtaccagaaaaagcattgtcatcacttctgtaatctgacagatatggaaggagacctttcgtgacatcatatggggactaaacccatcctaggtcttttcgtaacctgcataagcgcactcaaggaagtccttggcctttgaaggatgcttcccttcccggagaacgcacttgggcttttactcctgggaataagaaatgtcatgcatactgacgctccacctgttgggttttgtgccctaaataaaactcattttaatataatcagattaacttattaataaaagatcataaattattttatgttgcatggttaacatgattttatatttaatgtataaattctatgattatagtgctgtcaatatagtggaatataatcatgattatatgttcaaaagtttaagtctcatgatttgtcaatacactagatttagactgacatgataatcagcgatatggtatacttacagcttggataagtgctaggtcctttctagggcattggcaaagtatac

SEQ ID NO: 324891 - DNA, 935 bp, Cannabis indica
ttattaaatttaaattttttttaatgtttctcaatggtttacattatccatttaatagagttttagatattcttatttactaggttttttcaaaaaatattaaatttatttttgacactataaattatttagaatttttaaaaaatttacaaaataatattgtataaataacgaaatatcaccatgaaaaaaaaaatagtgaaaaaatactactccaacatatactttgggggtgaaggctgaaaaaaattataatagaagattgtaagtagtactattattactgattatatttgataattttgatggagttcttccacgtacagaacaatttatttgaatgttttgaaaactactagtagaatgtaccatgtatacaatattatagaagaaaaattacttatgaaataagatcaaaatgctcccatcacaaatagcaaccacactataaaatttcctaatgtatagcttggctaatagataatttaaaatgggagatgcatgttaaagagaagatactaaaatagattagtagtgcatatgatatcttcttacatgtcaatagatattggtgtaattaagtatcgagtctcatataacttaattaatgttacaacttttaagggagtatcgtcaatcaatcgcaacgtaacatgtttcgaaggtattaggcactaccgttgtccaacagcaatgtttcatgttaaattatactatgtttgatacaaaattaataattattagtattaatggttgtcattttatttcaatgcaaatttatgaaattgatgtaaaaactaatttttttcattaatatttgtttaatatttatttatttttcttttttgaaagaaaatagaaatatttttattaaatgcacattcgtttttatttttattttttgaataaaaatcataagatctattaattaataa

SEQ ID NO: 324892 - DNA, 1770 bp, Cannabis indica
ttaacggggataattgtaatgaccgtatttttgaatatagattagtaaagacaattagcgttaattattgatatttttataaatgtttatgaatttatttaattgtgggtcccatttttagaaatgggcatcatagttataatttctcaattctgaatattttattaaactctagatgtattaattgtatgatatatgaaatatgtaatttttatgatttttgctcgacgacgacagaaaacgtgatggatggccatttgaatcacatgggtaagtctagaacatttctcttagtgggataaatattgaagatgaatagaataatgagtttgagcgagattatagtttttgatcattttacccctaagcttgaattagcttaagtttaagtactataggccttttggtaatttggcaagtgaaggttaagtggctggtgggttgaatgacacctagccaaattagttttcaacataaatttatgtaattaagcctttacacttagaagaaaaataagaaattaaagaaaaaccaaaattagagaaaactcttttctctttctctctctttgctcgaccaccaccaaaactagaaggaactcacccaattttttcatccttttctggaaattcagcaagaatttaagtgttttctaagtagaggtaagcctagcaccataattctttagtttctttaagcttgaagtttagtttaaatatgcaattttgaagtataggggctgttagggtttgtatgagttggaattcgatttttatgtttaatttgagtttagtttgagttcttgctgcttttttgggagtttggtgtgatggatgcacaagtttgagtttgaaaactcaagcttggttcatccatggcactttttgattttgtgagtttttttgggttctgttgcttggattatgttggttgatgttattgtaggtgttctggaaggtttggtgagatttggacatgttttgagtaggttttggattgtttggagaaactcagtgcaaaccgattaaccagtttgctaggtcctgtaaaaccagttaaccggttctaggactggttttccgaacaattcatttcgtcgatttgtgttcatttcagagccttggttgggtgattccctgtttcttagggtattatagtttcagttgtctatggcagaacctttagttaaaggttgggtttcccgaattagagttttgagcgtgttatttacccaattatgttatgtgattacgacatccatccaacacgaggttttatgttcaggtcggccaactcacttgaatttggaaacgaggtaagaatagtgtagaccatgtgatgtatttatgcgaatgtatgtatgtgtgaaatatagatatatattcatgcttattatgcttagtacactacaaacatttgtacggaagtagtacagagtgcattggtatagtgtacaatgtttaagagtatattacggtattaccagcacaagtccagaaaggtacagggtgtgtgtggtatatcacttagtgatactcagggtacgaaacaaaccctaccaacactcttacgatgtcggtacgtagtgtatgtggtacaatgattgtaccctagtaaagaacgttcttgctcatttgttaacccttgtagataggtgcatgggcgcctatatatacaagtcgatattatattatttgttatatgcttttcttactaggtctatcgactaatagttctactttcatgtgtaggtaaaggaaaggcgaaggc

SEQ ID NO: 324893 - DNA, 518 bp, Cannabis indica
gaaggtttccagaattcaatctcgtcctcaatgtcttcaagagtaatcctaaccttagattgcttattggaaaaagctggttctaggttacgaattattgaaccagatcgcaatataggaggagttgaggaaataccttgtgcaacattactgttacattgactgttggcagcaagaaattgctcaaaatccttcctcgcatcttcctgttggataatcgaacgtagagatgacctcggggacagaggcggtcgaagaacatcttggagaagaggatcgctagtacccctttgatctcgagccatttttagatcgcacgaagtttccagttcatcatcggagaagacaattgggttgataccagagggatcttcgacttccgtagacacagttactgccttcttcctcactttcttagatcctgatttcagtttccctaccccttttgccctagtcttcgccattgctacagctcacgctgaaaggctagagagaaaacatgaggaaataatattgtg

SEQ ID NO: 324894 - DNA, 1863 bp, Cannabis indica
tattacgttacactaaaaaaaaacaaaaaacataattccgaattaaaacaaatcacaaaattaaaacttgaacttaattgaaaattagacaaaaaaaactcaactcaataatgaatgaatgatggatctttatttaataggaataatcagtagtacataatagaatgagcccaagattcaaactcaacacagtaaagtattacaaagaaatatctcatattgagggaaatcatttcaagagggatactcccttttacatcccttcacacacactcactacaataattttaccttttaattacattaaatgataacattttaaaaaaagatgttaccagttacaatagcccaatttgaaatattaatattgagccttaagattatatgttaaaactattattgggctttctctacagtagcgccctttctcagttcatatctttccttccgactcaaaatctcatctgttgatctacttccctctctcgatctcttgatggttcctctctcttaactgtcggcagcgacaaagcagcggcggaggcgtctcatcgaaggtaatttattttttcctctatactctctacttagatatattatatatatattgatctgtatggctgctgttagatttggaaatgaatttctttcttctcaatctgaatagttttttgtttgcaaggttttgaagtgagggcattgcatttaaacacaagtaagggacgatcaagcaaccaacaccatctcggtaatatattgtgtgtttttgattcatttctatgttcaattttgattttaattattttttttctgaaatatttgtattgcattagattccattcttgcgtgtgttgaatgattttaagtcaaacaatctaaactaggctaatttatacaaaacattctattcacacgttagactacttctcatacctaagtagtgtaagtagacgaaggttcacttggtacgtttgagggggaaggacaccctctgtgactgctgtggcacatctgttgtcttttgttcttgttgaaaaagtgtcgttgtcaccgcggcaggatcaatagcttcgtcatcttcctttgtttcttcagctacctgagcagattgtctccttgggagtgctagctggtaattggggctgatcaatgtgtcttgtttgggagggagtggaacactagcaggccctgcaattgtccttggcaatgaaaccatgtttcagtttctaccatgctccagtaggacctggtggcaaaagagtggtcaagaaaatctactacgtagtcctatgttttttatgatccacaacaatccacaaattcttattttatcataagctcagttagtaatcatcaaagcatgctaaatgttaaaaaatgaaaattttctctatttggactcactcaacttagcctcttgtttaataaaagatcttgaatatcacttaactacaactccctagtggtagtatgttgatgaaataagctttccccaactaaattggctgcaattcgttcccaaaatttgaagaataataggttgaatagacttctattaggacctcccttatggctagaaaatggagtgtggagcaaggatgatataatttttgttaggcccttgtggttagaaaatggagtgtcaaaatgcagtacttgaccattttttctttaatttatgcagtacttattttgcatacaataattgatttcttcagagttgatattgataccatcaccttataattaaaataacttagggttaacatagattttcattaaccaaaattaatgagcctttacgtgataaatatatcacagaaataataaataataaaatgattaaataactccaaatatttt

SEQ ID NO: 324895 - DNA, 803 bp, Cannabis indica
cttttttttttgttttttttttttttttttactctacttttttaaagtctattattttttacctatttctttaaaacattgttacactttttgctacttttgctcttatcattttaagatactctctatgtaactcttttatgtcaggatatttttgagtacaatatatggtatgcttcaaattaaataaaaattagacataaatttagtaattgattgataaaagaaatattttcaacgtatccctttttagataaatacttaattttaaaactttatacacgaactttagaaattaaacgattagaaagattatattattagtgttttacatttaaattaaataaaatcctattcaagtaatacataacctaaaattttagaaaaaaaaatttaccttattttcaaaatagaggaaatattattagtatttacagttattctaaaagaatagtaatattgtaagaaaagaaaatttttagtgaaaaaaattaataattatttatgtgtgattctacaatacacctctttaaaggggtgcattgatgtacttttatctattttggcatatagaaagtagtgttcaaacaatctattttacacgcgtataaaataaagagaaatttgcggcgaaaccctcttatgttttaatttttatacacttaaccctcttattttttttttgtggcaaagcccgcttatgttttaatttttatgcacttaacccccttatcttattttgttttgtggcaaaacccccttatgttttaatttttatacacttaactcccttattttttttt

SEQ ID NO: 324896 - DNA, 522 bp, Cannabis indica
aaaaaaacaaaaaaatatatatgctaattacttttgctttcttcttaaatataatttttttaatgaaaattcagctatattaacaatcaaattcggttaataaagaagttttagcaaaattatgaactactttattgctagcttaacaaaatagataacaatattactcagtttagaaattttaaatataattaaggggtaagttgaaaaatatttcttttattaatcaattaattaaatttacctctaattttatatttatttgaaatactagtaaaaaattacgtgcgaggcacgtatactaaattttatgttaggtattttttattatattaaaaggtaatacacttaaaaatgtttatctcatcttggttcaacccaattttatgttgttcccataggattgtgtattagatatgagcttagaagaatagtattcgtcagaatgggtgccagcaatggcggtgctgatgtgagttttatcttctgggaaaatctagctactccgacattacaattaca

SEQ ID NO: 324897 - DNA, 542 bp, Cannabis indica
ggttcgaacccgggtgacgccattgatttgtttataatgtttaacattttgtcgtagtgtacttattttttttttttattttgttgtaatcatatttttaagtgctctaacattctaattaattaataaatatgtggtgatatattattagatccatattaaataattttttttatatataattatctttaaaaaaatgtatatttttaatattagtgattcaataatatattactacgtattttttagttgatacttaacgagtttagttgacacttaaaggtacggtcatcgactgcaacaaaaaagaaaaatgagataattttgcagttacttttttattattaaggtcattttaacaactacaaatgttaacggattttcaccgtaaatgtcattatatattatagagaaaattgcactatatacccttttttgttaacccatttcattttcacatttcttttctatataattaatttaggggagttttatttgcacatcataaaattataaatacaccctattattaaaaaaatata

SEQ ID NO: 324898 - DNA, 705 bp, Cannabis indica
caatgctctacctatataaatatttgagacgtgattgaatcttctatttgtgggtctacaatatttgtataaatcataaatgttttcgttttcaatagtaatgatcttgtcttggaccactctatataatgatataatccaaaaacgtttcccataacttccatgaatgcggggggacttttgctaatgcattaatagcaaaagatatcattatttgctatttgggatcttaatatgctcaccatcacacactcaaatagtgacttgataagtcataaaaagtaaataatttttcatattatttattaaattaaattgtctaaacccaatcataattgaataataagtaattttatctatattttacactattaagttatgatatttaaattacacgacataatagtattactcaaaatataacttttatattaacatgatccttctattatactctttaattttacgaaaaaaaattaaataatgtaatggaaggagcacgttaatataaaaattatatttcgaagagtattattaacaaatattatatcttaaagagcacaacttagtagtgtaaaaagttcaggggtaaaaatattaattattcataacaatatatcacatatgggaaactttgtgtcagtctcgaccctaggcataggcgggtgttgcccctgattttgcccaaaatacgtgaaccaaccg

SEQ ID NO: 324899 - DNA, 789 bp, Cannabis indica
caggttgacgaagacgaagactgcacgctataagagagaccctgccaatggaagcttgaatagagtgaagaaacgaagatcccatgcgagaaccaaagagggaaaatgagtcttcagagaaactaactgacgggaaatgctttttgtcaaactctagcgggatttatgtgaagaaagaaaattttacacaaattataaaaatacatcgaaaaatattttatttttactctttaaattttttatttacaaaatatattttaattaaagtaattaagtattttttagttattttatagtttatttattattgtatcatagtaatcatcagatatttttattattatttcataggtaatttataattattgtgggatttattttacgttttttttttttactttttgatgaacaaagtatatttttataattataaaactttacaagagtatttttgtaattaaaaattttaagccttaaaattataaataaaacataaaaaataatattattaaaaattctcctttttttagcctcgctcctttttaaaacaaaatattaaagttcgtgcctattttgttttccatgaaagtttctcttatttcattaatactagatagatgttacgtgtcaagtcacgtatgttaattttattttagtttgtagtttttttttaatatcataattttaaaattaataatattcaatgtaatgataatcattgaaatttgaaagcataataatgatttaaataaaaataaaaattactattatactttgtaatagtaatta

SEQ ID NO: 324900 - DNA, 610 bp, Cannabis indica
aatcaatattttagactccgccccaatctagaccttaggacccagacccggaccctgacccagaactggacccggacccagactctaaccccaacccagaccctaacccggacccagactttaacctcgaccctgagcctaattcggaccccgaccttaaccctaaccacgaacctaaaccctaacctagactcgaacctcggccccaagccccagccccagtcctggacctcgactccggactcggaccacggaccctagaccttaatcctgaccccaacatgaaacttggacttggacttggaccccagacttggacctcgacctcgaccctagaccctgaactcggaccctggacccgaactcgaaccctggacccagactcgaacccgaacaccgaacctaaacttgacccaaacccacacccaaacacgacctggacccctgaccttggacccaaaccccgaccctgacctagatccagaacccaagcccaaactcagacccaaacccagactcgacttaaataaaattaacaaatgaaaatgaaaaataaaatttatataatacatttatgttttttgtttttaaaattgaaaacaaaagtggt

SEQ ID NO: 324901 - DNA, 2095 bp, Cannabis indica
atatataattatacaaaaaggttgggatctcactttttaaacttgtttacatgttcaaaataaactttacaattttatcgcaaaacaactacaaaataaagcccccagtcgtcctgagaccgaattctccaggtcaaaccatcttgacatgtacaatcatcctcaagctctggactcattgatgttcagccttagcttttcctttacctacacatgcaagtaataactgtgagttgacaaactcggtaagaaaagcatataacatacaatatattaccgacttgtatttaggtgcccatacacctatctacaaggcttaacaaataattaagaacgttctttactaaggtacgaccactgtaccacatgcactacgtaccgctactgtacgagtgttggtaggatttgccccatacctcgagtacccctaagtgttataccacatatacactccgtacttatccgtactagtgttggtaacaccgtgctgtactctttaaacatcgtacactataccaatacactcagtactgctactgtactactgttggtagtgtacgaatcacaatatagcgtgtatatattatacatatacataatcacatatataatatgttctatgttattcttacctcgtttctaaattcaagtgtgccagtcgacctgaatggaaaattacgcgttgaacggaggccataggtcacaatataaaactgataagtgtttactctaaaacacttctctaatgcccaaaaagaacctagggtttttctaccgagctatgtggtgaagacaccttataataaaatacatattttggctctaatttatataccatatagtagagctcttcataagctttaaaacagtatataaaacgtctaaaatagacacccgagtaaaaagttatggccaaaatatgaaaaaattttccaatactgtccaaccagaatttcggttggaacagccctgaaccaaccgaaatttcgattgtctgaaaagaaattacacaaaaatactcaatcttaaagcccccaaaacatactcaaaccttccctaatcacaatcaaactttccagaacatcaacatataacatactaaacatattccatgagttaacacaataattacaccaagaattaaaaagtgctattgttgagcaagatttgagttcttgaactcagacttgctcaaccacacaaccagccctcaaatacaactcaagcaagctctaaacaacctaaaattaacccagaaaacaacctaaagtgaccctaggttcggacagaaccagttctcgaattttgcaagcttgaacttaaagaaaaccttccaaaaactcataaaaatagatctagagccttaccttaattactgatactccaaatctccttcaaataatgttggaaactcagagcaagattgagtttggcttggttttggttgaagataggtcacgagagagagaaagtgaaagggtgatgttatctttcttttatttcaaatttttcttatttttctaagtaaagggataaaatttatctttttaacttactctaatcaaattagataattaatttggaagatgccaccaaattcccactaaaaccaaaactaatctctttggcaaaattgactattttaccacttacatcacccttaatttatctttaggcttagaggtaaaatggtctaaaactataaccccacctaatactgaaattccaaatatcatttaagattgtcccgctagataaaatgttctaaactaataacccatgtgattctaatagccatccgtcgtatttttccatagttaccgagtaaaaatcataaaaataatatttttcacatatggaataaatatttgagtttaaaaatctttaaaattgagaaattataatctaatgcctatttcttgaaaatagggcctacaatataagatattcacatataataaaaaatataaataattaatgctaattggcttactaatccatgttccaagtacgcgatcattacaattattcccccattaaaagaatctcgtcctcaaaagctaacctaaacaactctagaagttgagctctcatg

SEQ ID NO: 324902 - DNA, 564 bp, Cannabis indica
caatataaaaaaggtatagagtataatttcctcgattaggggcccaaaataaaattattgcaaaaatgtaaatatgtttatggtattttcaaaaatatcatatttcatttgaacaatgatccattttttgtaaggcccaaacaatgccaagatcggctttagagactcaagttgcatttcaatcgaattattatcatttcattattgtactttgcaaacaaaaagttggttggctactctcttaaattggatattaatcacaaatgaaattatcatagagatgaaattaacttcaattaattaataagttatacaatatctatatatctatataattttattgtttaagtaagtgatgtggctctctaaactaattttattgaagtttcatccggaatgtaatatttgtatattatatagttttgcctaattgatttagtggcatatagttatattttttttgtttaaataatttggttcattgttcaagaaaaaatctaatcaagtcatcactatcttaaataagttgttcattcctcacacctcataataataataataata

SEQ ID NO: 324903 - DNA, 967 bp, Cannabis indica
atatatatatatcaaaaacttatctttattttttcatatttttgtaaatagccatataagtttcctattagggaaagaagcccacaaaagcccataatcaagacactaaatatggggcaagtatacaattggaaaggggctaatccttctcactacactattatattctttaatttctttaccttgcattacatataaataatctctaacgcactacttaagcatagagaggtatatgcagcttttatgtagaaaaactccaacaagaacaatggagatcaaagtggttcttgatgaagatctaagagtgaagatcatagattcaaaccattcaaccaaagatcttttctttagggtggaattgcaactgttgactattctactccgagcaaatcatatttgacctcaacatttccattgattatctcaatctttttccaacacatgattgtgacagcaagggaaattgttcgtacgagtctatcatatatatatatatatatattatatgtataataatcttaattttgtcgtgttttacctgatccatgataattaatgaagtttggtacgtactttgcaatattttttgttttcaattttctctgatgattcttttgttgactatagttatagtacttgatgttatatgttcatttatgtacatagaggatagaggatgagagagagttattatgcataattcataaaaaatctatatttaatacaaatatttcaatttataattgaaaatatattcattatttataattgagtaaacagtagcataagtatttaaaattttaaatttgtaagtgttataaatttaagtgaaaattacatgatatatggaatttcatacaaaagttacaaaaatatgacatttataggtttgccactctcttatagtattttttcacatttaaaaatttttatggtatttgatatgccatatttttgtaaactt

SEQ ID NO: 324904 - DNA, 697 bp, Cannabis indica
catcttaatacaaggaaggaaattcttttaagtaatttcgttttctatttgtagtgtatatctagtggagtaaaatgtaacaaaaacagacatatacttggagaaatatatacaaagaatcttaaattcctaaaaacagcctcataaaaaaaagaagagaaagttatccactagaaatatcaaacactttgaatccaaagaataaaaacttttggaaaagaaaacctctcttatatctaaaattttaaaacgagaagagggaaaacatctttttgagtagaacaaattaaatgtatagatttaaaactcgatactgcttgtttcactgcaaaagaaacaaaaaatatattagtggataaaattacatagaaattttttataaataataatcaaatcccagccccatccccatccccatccccatactctgaccttacacacaggttctgaatttttaggtatacaaaatatgaattcacatacgagtttgtaaaatccaaaaaatgaaaatccaagtcaaattcaaaacatttacaatcaaattagagaattcatccgcgctttgcgcggtcttttacaacaactgtaatctttttaagttactaaatctttttacaacaattgtaattttttttaagttactaaatctttgtaatatatatatatatatatatatttatatatatatgggtgacta

SEQ ID NO: 324905 - DNA, 1560 bp, Cannabis indica
ttgaatttacaacgcttcatttcggtggcactgggagctgtcactgacaatgtagactctagctcatccaacctacaaatgttttcaatcacattatcattagaattagtctcacaaaaaaataccatatataagataaatgagctactcttctcttctcttctcgtggccaattgattttgaaatataacaatctaccttaacaaattctaagaacaaaaagtgaaacttgattatgttaccttacaaatttttgtctttggccaccaatgtactgagacttgtatccacaatcaaacatttttgatgaattggttacataggtaccacaccagatttccaaggattaagaatcaaactttttttcttttaatttttttccaatttaaatcacctactaacaagaaacaaagatcaaaatcaataccctctttatttcaatctatgatctttcttttttataaataaagattgctaattgtgattaatcaattatcaacatcccgcataatactttttgcctaaagaaatttcaatctgaataaataaatgaaatttgaacataatcacaaataaataaaatcagataataagaatttcttacgttgccaccaccttttacgtggttccaaatattggtgttgaaatctcagaaccgtaaatctatatatttatttgaatttatatatatgtatatttgaaatgataattattatcaatgaatgttcattgttaaaaaaagaaaaaaaatagataaaataagaaagcaggtagctcgatttctaggttgaaagagaaaggaaaataaaaagttaataatgtttgatctgcaaaaattaagaaaagagaagaagaaagattttgcatgtaattgggaaggtttgttttggaagagagagttttaccgttataaccgttaaaacaaataattatataactatattatttttattttatttatttaagtgtttctcttttgagtgcatccttattttttggcacccgtgtcttttaagtacatccttaatttttatattattatttaaggacaaaacttaactttccataataataataataataatttccatctcaaaaaataataataataaatttcagtgtcaaaatttttaaagtggttgctgctaaaataaccttgttttctgaaaagatgtaattaaaaaaattaaaaatcaaccttccgtaaaaatataaaaagaaaaatattcataaaaaaaaaaaagaagaaaaagcaattttaggtggtttgcataaattttccaaaaataaatatatagtttttaattttctctttaaaatgattaatgtttcagtaaaaattgctgaggttttattttatcagtaaatagctgagaaaacaatgaatttgggtagcgtggaatctcccaatccctaaggctagagaactgaaacattacaacaacagtaatggtgcaaatacatgactgaaaatgtggaagatttaaaatatgaagcaccagaagatatagattttacagtattgataacaacagtagctacaaatacgattctcgacaa

SEQ ID NO: 324906 - DNA, 863 bp, Cannabis indica
tggtaaaacatattccaacagcatgctggcaggccccatgatatccataacctagccagcctatgttggcaatagggccggccaggggtggccggacaacctctttgagatggctggtttatcattcgtcatcccgcttgaatgttcggactcattggttaaagtgctaagtatatgacttggccttcttattggcgagctatactgccacgtggcactgatattggccacgaagacatgccacttcaggtcgacaaaaattgggataacatacaccataccatgacatgaacccgtctaacccgaaccaaatctcagactcaaacttgaacccaaacctgaactccagaccccagactcggtcctagccctaaacccagactcaaactcagttaggacctagatctggttcgggttcagggttctggcgtctggggacagggaccgggtccaggtctgggtccaacatcaggggttcggggtccgggtctaggttggggtcgaggttaggttccgtgtccagagtctgagttcgggtcctggtctggggtcggggtctgggatccagggtctaatgtctaggtctgggggtcaggtccgggttcgggtccaggttctgatcttggcttgggttcgggtttgaggctggtccaagtctggggttcgggtttgaggtcccggtctagggtcctgtgtctcgggtccggggtcccaggtcccgggtctagggtatgtgtatgtgagcaaaaatacaaaatataatatgttagataaaaaatttattttttaaaattgaaaattaacattttgatattttttatttctaatttttaaaactcggcttttaaaaaatttagccaaac

SEQ ID NO: 324907 - DNA, 1708 bp, Cannabis indica
catctcttctcctgttccatcctatatatacatagctttcttactaatttttgttttttgtttcctttgatcagctctatatagctagctagctagctgagctatgaatataatgatgatgatgatgatgatgagatacgtacgtagacgtacgtacgtacagcggtgaattataaggttgtagagagagagagagagagagtttgagattattttctaattgattgatttattatttgttggtgaataaaaatcagccctacacacgtttgacaaacccccaaacggatgaggcaaaggaattattaattaatttatattattcaaagtaaattaattacgagattaattattattattactattcataagcatatacatatcatatatgcatgcaccaccctcctataattaataacattattcatttcaacagaaacagtacataatctttttcaatctcttaatgtctcttttcttatttttattttctcatagaatgtaatttttgtttattttttcttttgagtcttttattatcaatggagtttattgggttcgcgcgaaccaataacgaaagttacgtatacttaattatgttcaactctttctctcatgattttaattataatcaatatatttattattcttgttttaacagtagtaccctattttccttttcttttaattaattttgatatttatttgtcttctactatttataattcaatctgatcacattcttctcttccgatttcttagtttcatgatacatatgcatatggaataaatatatacatatatatatataaagaagaagaatcaataatttcagaaagaatggtgatttttaaaggaagatgatctctggctccatatatacaaaagttatatttacaaagtcagcggcatgcagtacacttctaatatatactatttgatgatctcattcattgtcatatatattaatgtgcaaatttttatctctctctatatataaaaatatttcgtaatatttgtagcatgatcaacatatacatagatagttacatatactaaaaactaaacacaattgatatttaccaaactatagctaatattaatatttcgtaatatttatatgtatcatgcatatataacaaactagctagctatgttatttatatgcatatatatacataattattttttttaatttaattaaatctgattcacaaagataatcaaattaagatcattctctctcatgccccgagattctttatatatagtaatattacatactatactataaaaaggaatccaagcctttgttgtgaagccaagtaattaatatatataattatcaaatataaattaatgataaaaaaaaaaaaaaaggaaatggagagtgaatggtgaatggccatttattgttaattattaaatccactagaaacgtacgacgatatatggatcaccgatgaaggtgaacgtggggggcttctaactatatatatatatatatatatataaatataaatatatataagtaacatcttctctctctatatatattatgtattattttgattgtttttatttgagtgacccctcttgttttgggacgtgccctaccatgtgccttctatgatatatgttcttacctttttttgtaaaataaattattaattacaacaatacatatacagtgatatatcgcaaaata

SEQ ID NO: 324908 - DNA, 618 bp, Cannabis indica
atagattttaattttttttaataaaaatacaaagtgctatttttctgttatttctaaaacaacgatgttttcacgttgctattacgggaaagtaatgtaaaaacaatatttttttttatacaagtgaaaaacctgtaaaaaataaaattcattaaaaaaattataaaaatattttaaaaataacagtttcctactaaaataacagcttctggttggcgttgtataaaaatattaacagaaggagcagtatcattagaccagtttagaattctaggaatacgagcatgcaatttagaacaatgaatgtcatcaatgtaaacacaacattcattgaaccaaacttgaaaacataggccaaatctctcaacctataaaaacttattttctctccattatcaactttatttattttaacaagattctttacaatcacatttctaatcgaatcaagaaataaacaataaaactctttgccccaaacatattcattaaaccttccactatcaataatatctaactctaagtcatttactttcttagtgtctaaatcacttaaaacaaaacagtgaacaaagtataaaacaacaaactttcaaatgcaagctcatcatcatcgcc

SEQ ID NO: 324909 - DNA, 958 bp, Cannabis indica
tcgctatactaaagatactaagatgtgattctaatagtcaaacaccacgttcctatgttgctgggcataaaacatgcaaaaatatgaaattccatatataacatataaaatgcattctgaattcaaataaatctccgtaaaataataattcataaataacatgcaagtttcataaataaaccctacttatatgctaatttccaaattaaagttaagcagtctttacaaaagatacacgatttaggtgctgggacctggagtcttcacccaagatgcaacttccacataccattaagcgccttcctcatggtgccatttgataccaccttcttggagataatcctcccaactagagttattttcaaagtattcttagtagagacaagatcaaggtcacctggatagagaagtcatccatacagaaattttcagtctcatttatcaattcttccaccgcttaaacattatccgcttgaacatcagtccccaccattgttccccaaatagactggaaggtaagatgaaatttgggtaatttttttacaagaaacaaggatgaggaaagcacacctattatgggataatttctatggagtgtgagataatatagatgttattgttgtgcactatatattctgcacttttcccgtgtgcacaacatattgtcatgtgcactatgcacggttacactatggcattttttgttaaaaaaatatgttattttaatattttataatcttacatatatgttagttagtatactttttaaagagatgtttcgataaatccactatatatttcagtatataatagaattttttagtaatttttttttataatcgtgtacgttatagttatttaggaccagttgtaaatttttaaaaaatttctagtaatttacaatatcaaaaattaaatttatatatattattgctcacacgactattttttttataca

SEQ ID NO: 324910 - DNA, 680 bp, Cannabis indica
taacctgtccaattttttatattgagaaattataaataacactaacccgcctaatcaacctgaataagagatttatatatatatatatgtttattatatataatctatataaaatataatttatatacatgtttaaaagatatcgaaagtttctactccaaaaaaaagatatagaaagtttaaactactatattttttttacggtagttgatttgaattttgaattcaatttatatagttgtctcattatcacaattaactaaaatacaataattaaatgtaaaaaaaaaaatacattagtactcagtttgtgcgggttgactcgaccaaaccaaccaatttattacgcgggttaaaaaaaatacttacttctttttaatagtattttttcttgattgggcgggttgaaatgttatttttcttaattgggtgggatgcacttaaatttttgtaacctaatctttacgttggattgaataaaatgtgatgtaaactcaccaaactggctgacatatacccctaactaagaccataatcgtttttttttttcaaaataagagtgagtgctaattataacctgttagtcaacttccatatctcaaatcacatgtcggaataattttttcaatttttttttattagcaatatttattatagttacaacatcatccttgtaaatt

SEQ ID NO: 324911 - DNA, 1244 bp, Cannabis indica
tatatactattgtttttgatgaacaacaaaaaaatcatattaaacaaagaggaagtgaagttttataccaatttctttgtctaaatatgactttgattaaagttaagtgtaattatagagtaaacgaaatacatactcaaataaaataaaatttactcccgcgtgagtatgggttaaggcaaactatgtctgtgtttaagactcacccaaaactcatcaaaattcaaaatttttgtacactatataaatatgtggaggaaaaaaaaattgtgaaattttaagaaataggcccactaatacccatttcacctcttactcaagtaaaatactttacatataacacaatttatagtcgaaaccctctagctctagggccggttttcagaataggcgagataggcacgcgcttagagctcccacccaaccaaggtcccaaaaaaataaatcatttcatttttagtataaaaatttaaaaatattgatataatatgatagtataactttggtgtggtgataatatattgcttgagttggtaatgatattatatgtgcatgattttatttaactatgaagtatcttatataattctagttgcaaggtagggtagaggttcaagttactatatccaatattggtggtaatattcataccacctatgttccatcatattatatgtctagagagtttgaaggatgtggtttaagtggtctagggttaattaaaagagatatacccttgaaattctcttactattattttgctcctaatgaagacacaatataataaataaaaatcaaactgacacatctttaagataggctataatggaccacaatttttttctaggtgtatttatatttgaatgagattgatttgagtggtataagaacaataagaaaatagtcatagccagctctttattattatttagtatttttttttttacttttagttataatagacttatgagtaaaaataaaattataattaattataaattatcagttttatgttgtaattaaagtctgtgattaaaaatattagttacaaaaattataatttgttgtgattaaatgtatttttaaacacaatacttattgtgactaaaattatattagtgacaatttgtatctatatattatgttttaatcataagtaattttttagttttgactaaaaattatatttagtcaaaaaaaaacttatattatgactaaaaagttatcatttaaagtaacatttt

SEQ ID NO: 324912 - DNA, 2321 bp, Cannabis indica
tgtacacccacaaattttccaatttggccttgcaggattcttttgaatgtcaagtttgggcctgtggtctcttaaagatcgttcattacacctatactttctaggctcaaatgtgaggagggtgtataagaaagagtctcacattgttaatgtgtagaaagaaaataccatacataagatgaatgggctactcctctcattgtcaattggttttgagatgaaactccatgcaccttcatcctaaattctaaaatggtattagagcaattagaattttttgttgtctccacattttacctctatttgggaccttgctaccaatgtgtgccagtttttactgttgggatctttaacttgtttcaaaaatctacaatttctcaacgtgtatacccacaaatttcctgatttggccttgtgggattctttcaaatttcatgtttgttcatgtggtctcttaaaggtcgtttgttatatccacaatttttcaagtcaaaatgtattagaaatagtctcacattgctaatgtaaagaaagttaaggagggggtggttccagaagaagaagagcaagaagaagaagaagaagaagaagccagggggatggttctagaagagaaaaaggaaaataaagaaaaatagaaaagaaaaaattgggcaaaaatgaaaaaaaaaatgtaattttttttatttatttttacttttttaattatttaaaaaatttatttatatttaaaaattaaaaattatgtagacaaatcaaaatataacatgtgtgcacttggatacacatagacaattctccttggcatttaatagcaattcactaacgagagggtaaaaagcatagcaaaagtgaggttttggtagttttgccaccaaaatatcagtttgtggggttaagtgttacaaatcgtatagtttagatagtttttccaccaacatcccttatataaatgtgatcaaattaagccttaaggccattataaataatgttattcggtattgaggaagcctaaatcctatcagatacattttaattaaaagctcatttagtcaaattgtgagcaacaaagttaaaagatctagaaactttcaaaaaaatcacatcacgaaaaagagttcatgaggctcttacaatgagctacaaagttatcaattttccacctcaggtttaatcctttgacaacattaatcactatgttagaatcacattccacaataacaaattacaagccatttttcgctgccagttccaatgccaacaaacaagaagtggcttcgctaataagagcattggcaaaatacagcctattggtaccaacccaaaaacctttctctacattatctcaagccaccaccgtaagcatcatagtcccctccctaaccgccacatcgtagttaagtttgatctagtccatgggcggtggaacctactcagtgacaacaaaagaaggttgtaattgagacaaaagagaatgaccataatctgtataacaatgagcaacaaaatctatgtgataatgtatgttatacaaatagttattatgtaccttgtcattcctcgctctctatctagtgtcaactatgatagatgcatataagaacacatcatcaacgatttcagtttagagtcatgacttatcacggatgtctcaccagaacaacctaaataccactccctagtattcacatatctcattgcctaataagaaaaggttgatgccctaacccgacatccatatatctcattgcctaataaggtaagtcgatgccctaacctggcatccacatatctcattacctaataaggcaagtcgatgccctaacttgaactctatatatcttattgcctaatacggcaaggcgatgccctaacttggcatccatatatctcattgcctaataaggcaagtcaatgtcctaacttgacatccatatatctcattgcctcataagacaagtcgatgccctaacttgacatccatatatctctgtcattgtctaatatgaaagttgatagtaggaaacctaacaacggtttcacttggcgtcatgactttaatcgacttaacagaaatcatcgttctattacatcgatcatagttgagtcataatgataataatcgtaacttaacatgctatgtcgtacggctgtacctttcttacctcaagtttcgattcaagtatgttagccaacttgtacggataacgatcaacgattccggaccctatgtcacaacaataaaaagaacggttaatcacttaacctaactcgttctaggtccttaattcatcaccgtaagtccccctataagtcactag

SEQ ID NO: 324913 - DNA, 891 bp, Cannabis indica
accaagaattacaaggtttgatcaaccaccatgagatacttgtctactactgggggttgggggaacaatgaatgatcttctttataaatgaaactgagattgaaagtcagagattacatgtcaaaacacttgatactttagaggaggatacaaacaaagaaactaaacaaacttcatggctgattttgttgatcactaattaaggttgctacttcagtttgatctctaattattatataaattatcatcttatatgtataggatccatgcaagtttggactcaattaagtaccattaaggaaaaggtaactaaagcattgtaaaagtgttataatggagaacattgttattgggtaccagtggtgcctaggtgttactttacgataagttagtgatattccctaatggacccgttacttaattacaatgctatcacactaaagaaggtgcttttaatattattcaataatgcaagataagtaaccaaaggtctcgctgttttcattaatgaaaccaaattaaatgcatggtaatctctaaaatcgttctaagttcaacaaccacaattaaatacaattcttctttttctgtgttgaaataattaaatacaatttattttaatataaataatatttaaataataatctcctcaatttaaatacaaaacactcttaatataacagtactttttctaaaagaataatattaaaattgagcatattttaaatattaaaaataacaaaaaaataataataatattactataatatatcaatatttatatatatttaaattaatttaaaattaatataaattgaattaacttaaaataaataatatttatatttatatatataaattaattttaaaataaataatatttatttttat

SEQ ID NO: 324914 - DNA, 948 bp, Cannabis indica
aaaattcacacaacaacccacataaaaaccactcgagcaactatcaaaacaacccaaattgtaaatttgaaaaaagaaaattaaacaatgatatatgggtaattctcgtatttaatatgattgaaatattttctcaaatcttcttttgtctgtcattagatatttagtttcaataaatatgtaagttcaaattaaatatctacaacagtatcggttacaaatattcattcgaatactgaaatattattatttaatatttaaataaataaatatcttatttaattaaacatttaatattattttattggtgttaattataatagtataaatctaaatctttatatacatataatttattctctccagagattatagtttttgctcatgtgttgagacaaaaccaagaactttgctatcattgtgtatcttaatcaacctacactgatccccgtttgtggtaaaagatctgaaagagcaaagtgtgagttcatcaccgttccaaaggatacatcttgcgaaaataatcaaggataccatgataggtatcaagataaattctatttttttttttgttttagatttaatatacaatggacatcctaaggtgcggtacgatgataatcactaaaattctttcattgtgcaccaaatttagtacgaaaaaatcaacactcaggacattgatcattgcatatagaaattccatgtgttagatggtaactatcatttcttagaattctctattgagaatctttctagcaccttatgttagactataatataatatgaatgataaagcatatataaacgatatgtaatgtggaataaactgtaaacatctcgaaactgtagatgcaatgaaaggatcgaaatacctccagccattgatgtttgagcttcaatccctgagatagtttcggtattggagttcgggcttcctcgctctct

SEQ ID NO: 324915 - DNA, 878 bp, Cannabis indica
catagaaatttttattgcaactagcattgcgacttaaattgtaaaaaaaatcgtatagaaacccctattgcaactagcgctataactactttagaaacccaaaccgtaaatttgaaaaaaaaattaaaaaaaataatatatgggataatttttcaaaaaatataggcaactttgtgccatgccaactttttataagctattttcgtgttatggtaatttttcttttaaattgttgagccctttttttaaaaaaatatttgaatttgtactctattttctattatttattaatcaactagctacctaattatattagatttttataattttaattattttatataattgtaaaataataatttacacaattaataaaaaaattataatcattagaaattaaatatttattcaaaatactcaaaactttaactcaaagctcttaaaataaattatcatatatagttttagttttaaatttacatttaatagttttaattataatttttttttatcaaaacattttttctttattaatcaactgaaacaaacactacaaagagcaaccaataaaggctgcaacaacatagcaacaacatccaacccaacaaccaaaacagtcaattcaaaaacgagaaagtaaattctgttagacatttatatgtataaactgaaacatacatgattatgaataaagtgcggaattaataaaacatatatgcactataatttaaggatcgaaatacctccagccattgaatctttgagatttagtcccacataagcatgatctgcaaaagaaaccgattgatgtgggtaatcgggcttcctcgctctctcaactctctttagatggaatttgctgttatgaacagaatgag

SEQ ID NO: 324916 - DNA, 1220 bp, Cannabis indica
ttaaatgtgtagttatatgaatattagagtaagattataatcctaactaaatccaattatgagataattagttaacttttagaaaaaagaattaaatcaacattaatttattaattaacctaaaattttattagaacatatgggtattatatatacctattttttaaaataaaattatttttgagctcgacgattagtaaaaactcgattgatctgtacaaagatatcatgacaatgatagaatgtagttttggttgtgactaaaattatttttagtgaacttctgagttggcaagatatcttggggtaattttttatgaccaaattacccttggttggaaattatttaagggctacactaggggcacaatagtctttctattagttatttgaggattttgtttttagttgatcctagcagattctaggctgaaacaagaataaaattaagagatttgttatattaattaactaagataagtttgattttatttactttaaaaaataaagactttgtcatcatcttcttctctctttatctctctcttcgcagcccttagaacccagcacaactatggcaaaaccaccctcaatttcaatcttttccttgctataaataaactctaggagctgttcaacttgaagtaagcccctttttccttgttcttggtaatttctaggttctaaaattgagttattttgggaattttatatgatttcaagtctataggttttggtaagtttagagtttgctcttaggttcaaattaaggttgtttatgctttaatttcaaattttattggctggtatacttttgtttgggtgagttgagctcaagaactcaagaactcacacaacaatggtgagtttgcattcttgaagtatttttgtggtttgaatagttgaatataatatttgtatgttgataaactattttggaaggtttcattcggtttggaggagttccggaggagtttgacgtgaaaaactcaaagtagggctattctgcattaaaaaatggcttactatttttacagggcaaaacccagaaaaatggtggtccatttttagaaaatgatggaccgtcttggggtgtttctagcagttaggttttgtgttttatcgataggatttgtctgatttacatttagatcttagaacaagattgattaagttatttaccaaatttttgttgtcgtgacatagggcccaagatcgtc

SEQ ID NO: 324917 - DNA, 1744 bp, Cannabis indica
attaattaaaaataaacaaaaactgaaaaagtggatgacaaatttaaggccatatttaagaaaactagtattctttagaaaaatgtatggacttgagtaaaacataatacagaaatattaggtatataaattatgttaggtttactctataaaatattaccataactaacctagctaatatcaaagggcatgtggatagctagctaatatcatcatatggactataataatatattaatgtaatttcaaaaatttattaattcatacataataattaattattcataagaatcataaccatataaaatggtccttattaatttatctccaaaccccatctaataatatataactaacctatattatatatgtatatagctcactccaaaaatattaattgttatttataatttttagtcaattttatatagataggcttccttctcgaagcatatatgtattattaattcaaagctatatatacatatatgaatgaaataagttgatcaacttaacttaatactcttcgatcgcttttatttttatatatatcatatacgatatgatgatggaagtagccctaacatcatcgtcatcaccacagagactgaaagccagtccagtggctttggatgatcctctgccgccgcaagagaggacggcggaggaagaagccaaatacaagagatcaaggaagagaagaaatataataagagtaagctgtggaatgttggtagtacacatcatcatattggttatattaagcttaacagtgtttaaggcaaaggaccccaccacaacaatcaacaacttccacgccagcaaccttacttactttcttgacatccaacggctgagagttgatctcaacctcacactggccgttgacttgtcagtcagaaacaagaacaaggtttcctttaagtaccacaactgcaccgccgcccttaactaccgtggccacctcgtcggcgtcatcaacattccggccggcaacatcccctccgacgacacgaaacgcctcgacatcactctcaccatcatggccgatcacctcctcttagacgactcccaagacctattctctgacgtcgtcgccggcgttgtgccgatgaacacttacttaaagatgtccggcaaggtcaaaatcttcggaatcttcaagattcatgtcagggcaacctcttcatgcaatttcaatgttaacatctcctcaaccagtatcaccgatcaaacatgcaataataaggcaaaattatgagattatatatttctatttttttccatttctttttgtacatatatataaatatattaatattaatgcatgcatgcactactatatgttatattatattattaatatacattttttgagttacacatatttggattcgatttccgcagcatctatcaatattttctatgactacttgaactagtttctttgtagttttattaataataaattaattaataaagtagcttagcttattattacttggttctttcttggaatttatttttcaaactagctaattttagcttttaatttcacgtgtgttgttgttgtgattttattttttttattttggttttgggcaaaaacagaacaattttagcctaccaattacttttattacaccgtattgtattgtataatattatattaaattgtatttcatacaatatttttatataaaactatatcttgtattaacttttatggacacctaaatatata

SEQ ID NO: 324918 - DNA, 586 bp, Cannabis indica
cgttcttgctatggttttttcgtttgatgcaaatgtattcatggatttaaatggttaaagttatagggaatttcattgtttcattttaatgatgaataggatgatagattctgaattatacaagcatgttggattcacaatctgagtgtattataaagttatgctggacaaaagagatgacttttctctgcttattatttgtaaaattatgaagcttttgatagaagtttaatagttttccatgttcccttttctttgccaagctttgtgaaactaattttcctgcacctcaaattgaaaaaacatagattattcaattccaatatatttaaaattgaattgaaagacatgtttatcgcaagttgtaatcagcaaaaattgtagtttgaaaaattgggaataaggaattaacttctgcaggaagagttagagtaggatttaagtttaagtgtttaactagggaaatttgccaaactcatgaaaatgttgacaaattaacaacatagaaattaggactataatggtcgttgtatgtttaaacgtaataactgcgccgagtgttaattttacccaaggttttgctact

SEQ ID NO: 324919 - DNA, 1572 bp, Cannabis indica
tggatgaagaatatttggctaagctctaggaagcctcttagattttcctcaaaaggtatgaggttggatctaatgaggccaagaagattgctagaataattttttgtaggcctaaggtagaacaaggaagcagaagttcatactctactactatttttccagtgtttgactgaattgtttccaaggaatggtatgatgcttctcttggctgagacttagctccatttgctatcaacctcctgaaataggtagttgtttccttcagccagctaatcaacgatcgatgggctattgttgctagcaaagacccagtctaccttgtcaattatctcccccatcagtctgttagggtaataattttttcttaacacaataacaatgaccataaatttagatttttaatatccattattcatcaaatcttgctgattttgtccttttcactttttaggggactctttgtgctgagagctacctggaggtcatggccaatatgaccttggagttttaaagtctcagggtcgagtacaaagtagatgatagtaagaaggttgaaccctagccaacctagagaaggtcaaagtcgagcttaaggagactaaaagaaaaatgaagggcatcattgaccaataggttaaggcaaggctaggagcaaaagtcatgaaggttgttgctactgttgaggagtactactgcaagttggagaaaaaagtttactacctgaaggtaggcattgctgacgccaaaggccatgtctgaacaatggagaaaagggaaaaggaactctaagcgagacttgcaaaggcagagggtgacctaaagaaagctacaaagtaaccgagagcttacctaagacctcgagggcaagaagagccagatccatgtcctggaacacgaatagaagttaatgacttacttcagagatgtttcagtggcggctgagaaggatttgaaggtgtatctagttgtagccaatgttaagctggaagaagttgaggataatgttgagcttaaacaatagctggcaaaggacaaaacccaattggcagaagctcgagaaaagtaagcagaagttgaggaggaactagtaaagcctaaataggagttatcaaaggtggaggagaaaaggatcaacaacctgaatggttccttcgttaccgccctttatacgctttgggaaagacatagggacatctgcttgaaggctttggctgacgaggaatcatacttccgctctttactcctttacaaagaaaaaaagattcatccttccaaaaatatggaggtagcagaatcatcctccaagccaaaattgttctttcaactaacgctccagattttgagcctctagtacaggaaatagcaactgacatagctgctcagaagccaacactagccccaactgttgccaatgtcaacattcaaccctgagcttcacaactatattcttttctttgtcttttcttttttgggggataagggtccccctttttgatattgtaaaagacaatttttattccctaattgcggggaatttgtgttgggttttgtgccctaaataaaaccctttac

SEQ ID NO: 324920 - DNA, 1274 bp, Cannabis indica
aacactcgttcatcaaattgcatttagctccaccaggcctacacccgggaatgggcacacattttcgactcgaacctattgctggacctacacatctcaaccctccacagcaaatctttccttctaaaacatgacagtactccccggctatgtaacaacgatcaccatagctctcctgcgccaccatcatcatcactatcgcaaacaacattattccatagctaaatttcttcattttttttaacactatattttttgtgtgtaaatatatatatttgtagtgatcgtgatgatgattagtatgaagccctcttttgctttgcttttctatttataggacaattcaaacaactattcattattcaaataaataaatttatattaattatatgatgtaacatataccagccaaccaactactacaacaatattattaattaatattgaatctccccaaatattgatagatttcataaataatattaaaaaaaagggataagtcttatcatgtcagattactattaatactatattgatcaaagtaatatcaatgtaacaattaacaatatataatgaatttatatatcattaataaaaaaaaacaatatataatgaataaatatggtttattcttcttaaactatgtataatttgaattaaataagtttcttaattgattttgttacttttaattatttgatttgtgattatttttaattatttaatttataatttaaaacaaattattaattatatttatccaagtggaattgacgtgatgatttttatgctagctagccatgcacagaggattgtaactaataaaagggacataactcagtattaatataattcaaaaattaaaaaataaattaatttgcagaaaaattcgaatgtcataattttaaaatatataataactttgaaagaataaatcttatctatatattcatatacaaattaattataagttgtccatatctagaaaattctagtttcctcaagataagtgcaataaattagatagtactgacatatttcaattgaatgttttatttgtaaataagaatattttatttggaaattagttctccatatcattgtgttgtttatttagagtgctttttagaaataattgtataatttaaaatatatgtatgtgtatataacatgcggaatgaataaacatatacactatatgaatataaggatcgaaatacctccagccattgattctttgagcattaatcccacataagcttgatctgcaaaag

SEQ ID NO: 324921 - DNA, 1068 bp, Cannabis indica
agactataaattaccttagtaaacatgctattgcgtaaaaattagtaataagaatataatcatattaaacaataatcaatagatgcaattgaaatcgaaatccctaaattaacttttatacatgtttagacccacgaaaggccttttgccgccctgaacggtttctccaccaatggatatggatttgcttgtaaggggaacttcgtttaaatccatgaaagaacaagccaatttctcggaacaatgagcaaatgggaagacgagatcttcacctacatttttttactatatgacctgagaatgcccctagccctaacctaagcaagaacttatcttgccttaaatgtatagcaccaagaaactcagacagggggttaatgcacttacttgataaagcagagagaatagtcggtgccttcaaaatgtttacgagcaagctctgaagccagtcgatacaagtgtcgcagtcagcctgaaaaatcaattgttaccttcgatgaagaacttgttgggaatattttaccaggatatagatttactaacaagtattttgattaatatcctaaatagtaatatatctaaaaaaatgaaattaaacaaataagggattaagaaaaccttacattagttgcagcagaatataatgactacttccgctcagatctctaacccttgttcctttatgtcgcagagtattatgaagatctgagcctggatctcttgctctccttcgggttttgttaccactgtcttactcactatgattgagtacttgacttgctatgtgtgggcatggcactctttctctaaggattcgaatatggtgaaggacaatgaaggacgtgaaatcactatagaaggaactctctcatctactagttgtttgacaagaaaactaggtttgatttggctcaaggcatcaactaaatgagtgagagcatcatattccttttatagtatttcaactagggcttaaggcaattatatggattaaaaaataataaaatattaggcaaaaatcacttataaggccggccacaaagggaaccactttctagttacaatttt

SEQ ID NO: 324922 - DNA, 1331 bp, Cannabis indica
tcggccattggttctccatctcgaattgacagtggtttatttgctgtcataggtgtaggacttggttttaaattcatcatgttgacccgttgtaaaagttcagagatatatctcccttgtgataaataaacacctgtgttatcccgaaatacctcaatgcccaagaaatagtgtaactctccaagatccttcaatgaaaaggtcatgtttagtcgagcaatgaacttttccaattctgtagtcttgctgcctgtaacaatgatatcgtcgacataaatcaagaccatgatgacatattctgagtgttttaacataaagaaggaagagtcagctttggagttcacaaaatgccacttcagtaatgtacttttaagctgttcataccacactcttggtgcttgcttcaagccgtaaatggacttctgcagtttgcagacatagtgtggtttagaagggtcttcaaacccttgtggttgggccatataaacatcctcatcaagcgtaccatttagaaaagcgttgttaatgtccaattgccttatagtccaattataagccacggcaatagtcaaaacaactcttatggtagaggctttaattaccggactgaaagtctcactaaaatctaccccgggcctttgatgaaatcctttagcgacaaggcgagccttgaatcgttgaaacacaccagctgcatcaaacttttctgtgtaaacccacttattcccaactacattgtagtgtggtgagggaggcactaacacccatgtcttgtttctacgcaaagcacccatttcagtattcatagccaagttccacccctcatggtggagtgcctcatgaatggaaagaggaataccagaccctgtgtgagaaaccagaacccgtggcttaaaaatcccagccttgccacgggttatcatgggatgttgaggagcagttggtggtggttgtggcacaggtgagggtgattcaggagagggaaaaggtataggagaagcagctgattgagaatgaacagaggcagaactagtgacagagactgcaggagtatgcaacaataaatctgaagtagaattttgtgcaccagttatgggagtgtcagaaattacctggtcttgtgaggaaggtgactgagagtgtgatgctgcaggagaccgagatggaattgtattaaatggtaagccaaaccaggaatgagggatagtcacagtgacttcatgttcaggttggtaattgttaaagaaaccatgttgacatgggaattccttttcattaaaaacaacatgtcttgaaatgtaaattcggccatgtgagctaagacatttata

SEQ ID NO: 324923 - DNA, 883 bp, Cannabis indica
aaagacaagtagttcggttctagggatcaccccaaaaaaacactataaatacccccaaggggtcgagaattctgggtttatgagaattaaagagagaaaaactaccaagaacattctctgtaataaatactctcataagacccaatccaacatcgatcaaatattgtaactttaaaattaagctaacaatattaatgatttcaaactatcacattttatggaaaagtaaatcgactattccaacagtgtaatatatatttatgaaaatgaaatgggtaattgatccaatccagaagtcttattgtcacaattaagaataaaaagtaattctaaactaatgaatttatgaactattagaaggaatttaaaaaacaatcaaaaattaattttattcaatattcatagaaatttaggcatttatatataccaaattaaaggggctaggtatttcataaacaatcaaaattttgatttttatagttttttgattttaaatcgaaactccgatcagtagcaaaaaatatcaatgagcaaaaaacaaaatattgtttctgaaatcaatgaataagaaaagacgatagagaagatggaatagaagaacagaagaaaagtgaagaagagacgatggaaaagagggtggaaagaccacatgaaatcattttttatatatataatttttttaatcatgacaattgtgattttttttacagaaaaatagaggcttttggtgtgggaagccatacagtaatagaactcactgatttgtcacgcgctgtcactcgtgcgcgaaatctatactatttatcttaaagaaaaagtttaaaaaatttatactacatattatggtgccgtttggtaatacttttgctttctaattttttaa

SEQ ID NO: 324924 - DNA, 514 bp, Cannabis indica
tatatatatatatatatcagtacttcccttgattaattagtatttgtatttgagaaatgatcattcaaaattaaaaagaaatttgcatttttttttcttcttattaacagatttattaaattaattaatttaattattttgagtcctgatgtttaacattttctatttggtataaataaataatatacaagcatattctttaatattttttgtatcatctttaccttaaaaagaaaaaaaaaaggtttcgatcaatatcacttcacataaatgaattataatatacaataattaacaattttgtcttttattttgctctaaaatatatggtttgtttaagaatttttttttgaacttttacattttacagaaatttagtcattctgttagattcggttccattattttgtttaaatgctgacgtattttgttaattaccaactttatcccctaaattttgaaaaccattaaaccataccaactcaaaaataaaaataaaaaatattaaatattt

SEQ ID NO: 324925 - DNA, 1276 bp, Cannabis indica
catcattttacccttctcgggtcataattactaaaatgtccctggctcaccaacggggtcttaacacataattaatcaaataaattctcatatattgaactatataataatataattcctcaattattcataattatctaattaggattttgctaatctatttcttaattatagggtattacaataaacttttaatttaacatcaaagagttgaacagaaatggtccacttggttgcttgagaattattttcatacaattatttatcttattaatttatattattttttagaataaaaatatcaaacttattaaatgatgtttaaaactgcaaatgtattatttttgtaaagtcaagtataatttttaataattataaaatgaaacttttaattattatgacattactaatattcaactcactccatatttttagtctattttttcaagtgaaaaaaacaagaaaaatgaaagagttattaattattataaataatttaatgcaataaaaattttaaattttaatataaaattaaaatataatagattttaaattccattcataattaaataaaaatatagggagacgattttgtcccgtgatgtactttcacggaatgtattccgtggtacattagatgagtctcaaggtacattaaatgagtgtcagggtacgtttttactttttaaccctaattactcttagatcaatctcagccgtcagatcaaataactccttcatctgacggctgccgtacatcacggattacaatccgtgaaagtacaataacgggacaaaatcatatccctaaaaatataatttactttaatataaaattaaaaagaaatattaaaactgcgcgaaacacgaacccattccttagtatatatataaaggaagatatagaagaggtcagagtgacattatgtatatgagttttttttcttaattctcaattctttaaaataaaatataaggaagttttgccaaaaaaaaaaagataaacagattaagtgtataaacattaaaatataaaagggatttcgccgctaattgctcaatcttattcaagtattctcagcaaaaaaaaaaaatcttattcaagtaaagggtaaatactattttgaaccctgtgttttgcaaaagttaccaattgaattctctgttttgttaaatgataaaatagaccctatattttctaaaatgataaaaatagtactctgagctcaattttcaataattttattttttaatataactaactttaagacaataa

SEQ ID NO: 324926 - DNA, 515 bp, Cannabis indica
taagagccattcattccgtgggtgtaagggcccaatggaggcttgaagcggggacgttacacatagtttatataaccatgaatattaattaatatttaatcacaacttctaattgttgtttatggtgctgtacagtggctaatggggcaacaaatgataatgatcatgacttttctttcatgcttttacttcctagctagaacttcttaatttattatttgatgtataattttcatgatatagttataaatagtatatatatatatagcaacaaaaaaatgtataaataaatttgtaaaaaggaccaaatcattagttagcatctgtagtatgtttgtgtaatttaattaaaataaaaatatataatgagggcatgctagagtacattacttaataataatttttaagtacctttcttatgaataattttgactatgcatacaatataattataagtcagcctataaatatattaattataaaaacatatataaatagaaaaaaaaaaatataat

SEQ ID NO: 324927 - DNA, 1127 bp, Cannabis indica
attaagtattaggtcttatagaacataaaaaaaataacttttaaaaaatatcaaattataaaataacacttataaaaatattagaaatgatgtatactcaatagcaatgctattataaaaaatcgctaggcccttcataattgtgttttggggtagttgcaatggtgtaattttatcatttatcttctttttttctttaacacgatcgatggagagaaaattattattgcagtagtcgtctcgtctgccctccactttgactttgggtcattactatagtcagtagtcctttactcttttgaaacctaacaacactgataagtcattaatgcaaaatatttcaaattaaagttgctttggcctaatctagtcatcatgggtaatttaaactccactaatttatgatgtctttgattttatacttaatgtagttggtttgacaattgctcagcttaatggatctactaactgggttgtaattacaaaatatcccttttcatttcattgaaatatgtagatctatgcctatctatttaaagctaataattcacttaaaaaaattatgccaataattcatttaatttattaaatatattatatataagaaaatcatccttacattaagttttgaattttgaaatggttttgtccttttcttattataaaataataaatacatttaattaacaagtattaaattaatcgaattacgatccaacaattagggaaataagcagaatgcattttctcataagataaaatccactccaacatatattaaatggggcaaatttggtcatatatgtaagactgattaccagaatatggggagtgttcggtattttttgccctaattaaaacaagttgcatctttttcactcaaacgggcttcaagagttgcatcttgaactaaattctactacttttatatttttatttagagttatttgcagcataacctctttagatggtcaggtttttgcaactaatctccaattctaaaatttttgcggtaaaactccttaaactgttagcacttagccctttccatccatttttagccgttaaatgccatggtggaatgtccacgtgtacacagtgtacacgtggcacaattttattggtcc

SEQ ID NO: 324928 - DNA, 1418 bp, Cannabis indica
tttcaaataattatgttcaagaacactacatatttgtcatttggaaaacatacaaacaaatattggaactatttgtgcaagttagaaactattttcccactttctttgacataatagttcacgttgttatgcatctccctaaataagcgatactaggtggattgatgaattgcttaccggagcacataaaaagaacatgtacatagtggaattattaatcttgtaatactttatgatctagtcagcaataaataattaattgtaacaaaaatatgttaatttcaagcaagatcaacaagatattaacaaaattgagataagatgaaacttcaaggtagataggtcggatcaaagcctactgtaacacatgttgtcgattggggaaaatttttatttatttatgatttgataagtattttttggaaaaaaaaataataatcacacttatttttacttaaatataggctaatctcgagacagtggaacttctaggtattgtggacacacttcgaaagtttcaccataaagactacacttggcgcaatgaatacgtgcaacaagcttatgtaagcttacattgatatttattaatttttgaacatttctttcaatttgctttgtattaaaattaactatttcatttattttatttttgagggaaaaagtagagttggctgcaaattaactaacacccgctaaggatcaacctactcagaatgatatagatcccacccagtccccaggtgacttgcctgttatgatgcaagtactggatgagcaatctcgaaacctgagaagctttggccatctcacgatatttaaggcagttggggccaaaatagcaacttccacgtcttctgctactcgctcgcatattgttactatggaatagtaagatgccttacaaagatatgtgtaggaggtacaacaggaaactcagtattcgatacttgaagtgattccaatattagtttgaatatctctatcggattatgcttggtttcaactttcctgctatggatccactttagccatttcccactcctcttggcgctagatcgtcatcacatcgttctcagactcgaaacagacaacgatgacatttcccatttttaggatcatagatattttataattaacttttaaaattgactttttttccaaatttcttttaatattttactttagcacttttatttagttactaacttcactacaattcaaacatatttttatagtagttttattacaacaaaaatagttttttctgatatttttaaacagtcgtttaaagtatttctgtcggtttctataatcgtcgcctatacaaccgtcacaaaatggagaaaataggcaatggttaaaaactgtcgctaatgtggacttcccgacggtttagaatgtaaaaaaaaaaaaaa

SEQ ID NO: 324929 - DNA, 808 bp, Cannabis indica
cgtaccaaacgagccctaagtgtgcaattggatatccaaattaaaaaaccgatccaatattccaattagtaattggattggattggattggattttgaggtctaattgaattggatcggatgagcaaaaatacattgaattagatcgattgcccacccctagtgtatatattatcttcatataaacaatacctacacatacacagctttaattgattcattcttaaaaacataatgaaccttattatttagtcatataagtaagaacaaaaataatacttccttgtaataattagcatggtaagccctccctagtacatgtataattaacaaatatatataaagagatatggttgttatatgcatgtggaatcaagaattattataccaatttattatttttaataataatgataatactggtagctgtcactgaatataatcacaaatgatataattaatggcaattatttttttataccgataattctgttagatatatattatatatatactataattatctcacaatattctaacatatatatagctgtcctatattatttgctagaattggattaacaatatatatatatatatatatataaataattaacaataactaaacaaaatgtgtgtgtatatacgccaaattatgaaattgtatgtacgaattttgtttatttatttatttaaaaagcaaagatcactctttttattttattaagaaataagatcacataaaagtttgttttagaattagaagtttaactttaaaaaaaaaaaaaaaaagaaagaagaagaaataa

SEQ ID NO: 324930 - DNA, 1207 bp, Cannabis indica
tcattattatcaatctcttttcttttatgggttctaagtttacttaggctctttccgcgaagttggtgcatttgttttcccgaagcatcaatagaggaggctgggcagctgatgactccttggccttcattgattaagatccatatatcatgcttacaaaaatgcggataacaataatgagcagtaaggatgctttacaaagcatcaagattggtttgtcttataagaaaactaatttattatctttatggcattacggttgaatgattacttagtctatatgatgtattattataagattatgctttatgtgttgattatgttttatccgcttctcttgctaagtctttgtgactcacgggtgctatctggtgtaggtaaaggaaagggaaaacttgaccagccatgagtcagaggtctcccgacaatgttacaaccaaggaggtaacaaatacaatcgttatcagacatttgacaacagataagcagtgttattatttgcttctagctgagcaacttctctgacctccttgattgcttattcgatcttgacaaaaccgtcaagtttgtctagaaactcttaaatgatgtgtactgatttgagtttcaattctttccaaaatggactcattactgttaacagtttttattgccatgagcttggcatcttcactgactatcttcatctacgtggttgcctctaagaatcgttgttggtaatcccttagaggtttatcttcttattgcgtgacctagaccaaatagttaggctcaattggtttgtaccttgatggggagaattggtcatagaatgcttgcttgagagtcacccaagaattgatagatctcaggtaaagcttgagataccaatgatgtgattcttttgattacgaggctagaaatatttgacaatgagaatcgtctgaaatcccttgcaggtcagtttgtactttaaagttatgtatgtgagagagtgctggtcttcttttccagtgtatggtagccacactagattttgaatttagaggggatatctaaagccttgattcaattgagagaggagaaaatttctttcaatctagttggtactctgttggcttcagagtagtgacacccttagcaaaagcagcaagggtgtcaaattcggccctacatacatctgttaactcaaacttttatatctccttgttttgatgattaacaaata

SEQ ID NO: 324931 - DNA, 1183 bp, Cannabis indica
aacatagttatatgatttgggcccattccaagaatatgtatatatctctgaattgggcctttctcttataatagaatacttgtttgatttttgaaacttgagtaatacacatcttgaaaaaattcaacaagtcacatgattattttttcttttaattaaagttgtccttttaaatttgatatcagattatttatttgataatagtttcactagatttccattttttttagtttgcacagctaaaattgccacatcaatcaagttaaaactcaatacatttaacatttttctcattatgaatttatgtacaacccaattgttcaactatacatacatacgtgttgctgaaattgttccttttcagaaatttattcttaatgataacagaaaagaatatacatgaccacttaagagctgagaaaaagctttgggacatagataaagaactccaaattaataggggataagtgactttatttacaccttatattctgtccaaaattatttaactaagccaagtagtctaattatactccatctttagcttttatgattttttttttttttttttttttaaatcagcttttatgaacttggattataataaagttcatgcacatcattaaggagtgtcactgtcaagtgggccttgaaatgaaccacttttatctagctgcacatatttcttttcaaaatcaattcaacattatctttagcattattttccaaatactattttaacatatcttttagtttttttcctttttttttttatgacaaagactatgttgacatatttataatagaattgcagctaattcaacaagttgatgtttcataggaataagaaattgaccttaaagtctttgtttgtgtttaatacaacaattaacgcaaatcactgaatatctatgatctaattatatggactaaatagctatggtgtggtggcgggtattccagaataaatccatagctctattttttctttgtttttttttttttttttttttttgtttttttttagttagtaaacaaatatctactagcaatcatacatgactcctgtatctaattttagtctctattttttactgtttacaagtatgatctaagatctaaaactttagaattttactattctagttgtaatgtaatgaactacacactctttctctactat

SEQ ID NO: 324932 - DNA, 565 bp, Cannabis indica
gcatattttttcaaatttcccttctgaaattattgaaaataactctgctccctacccaaccagaataagcccgccacatgcaggtgggctccactagccccaccatatggggcccaaacactgtcaaggcccaaaactatgtcaacttgatgatgggtatgttacccaatcattcacattagtccttctttcgtctattatttgcgcgcgggtcacattttagccaaatatactttgatctagtaggtaatgattatgtgtttcaaaattacgaaatcatttcataatcatcataatatgcaattattctgagtaaatgttattacatctactgataattagttcagcttgtgacaatataaacatgtatattatatactagggcaaattacatacaaggcatgtgaattatgtttttatatgtatatataattattaataattgatattattagtactaaaaataatttttaaattataacatatgtaactataaaatttataaatatttcaaataaattatttatatagtataacttttatttatttgtaagaattttttaaa

SEQ ID NO: 324933 - DNA, 3160 bp, Cannabis indica
aaaaaaaaaacttatttttttactctaataaaggttttcttgaattatttctaattttttcagttccttcttcatgatttttttttatttactatacatataaaacaaaaaataaatcttccttttgcttagtgtagacgtaggatgaccataaaaatgtgggtgtgtacatctacataatgaaagaggtttttctatttgttaaactcaaagttggaaaaaattactagttaagagtctctcatgaaaatttatctctgttccaataaattttgaattaagtctaaatttttgtatatataagattcaactcaatcttgggagatataaatatgttcaatgctatatataaatatatactcatatatttcaaaaagtttatgaatcaatatatatacatataggttggagaaatttgtttagggtttgtttttgattatgagcatttgggtatttttttattttgtttgagtgatatttttatgggcttgtctgtgggcctagtttttttttaaaatatatttgatttcgataaatttgtagtctctattttttagttgagtgctagaaaaagttgattgtaggttatattttattgatgttatctttataaaattgaatgctagttgactgtagatgttacttgttgagaattgactgtagatgttgctattttataggagtgaaaattgatcgtaagtatttttgtgagagtgagaattgaccgtagatgtattttacttgtgcaagtaagaattgaccgtagatgttttctctatttttgctatgaaaactgactgtgggttttctcttacttgaacaaattgactatgaattatttttttactctcacttgtaaattgattgttggagtccacttatgtttttgaattgagttatatccatgcatgatagttatccatggaggttgattggtctttatcttttgttaatttatttagtttggctagagcaaaatatgtccaagtccaagtattgagttgtcgctatagtagtccttgtagaggtttgagttgaaggttttagactcttatatgtagtggggttctcatactatggaaaacatggataggtcagtagagaatagtaaaaggcctttgctagattgtttgattgaggatcttgagagtgatgagatccctgtgggagtcccatttgagcaagtaactcttgtgcaaaatcttgagtgtgagaacataaatgtgggtgaaacagtcatagtgaacggagaggccccgaagacaataggttacttgattggtccatcagatgagggtcaggacgtatgtcaagatgagtgctctggtgaacctaccgggttccttaatgtgaaccctgaatgtattttgatggatgttgatttgaaaaaatggagaattgcttaagacataccttcaaatgtggaaatgagactgcctaagtcttatgagagagccgactgggatatgggagattgagtttgtctttacaaagcagcttttgattgtggatttcagtttcctttcactcctttggtgactgagatactcagtctttacgaaatatctcctaggcaacttatgcccaacggttggaggttgctcctgagccttgagcattttactgaaaagtttggtattatagtagaccccattatttttagaaaacgttactatgctaaagaacatgaaaaagagaagggtagagtgctatttgtttgtcgcactaggaaaaaactatttgtaacttgtttgactaaggctgacaattcaaattggaagaaagcgtattgcttctttagaggtgaaggtttatttgagtcggggttgagaagagtttcccattctcttggaaaatattgagtgagtgttgaattatattctattattgtgttggctatgtatgttttattaatgtctttttggtccttggtccagatactgacttcagggttcaacctaatacgagcgagtttgttgatcaaattattgaggatattgaatctataaaggaggaggaccgtaattttaggaaatttctcccaaaaattgcatggaaaaatcacaagacgtaatagaaaaggtatttctgaacttcaatcccttgaacacattcacatccttcttctaactcgagaactatagaaggttagaattaagtttactattttgactcacatgaccgaagagtaatgcatgtttgcagacaagatgtcccaaaagaggacgatcaaaattcccaaagctagtgatgccatggctagagccaaattgacaacagttaagaagtcaaagattgaagggtccaaacaagtttctgagagtaacttcattgatgttccattgactccatcttcccttggtacgttcactacaatcaagaggaatgctgaatttcttgacccagaggttgttgatgaaacggttcttcgaatccctcacactatatcggtctattctaacccttcgtcgattgaaggatgtagatggaattctccatcccgttgatcgagcacgactgattaagctgggtccgactgggtgtttaatgcccaaaatgtgacttccactagcaatagttgtagtatagatcaggcggtcgattccacagggaggtgattatggacaaaagcattagtaggaaaataaacacaaaaggttaataaagagtgacaatagtaaccaatgagtttgagaatttttgtgttttggtaattgttgccctttattttgtccaaaatacgtagaccaacctgattgtgacacgtggattgaagaggcaagactttgagataattcgactaagtcttcttaatcaaaaggatcagcatttaacatgcctcccggagaaggcatgaatgtttcacgtactcccggagagcaaggctataacaaagcaccttcgggaggtatcaaatcctatctgaacagtcacctcgcatttaatgccgcatgggagaaggcgtattggaactgccataagtaataaagtctgatggcgtaaccccccttctgcagctattacgctatgattaatgatcctagtgacggctactttatgagaaatcacatcagtcaagaaaggataatggattacatccatctaacccctaaaaagcctagggacttagcccatgcatttcctatgatatactcgttgg

SEQ ID NO: 324934 - DNA, 706 bp, Cannabis indica
tttgctcttgaacaagcaaacgtaatcgacggaatgcactcaggttccccaaacctcatgcattccaactgatgatttgtgggaattgcataacaatcaccgctgagttgtctaaatgatcattggaatccacatttgttgtagaaactgaatgatccaaatctacttcatttgacaggaatgaagtaacatcagtattattagcacgacatcattttagagtttccctcatagactttgagtcaaattggcgcttgaaaacacgattaagatgcatattttcctggtctgaggattgaatcttcatagtagtcacaccgatagccatagcaacagcagttgtagtacaagtggtggcttctatggtaggtgaagttgagtaggggaccaagtttgttgtcacaggaacatggagctttttacaatgaagaggagttgtcattggtggttatgttgcagaaatccctacttccataccagatgtattaactttgtccttttgtagaagaagaaagtatactgctagggacatccgtgctcatgactccaggagaagggtcagctgtaatattccaacaagtctaatggtaaataatagggtttatatttatattatgagttaatcaggttgtaagtgggattattatcctaataatttatttcagcataaaatttaaattttgctataagtgagtaaataatcgta

SEQ ID NO: 324935 - DNA, 645 bp, Cannabis indica
aatttttttttacttttttacggtggagcgaaatttatttcaaaaatactatgtaggttttatactacgtactgtattcagttttcacggttgttttttaattattctactgttgttttaattattctgttttattgttttacggttgttttatagaaagatagtatttttgtaaaaaaaaatctgtatgtcagtaaaattataaaacttttgcccaaaatttagtattttttgtaaaaacttcattaatatattcaaataaaatataattatcatatggttattagtgtgacgttcacatgataaaaatacattatctattatatggtgatgcatatagcttattttgccaaaaaacttgatccaaccgtattttaaatattgtgccaaaattaatatattacaaaaattatattaaatttagcacataaatagtataatgtaaattttatatcaaaaacctaggtacctttttatgttctgaaaggcctcttcgcactcttctatccactcaaatttcttgttgcctcgcaatacattgaagaatgataaacacttattagttgacttcaaaatgaatcggttgagtgcagccatccttcccgtcaaggcttgtacttccttaggctttgttggtgatggcat

SEQ ID NO: 324936 - DNA, 1600 bp, Cannabis indica
gttgctcctccaccatctcaacactcagctggcattactcgatctccattactagctcatcgatctgctgttcaagatcgcccaccttatgaagatgtgcgaagtccctactacctaagcacggcagatcacctaggttcgacccttgacactcccgttctcatgaatcgaaatttccacccctagaaacgtgacttcaaactttccatcggtgctagaaacaaaattcaatttttgatggaacgattccaaaacctcctcgtgaagatcctctcctcaatctttggcttcgatgtaaccagatggttatgtcatggatcttgcactctgttttacccgaaattaaaagtagcataatgtatctcgaaacaactgcagagatgtggacaatattgaacaatcggttcaaccaagaaaatgggcctcgaattttcaaactcaacgaatctatgatatatcttcaccaaggagaggactcatcagtacatacttcacaaaattgactgaaatgtgggacgaaatcaatcaactccgcccaagaattctatgtacttgtgctgcaactactcaaatccaagcctacatcgatcatgatcaggttcttcaattcttaactggtttaaatgaatcttactatgttgttagagcccagattttactttatgatccttggcaacctttgaacaaggttttctccatgatttttcatcaagaacgccaaagatctattggtactcgcaccaacttacctcttgctgctgcaacaacttccacggccaatacttctacaccaagcaccaattctgaccctactacaaatcttgcttcaaaaaataaaaagatgcgtcccatgtgcatacactaccataaatctgggcatttaaaagataagtattactttctacaggggtttcccccaggctatggtaaaaggcgatcccaagactcttcaacaaaaaaatctgacaccaacaagagtctctctcaggcttctcaagtctctggctcctctactgagataaacccatcacaactcaccagtgatcaatgccaataattgatatcaatactggcacaacagattcaatccactcccacaacttcgaacaacacccctgctttaaccaacttctctggtaacaaattggattttccctataatttttggattatcgacaatggggcaacccaccatgactgttttgatcatagatgctttagttcttttcaatcaaaacaacatgctacttgtgtcacattgcctgatggcacttctgttcaaatagcaaaaattggtattgttattattaatccagaaatcacactaactaatgtactttatgtgcttcaatttcgtttcaatttgttatcagtaagttccttgttatatcattgttccagcaaaatggttttcacaactaacaattgtttcattcaggggtcttctcaaacattgaggattgggactgctaagaagtttagcaaactttactacatccaacaagagacagctaccaccaatcagtttctttgtaatgtctcttgtaataaaaaccaatggcattcatgccttggtcatccttcggtattgattactaat

SEQ ID NO: 324937 - DNA, 754 bp, Cannabis indica
aattaagaattgacagcccaacattttttcctgatctcaccagctgtgccagtgaggacctcaatggctcccattctcttcatggactgagaaaattcagtgaaaaaatcactttcttcaaccaactctgagacggttttacgggcgattttgttggtaagaagtgtggcgtctgaggtgaaaagacctttgttgttcaatacaacgttgtagtaactggtgtcgaatttgagagcactgcctgggtccatttgcacagttgttttttggtcatttggagggcatttggtctttaacattttagcatagtctttgtccaatgaagggtcttgatctccctttccagtgaaattgtatagcctgttgttgaatccagtgcaatgtcccactccaattgtgtgtcctcctataatattataaataaatacatataatgaacttgatgcaagttttgctaataatttcttcttctttgcatgcttggtgttatcaagtggttttcataaatatattttgcaaaagtaattatgtaagctagctaataaatcatggtaaaaattaagggagcaatgcatgtaatacaattaaatatagagcattgctattaagtattagtggtgtccaggggcggagccacatgcaccccaacaggggctgtggccccccagaaatttttaaaaatttatactaagacataattatatatataaatacaccattttttataatatatataattttattatatatgaat

SEQ ID NO: 324938 - DNA, 1108 bp, Cannabis indica
agggcttacaaaatatcttaatttaaataggtaaatatatcccttcaacattgggatattaacatctttttttatttatatataaattacaaaaaagaataattgaatccctagaatataggactaatatcttgaggaaaaattcctatcttcatgggttattggacctaacccacaatagtaggtcacttaagaatcttctagaaggcttgttgtggccccgcgacttgttcagcctgttaggagctgtctgaacattctggccggccaaccctatctttggggcctgtttgacatgtctgtacaaccctgtccttaggggttgtccaacatatctatacaaccctatctttgggggttgtccgtatagcctgtacagctttgatgttcagcttctttgtacaactttgttgtacaggttcttcgtacagctttgttgtgtagcttggtcggccagccttgatgaagattgcccagtgtatggaagttggcactcttgaccgaccagctataggtcaagtcatggctttgctgacagatatgtggatttgtctttgcttgtgtccaccgtgcagccatgggatcttgcagtttgaaggctgcacacactaacctggctggttaaaggctgcacgcactaacctgacatgtttagggctgcacgcactaacttggcaagttagtgatgagctattctctacgtgtcttttacttttgactatgtgggcataccacgtcagacagacaaaattcgtgataacagatttcaaactgtacttgttatgtgtggtgtggtgcggaagtttgtgcggtgtgtgtggtttgatgaacactcctaatatcaagcatctcaagaatataaagattctgaaaatacttcaagtctataaagcaaatattttgatattgtttaagaaaaaaatcctcagtgatcaatttgattatcaaattattattttactcaatgtttaatttcatttaattctttttatttctttttaattcattttagttttataatttaatgttatgttatttttattttatttgatattagtatttttgttatttttattttgtatttttaaatgtgatattattttaattt

SEQ ID NO: 324939 - DNA, 1049 bp, Cannabis indica
aaaatatatttagttttatcatactatacatctagatcgaattgttattaaattttatttaataataaatcagcttaagtattattttatgttattttaaaaaatacaaaatttaattaattcattatataacaaaataaaaaattgaattaataacttttttaaaacataatttaataaaaaaaattaaaaacataaattctaaaataatatttacttctaatttaaacagtgactatgactttattaacgtgtttatcttcgtctatactatattgtatgttagtttattggcctttgttgttgctcgcttaccttctggaatagtattttttcaatttgcgatatgactatatttggacattgaaaaattattcctgtatgcttcgatcgtggtggatacaatctggagagcacgcaatgataaggtacataagaatgttctgggtagcattatctattatattgattctatctattcttgttacgcaaattatagttcttgtttacttacctctttgaaggttgataggtcttctgtttggccgccacctcctgatgactggatcaagatcaattgtgatgtcaaagttagttgctactctatgtgtgctatggccattgctaggataaggagtctatatttgtgggtggctacaaacttgctcaacttctctgatcctttcattggagaagttgcggcttgtttgctagccatggagactgttgtttcgcagcatcatcgatttgttttggcggagagtgattcggagacggttatcaagactctgacgggcaccggtaccttttggagaattgacaactatgcgcgtcatcgtaaacgactctctacttttttgttaagttgtaattttttgtttatttttagaacttgtaatattttggctcataatgtgattacgtgggcttatgctaagttaattttcggtatggtaaatctttcttcaataccaattattattatttgtaatgactatgagatttaacttttttttttttctatttgtaaaatgttatttttttttttt

SEQ ID NO: 324940 - DNA, 939 bp, Cannabis indica
tgtaggcgtaggaaatgaaatagagtgttaatttggtgagcaacgcaggcggagtgggagtgggagtgggagtgggagactccatttttgaaggctcaaatcaaatctacactagtcagtttggagatgagagtgtaaacttcagttagcagcagcagctttcttatacaaatggcttttattcttagaaaaattcaacaggtatttctctctcacttctttttgttatggattggaaattgatgcaattcttcaacatttcaattttagctcactcttatatcttttcgtttaattcgtacccatttgagtgctggagctcaaaatacagaaaagaggaagattatatgaccttaatcactaatctcgctgattcttccattcattttttttccaacataaatgcttagcttacgtccttatgtgaacgaaatctgtaaaggcatcattgctggccttgccctgaaacaatatcagttttttaattttttgtgtgtatataaatgtgtgtatatttatctacattatatcttttcaggttgtaaaaagtcttggaaaaaatagaaaatttgctaaggatccaaggaaattgcaatatgaggtagacatgaaccgcctgttcttatataccaggttagttcactcggtacaactttccaatgtatcaattgtggagattgaagatgagcaggccttaaaggcctacaaacttagtggttaagttctcaatgtttgatatgtcaatatatcagtgtgtagttcattcatagcattaccataattgagtggccaaactatttgacaaagtttctttttcatgttgttgtaaccatgtatatatcaaccacttgaggctagctcaagtggccataggtgggtgtgtgtgttggaggtcctggattcgagtcccaagtaaaacatgattgtaatatataaacg

SEQ ID NO: 324941 - DNA, 514 bp, Cannabis indica
aaaaaaagatagaacatgccttggattgtggtctagttatattatgtatttgtattagtctaagttaccaaaaattatttatatttttatgatattggacataaggaatgatgattccgtaccaatagtgctaaataatcataagctattttaggaaatttcgtgcttaaatatttttataaaagatctgttgaaattactactttattcttgataaaaaaaaaattactactttattcatacaccaagaacctacaatcatttctttaaaaaagaaaaaacaaccaatcattaaattctcaagatcgttgatgactttttattaactgtaatttttatttatatacaaataaatttattatattaaaaaaaaagggtgattctacaatgcaccccgataaaatagatgtattgatgcaccctctacttgtatgggcatctaaaaaaaaaattagtctaatttttttcatattcatgtacgttatagctatttaagatatcatacaaaatatat

SEQ ID NO: 324942 - DNA, 1465 bp, Cannabis indica
tgcctaatcaggaaagtcgatgccagagcctggtatccatacattgcattgcctaatcagggaagcctatgtttctcagtcatcgtctaataaaacaatcataactataatctttttaatggtaatcaccatttcattacctcaatcataattgagtcgtaacgataataatcatacattaacatgttatgtggtacatgtatacttttcttacctcaagtttaagttcaggtatattggctcacctacttggagaacgattgacgatctcaggccttatgtcataacaacataataacggtcaaccaagcaatctcaccttataggtcactagggtatccttacttcaatttccaagaaaataggtcactaggtcactaggatatccttacttcaatttccaaggatcccctataggtcactagggtatccttacttcaatttccaagaaaatatttaaaaaaaaaattcaaaaataccaacaaaaatggcgtgccattttttgtaagtttcttgacaaaaaatggccttgacagaaaacgactagctgttttctcaaaaatggcagacctttttctgcaggaacataaatccccagttttgcactcttcaaacaccactgaaacttatccaaatcaatctaaactttacaaggcaaaaatataccatatatacaacaatccttacgtaacagaaattaaaattgagcccttaaacagaaaattccattaaagctcggactttgagctttaaaagctcaaactcgatttctaactcaaaactacatcaaattcaatatataaacatcaaaactagtcccatgactacccaaaaatagtttcatgaagtcaaaatccccataactactctaaaccacaaggtcaacatataaaactaatcatttcaacttaaaacgaaaccaatccttaccttaagctttccctcttcaatgaattactatcgcgttactactagggcttgaatcactaggtattggatggaaaaaataataaaaaaaaatagattaaaggggaaaaatttcattgcaccgagtagaggaggatttcgttcgtactgtttatgtgtttttttttttgtaaaacataatatatataaacttaaactgataagttttggttgggttttgtgcccaaaataaaattcatttcaatataatcatatttactaatcaataaaagattagaaaccagatgcttctggaagattgataaaatggtcgattgaactggggcagttcgacataacatatcatcctcgaaattccatcaagggtcaagctttggctgacttcttgatagaaggtataactccagaagaaattccacatgttcagcgagacacgaaaacctcaaagttgtacgtggatggtgcatcaaacgaacaaggttcaggtgcaggggtaacattaattgttgggttttgtgccctaaataaaacccattac

SEQ ID NO: 324943 - DNA, 1477 bp, Cannabis indica
ttttgctgatttggtatttgacttattagggactgtgttttatatgtttttattttttaacaaaggacttttattaggttatagaaatttcacttattctacaaaagttgtaataataatagtaattctaatcctatttaatcttttgaacttttcttttagcaccaatcaacactatagtatttgccaattcatttttaacctttgctttgaatgatagctgattgtaattcaaatagatttttcatacagcaagaaccagagcaagactaattccatttggctttcactaagtttttttttcattcaaaagttagtcattttattctgcataatatgttacttacttttgcattgattatgagacactcattgaatttgcaagccttttcttataattttttctttcttttattttcagtataagattaagattatgtatagtgagtattttgatgattgcccttttactgttttagtcttcgaaattgttttttgagctatattgttttgacaaatgcacttcttttgagattgtttgtagttttgacaaatgaacttcttttgagctatattatatgattgtacgtgcaatcttaatttaactaaatcatgcatcaaattattaaaatctttctcaaagtagtatttctgtgtggttgtatgttgtgtgtctatataatttaactaaatctttgtttagttcaactataatagtttcaatatatttgaaaaattgaggttgaaatttttgaattactatcctattctctactcgaactcttctcgatacacttagtcatactgctttttatttgctgcactcttccacaccttactaattgtagggtctaattaaatacacaacttaatgatattttaagaatttatatatggtttactttattactctcaaatccacatatgcaagaccaaaggtatataactaatgtatagtataatcgttttgtgggttggtcaaagaaacttgaagttcaacaagagccacgaatcgtaaaaaataaaagatgatcttataaagattggagtatggaagaaaaagaaaagagaaacaagcctagaagtgaactgtctgaaataaaaaaagcaaggatggctgagaaaagagatggaaataaaacaactacatgtgaaagatatgttagaaaccatggaattgttattggagaaacaactcgttcaacatgccgagtacaaggtactactaataatggtatgtgtatgctataactaatttaaagtccactaaatatttccatgttaattagttatttttatatacaagttaatatatattattttgatttctttttgtcttttcaggaagactcaactatctaaatttagggcttatttggtactcataattggactggattggattgaaaatgattggactcaggggcggagccagcatgaaaaattaggggggggccaaactatattgtaaatttaa

SEQ ID NO: 324944 - DNA, 915 bp, Cannabis indica
ttttttttttaatttaaaaataactgaattttcaatgtaggtggtggatatttttgaagcctaaagtaactgtcataaacttaggcccactataaaccaatgagtattatttgttttgagttgggcccataaattttctagagtccagaatatccacggctcttattatttaaaattatttttaatggaaattctcattgcttgtgaaaaccctgcaatatatattttttttaattatacgaaattctaaattttatgggtttgcatattttttttgggtgtttttatttttttttaaggataatgtactcttatggtaactagagatgtaaccaatgataataaacgggtaatcaagtacattatgctatttttttcttcatatttttataatttttttctaaatttttccataaaataatttttttttgaataaaaagtcatattttacaaacttatactttaaaaatatataaagggtaaatactattttgaacttgtgttttgcaaagagttaccaattagaccctctattttattaaatgacaaaatagactttgtattttctaaaattgtacaaataggactctgaacggattttttgtcaaaataaaacttaataataatatgctctagagatgttatgataaaactggttgtattttctgtatttgttcgtgttggaaattgtcttaaagttggttggttatattaaaaaaaactaaaattgttaaaaattaaagtttagggtcctatttttactattttagaaatataataatgtccattttgtcatttaacaatacagagggtctaatgggtaatttttacaaaacacgaagtccaaaatgctatgaaggatacttgatgacatggataaattttttagatattttttatttaatactttaccat

SEQ ID NO: 324945 - DNA, 1336 bp, Cannabis indica
ttgggaaccaagacccacctttgttaagttttttggcccatgaccaacatacacatcattctccatcataatacactcatcctctgcgacctcattattttcaccattattcccatcttccacgggcctccttttggaatctaagataattttggaaatatcttctccatcctcctcagcattaactttgtcaacttgttgcacgggactccctttccctattcgtggaccaggtacaacaccagtttgaatatccacattctttccttttacaccacttgccattaactatggaatcaatctccataattttagccactgaaccagccatcccctttgtcgccactcgtccatctgcactcttctccaccgtcgatggctgctcagtaccagaacgcagccactgtgtaccgatctggtagtgtcgtcttctcagttgtgccttcattccaatgccataaggtttaacaatttgatcaatatcttgatcgaatcgtttagcacaaaacctttcagaatggcctatgatgccacaaataaaacagaatgttgggagatgttcatattgaaacatagcccaaatccattcaccattttccttatacaacttcattcggtgctttaaaggttttacgatatcaaccgtcgtacgaaccctcaagtaatccctccaaacaccaacaaagttcttaggatccgagttaacataagttccaatataactacccgcactacgcaccactttatccatcatgaactcagttttgagattatgaatctgcacccacatgtcgagtttgtgcaaatgaaccattcttggattctcaccactcttcaatcggtggaatattagaggaaccttattaaaggtccaaggacttccatcaattaccatctgtatatcaatttcatgataaaattaaaaaggtaaagatttgcttccaactcttttacatacacacctttaccgggctgccatagagatgccataagatgtctcattgcatcgaaatcaatagatcttcctgtaagaaacttccctacaagacaccacctatcgtcaaaaatctgttcatcaccctcagtctccccttcgatcagaacacctcttcttcatcatcaatctgaaaattctcatattgttcagcaaggtcacccatcacgtgactgctagaggccatagcaaccgtagacaaaaccacaactagcagtaaatcaccccaacaaccttaaaccgtagcagtaacaacacaccacacacaatcaaatcctgggaactaagacaagaaggacactcaccacctcatacgtacaacacactcaaaagagagagact

SEQ ID NO: 324946 - DNA, 1631 bp, Cannabis indica
tgtaattttctctaatttcgtccgtacaaaccctgttattttctttaacaggccacatataaagtctagattcttgatcattgggtctagacagaaacatcttgtattagttacttccaaatgttcctttaataaatttaaaacggagtctgtactgacaaaactgaagaaaatttataattttacaaatattggtacttatgatgctaaaaataaacattgagattatgccgctgacaaacttaaaattttaaatacttacgcagctatttaccttaaaaaaaaatacataatgtaattatttatccataaaaaccaaattcattggtcattatcataactcgccaaactattttggcagtaactgaagaacactctagaaatatttctaaaatcaaattaaattattaaaacataaagaaaaaaaaaaatctaattactccataaatttatttttccttaattaaatttttgaataataaaataaagcttacgtatcaaataataattttatatactaattacttgtaagtaactccaagtccaaccaaaacaatataaatagtctcaaaatctgtaaaaaataaataaattaaattaaataaaaattcagtggccatggataacggcaacgaagaccatagccgattagaggctctgaagaaattcgacgagtcaaaagccggagtcaaaggcttagtcgacgccggcctcacctcaattccaagcttcttcgttcactcatcggaaactttatcagacctgaaaaagcccactcaaaaccacacccaaacacaatccatacccacaatcgacttatccggcttcgattccgatcggcgcagcgccatagtcgagcaagtgggccgttcagcaagagagtacggcttctttcagataatcaaccacgggatctcatcagagattctggaccgtacgatcaaggtagtgaaagagtttcacgaacagcctttagaagctaaagaaaagtattatggtagaggaggtgggaccgggtttagttacatgtcaaatgttgacttgtaccaatcaaaagctgccagctggcgtgacacgatgactgtgagacttgacgctgtgacgttagacactgttccggagatttgtaaggaagcggtggcggtgtgggaccgggaaattgttaagttgggtgagattgttttggaacttgttggggaagggttgggattgtgtgtgggaaggttcagggaattgagttgtttgggatcgaggactatggtgggacattactacccgtactgcccgcaacctgatctaacggtgggacttggttctcatgctgacccgggattgctgacgttgcttttgcaagatcatatgggtgggttgcaaattaagtctggtgatgtgtggattgatgttaagcctcttcgtggagctattgtggtcaacgtaggagatttgcttcaggtatataaataaataaataaataaatattattttatttatttttaattaattttaaaaaggtaaatatcattttggacctgtgttttgtaaaagttacagattggaccctgtgttttgttaaatgacaaaatagaccctgtattttctaaaatagtaaaaataggaccctgagcttaat

SEQ ID NO: 324947 - DNA, 918 bp, Cannabis indica
tgggaaaatcaaggttcttaacttcccccctatgttcttcaataaacaactttcatcatcttcctattaatgttctaattgctagcctagggttcttaattattcacaaggtttttctaaatcacaagtgaatcgaaccaatagattaattctaatattcctatcttgaatttaaatctatcaatagcattaattctcaagtctaatttgattacctaggatgataaagttaaagtatattcctatcccaaacacaagatgttaatgctaattagttatattgatgagatctaatttagttattctttctcaagttccattcaaattactaattaaatttctaaaattaattactctttgaaaagcattaagcacaaattaatataaataattaatatgaatatcaatatgaagaattaggaagattacttatttataaacttagagttccattaaaattctagaaaaataaattagttcaccatcataaaacaaaatctcaaacaataataataatccatggtatgcatgatattcacaagacaaagatgaaataaaaaaatgagaaaagataaaactattatgatgctctatcttctatcttcaaattccaagcttgaatggtgattttctctccaagaatgtgtttcttgtgttttgacttgatctcttatgaaaccttaatagaaaataatgaattcccctgtattatttggccttaaaattgacttatatatgtcccaaaacgtaactcttcgagtccaagaaaaatactccgagttgaaggctttaaaatataaattttttgcttcttataggtctcccgccaaggccttagcagtccttgccgagcccacgaccgtctgtgttaggttatttttagtattaattttagattaagtttagtatatttttaat

SEQ ID NO: 324948 - DNA, 618 bp, Cannabis indica
aaaaaaaaaaaaagactttctatgtataaactcccatcccaagtgtcgataacatcaaacaagagataataacaaatacattttccatatgaattattattgtttttagaaagaaaacaaaagaaatatatcaaagcaattttaattttgtcggcaggcaaaacaatattattattataattattattattatctttatgaaaaacagagttttagtttttgagaaggaaaaacattataaattcttatggggttcattgatttaaaaaataaaaaataaataaaactaaaagtttcaaaatcagaaatgagcctaaaatgttttgtgacttaaagttcttgattatatattctaaatttaaatttagaaattttatcactcttattaaattagagtaatttgcggcataaatacttaagttttatgctgagtaacagataaatacttaagtcctatttttggcggtaaaaataccttccgtcactactctagaacttccgtaggtacctctccgttaggttacatataagtgtccacatgtcatcttcacattagtccacatcatttaattattatttttattatttaaaattcattaccatatttgaaaatcattt

SEQ ID NO: 324949 - DNA, 2275 bp, Cannabis indica
ttaaactaagtggtctttacagaagaggaggccgaagcaaagggagaagaagaagatcatccaagtctcctactatgtaggtggcttggtttttaactatattttttcattatttaggaaaatagccatatggccgagacaatggtttgtcccttgtggaacttttttgtaaagacaaatttgcattgttggacggccaactttgcttttattttttcttttatttattgcctcgcatttttatatttaaacttaatatatttgtttgtttggatttttattcacaacttaaacaattatactttgatcaaatttaaaatactttaggtgagcatttccactgatcttattttccttttgatattgcttaagtagttaataatctactatgtacgcgaccagttatcgtttgccatgctctttattcgcgagcagtttatcagttctacatagcgtaaagttaaaatctgatttaagcaaacttaagcatactttgaataattcaccttgtgaattactttgtatatttttgattgcctgtatgaatagttaagccttcttttcacaccttaggttaagtatttttttaaggcatcttagtacctcatttaatacattcctatcaaatgtgagctgttagatattcagcttcgcatgtagcatagtgttatttttatgagctaattctcatttacaactgctactttgattttttttttctagtgataaaggttcactttatgacaattgtccatagacaatcttaatcaattattttggaattttttttaaagtggagtaggtttgcaatatatcatgtatttctagataaattccagttaatcatacacatatatatacccctcaagtaattttaaagaacaaactttgtaattacttgaataatacttcaactttattaataataattgaattttaaaaattacatcaaaaagagattacaacatttttgtgagtttactggtagtagggtcgcaaatgctcaacatttcagtagttctttcttagcgagctgttaagccgagctaatttataaaccccaattcctacttttccatgattacataaggacctttcaagtttggattaaatactcctctagatgcatcttttgtgtttgcaaatactcgtcttagtaccaaatcacttacattgaaaagccttttcttcactttcttattgaaatatctcgtaactcggtgttgatatgttgcattggtaatttaaaactcagtacgtttttcttcaagtagatccaaggacaatctcaaatttcttggttttcttcttgattatagaaatctcgtttatgggttgcaatattaactggcaacattgccttcgagccaaatgccagcaagaatggagtatgccttgttgtttttttttcagtcattctgtgagaccaaagcacttgtggtagttcatctacccatctaccttttgcagcgtctaacttctttttgatattatccttcaaggttttattaacagcttctacttgcccatttgcttgaggccttgagactgacgagaagctcttaataattttgttcttttcacaaaactcagtgaataactcaccatcgaactgaattccattatcatatactattttaatgggtattccaaacctacaaattatgttcttaacaacaaagtcgagaactttcttgtagattatggaaactagaggttcagcctctgtccactttgtaaagaagtcgagagccactactgcgtactttgctcctcctcgccctatggggagttccctaatcaaatggatcccccatatcgtaaacgggtacggtgaggtcatcattcttagctctactggtggtacccaaggtaaatgtgaaaatctttaacacttatcgcattttttgacaaaattcgtgtgtatctttatttatagttggccaataatatccttgtcaaattcttttgttggataagctttgccaacctgcatggtctccacaaaagccttcgtggatctctttgattatctcgcttgcttttgtggggagaacgcaccgtaggagaggcatggaatagccccttcgatacaattttccttctactatcgtgtagcgaggtactaaatacaaaagttttcgtgcctcatttttgtctttagaaagttgcccgttaagaagatagttgactatgggtgtcatccaagtaggagagctgtcaatcatctcaacttcttccttttcacatatactcggttcgtttaatacttcca

SEQ ID NO: 324950 - DNA, 698 bp, Cannabis indica
accattgaaaacaaaaatctttgatatgacaccctttttcatgacatcagtctttatgtcaatcaaggattggggtctaggaggaaacaaagtcgccgagacaaactcaggttgaagcgattttggtaacatggtggtggttccatctcgagccatcatcgcccaagttttgataaacctcatccatgataaagcgtcggcaatcttatcagaaaagttgataccaactacgattcctccacactcgaacatgttaagttgaaccccgaatagaatttgatgagcatcatcactttcatcgtgacgagacatgaaagggcaaaagatgccgagttcttgagctattggattggacaaaacttgggaaagtcgcccattcacttgagctttcacaaagggaacgccctcgtcgttgcaatggatgagttgtgcatgcttatcgagtcgtccagctaaagggtagtaatgtgttaagatggctgataaggacctttttagaatgttggctggatcaatattggttgtactacttttcattttgtaataaaacaccaatgggtcatagaatatgggagatgattggtcaagtaatgaaagtttgtaatgctcaagatttttaggagttggataagatggcttgataatctcaacagagattgcttcaacttcaatattcatctttattttaagaatggttt

SEQ ID NO: 324951 - DNA, 1395 bp, Cannabis indica
ttctcactactttccttgcaaaataattttgatgtcttacctggcattaggggtattcacggtgcgagtggtgcatattgtaatattttttcaaacaaaattgcatatgcagttttcgcaatttctcaaatcgcaactgcagtgcgagatcttaaatttataaaaaccacactacgaaaattcaatgtgatatagtgcgttttgagagatttacactatcattattatcaaacataataattaaaattttaaaatcaatctaataaaaaattttaacaatatataaataatcttattaaaattttaatatcataacatatatactaatcattaagttattatattaaattgtttttaaaataataatgtaatgtacacatatatttgccatcatatgaaaaaataaaataaaaatcgtattgtacaaattggtaactttataatatttagtgtggtgcggtttaaaccgtaattattaaatttaaaaccacaacccgcgtcgcaccgtgcagtttgacaaaaatacaaaccataattgcactgcaaaggatttcaaaccaaattttttatgcggcatgtgcggtacaggcagtttgtgctgtgtagacggtttgatgaacacccctacctgtcatactaatgtctttgtctttgtttaataaaacaaccctgataatcaaaaattgatattcaaatgttattgtcgttgtcaaatcaaacaacctgaatatcattccctagctttcatgtatcccattgcctaataaggcaagtctgatgccctatctagcatccatatatcacattatctaataaggcaagttgatactttaacctggcatctatgtatgtcattgccgctacctaatcaggatcaccagcaagtaagaaacctaacaatgctttcagtttagagtcatgacttttcccggttatcccatgtggatcaacccaaataacacccctttctatggagataaccggcaaatagggaacctaacaacgattccaatttatagtcattacttttccgggttgtcccatatggatcaacccaaatacctcccctattattcatgtcactgtcgttatctatggagataacagacaagtacgaaacctaacaatggttctagtttacagtcaagacttttctctcatagaggtcatattcactttttgactttcataatagtaatgatcaccatcttgcttttataacggtaatgaccctaaccttgcttccaaaacggtaatgatcgtcaccttattctcataatggtaatgactgtcaccttgttctcataacggtaatggctgtaaccttattctcataacaataatgattgtcaccttgttctaataacagtaatgaccgtcaccttgttctcataa

SEQ ID NO: 324952 - DNA, 1716 bp, Cannabis indica
aaagtgttatccaacatatgatctaaatgaaacgcgggaattaatcacctttcattaacgattataatttgaatttgaatgtaaataactgccaacctatattcctacaaatagcagcagattccacaaaaaaggggacggagaattggagagagaaaatagatacgatcaattgtatatcttgtattcaaaaaatatcttaaataaaatagactcgcggaatatgcagatttaactgcaaaactacgtaaaactatttagtgttatttatgcctcatttatttcttattattctgtgtttaaatttgttacaaacaggtttattattggttagcgaaaaatctacgttaacaataataaatcttcatttttatgtttttatatattttattttaatttttgaaaaatgtatttttattggttcagttctatgttataggtagtatcctcaatagacaaacatggcttggtatggaggccaccaaatatttggggaagattaatatatattaatagattaataaaatatatgagagaacatcgtatatcgtatatcatgagtatatgatattattgagtgtgatgtatagaaaatctcatttacatatgtatataattgtaaatatgctatatttttttttattgaatgttaatttatttattaaaaacataatattgtatttgaaatttactttaataaattattattgagtatactactatacgaaattaataaaattatgatgcaatctcttagtttatttgtaccattttattattcaacatattttcatacatttttctttaaaaaaagtgcatgatgtcaaataattcgttgcaaaaatagacttaataaaattgctattactataactttttttcattaaatgttttaaatgatttattagtaatatagtaaatacaatttaatggtgtaaatgatgtaaagtatgatgataatagaaaaatagtggatactcgaaaattgatgaaagtagtgatcataatggtggcaaccacaggtatatatattaaaatatttagaaattgtgacaatgtaatctttattttattatttttagtaaatgagagtgatataattaactactatgaatatcaatcaatatccaatatatataaaaaagataaaaagatagccatatgagctatcttcaatcaattttctattcctatttctatttattaatattttattattatcataacttttaattaattgtacctatgcttataaagttaataaaaaaaaattaaaaatacaaaagacatatatactattaaattgcactttatatgagttatcttctaattttctttcttttctctattttttgatttatttaatatttttattaatttatcataactattaattaattgtgtctatatttataagtcaataaaaaaaaatcaaaatacatatatactattaaattatataataaattaagccttcgattgaaaaaattaataataatacgtaacttataatgtaattactaattctgtatatttatatatttgagattattcattgtcctaaaatttttcatatatttaacatactaacatgttgggaatattttatcaggatctagatttactaacaagtatattgaattaacatcctaaatatgaattttctaaaacaatgaaataaacacataagggtttaattaagaaaaccttacattg

SEQ ID NO: 324953 - DNA, 808 bp, Cannabis indica
ttttttagttaaatatcaactgtttattttatatttggtattgtccgaattcctccgacaacaagggttatgtttagtttagggttagtattttttatacaaaatatatattgaaaaaaattatgagagatacaattgtcagcttttttagtgtttaaattaattattatattttgtaatttttttaataattatttttttttcaattgatatctcacttttttttagagagaattcaattgatatctattactaagtttaataaataggaaatagaatatattattatcatagacacgtatatatatatttgtttttaataactataataataataaatttatgtatatatattataaattggagaaaatagaaattaatatttataaacttaataaaaaattaaaaaaattgagagaattaaagagagaataaataatataaattagaaagatattagagtgccacatcaccgtctcgtatctctcttttatatacataaactaggaaacaactcgcgcttcgcgcttcatattctgcccttctcccgaccgttagattttcttatctttggctttcttgtcactggactttgtgtataaaaggacggctcaagcttgtcatctttcacaaacctggctttttttggagaaatcccttatgagttcagaagttcactctcccaaactcataataccagaatgcattaaccattttccattcattcccaagaactttaagcctcatttggaacccgaaacaatggattccaagactgaggagcttccgaccaatccaaaccagggga

SEQ ID NO: 324954 - DNA, 1976 bp, Cannabis indica
tatcattaaataaaatataaccacacacgaaacgtaggttgtttccttgttgaaacataaagatgtttcgccacaaattactctaaaattccactttgatcgactaagatcaacattggtaaggtttataagttatatcaaccaaaacaaacagtaatcaaaataaaagaattaatacttacattcaacattaacataaagaattgacatcataataaatgaatttagaacttaagtgctatttgtcaagagaagaagagttagttggtttatacaactaacttcctgttgttctgttattggtttcaaccaattctgttatggttgttatattgcctctgttagttataagtctttctttctcttgtatataaactaagtgattggcttttcaatacaacacatagaatacatttctttctttccttttctctattgtttacatggtatcagagctaattctttctctctttccttttctggtttttgctttcgtctgtcgtcttcaagctcgagccttcgttcatggctgtcaatggaggttcgtctcagacttctggttccaatcttcctagatccgcacctgttactttctctcattctctctctgttcgattggatgagcacaattatctcccctggcgccatcaagtgtttgctgccattaaaggtagcagacttcagcatcatctcgatcaaacaagtgctcctccaaaattcctcaccaatgaggatcggatcctcaatcgacattcccctgagtatgaaatctgggatcagcaagatagtatccttgtttcttggttgctttcatcgatgtcagagaaaacactcactcgcatggttggatgtgactcagctgcacaaatttgggagactctcagcacctactacacggctttgaacagagcaaatgttggtaaatagaaaactcaacttagaaattccaaaatgaagggctcactcaatgatttcttgctaaaaatcaagagcactgttgatcttcttgcctctattggacatccaatgtctgctcaagatcacatagaagcgatctttaatggtctttctagtgagtataacgtgtttgttacctctgtcaacactagattggaaaactatacagttgcagaaattgaggcattactcatggctcaagaagttagattggataaagattcagaggatcttgatatcaataaaccagaagccaatttggctcacacaaaaccttttacaggtggtagaggtacattctcatctccttattatccttcctctaactcttcatctcaatctggtgtgttcaggggtgcatcgggctcttactcggccaatcatcctccacctggttttggttcactcgaggaaccatggctggccgtggacagatgcattccaacagggctggacaaatgcaaggccgtggccaatacactgcatggggtcagaaaatgcaatgtcaattatgtggcaagttaggccatactgtacacaagtgtttttacaggtttgataagtcattcacgggtccagaaactttccaaggattcccgggtagtgccaatcttgctgaatgttctcatctctatgcctctcctgaagtggttcaatatagttggtatcctgattctggagccactcatcaccttcctcctaatgcccacaacttgatgtattctactgaatatgcgggagaccaacaaattcacatgggtgatggatctggtctcaacatccacaacattggtaaaacctttatcctttctccttttcattcacaccaacttgtcctaaataatcttttacatgtgcctcacataaccaagaatcttcttagtgtgtctcaatttgccaaagataacaatgtttatttctattgtttacactattgtcaataaattattactgcagatatccccaaacattaagaaagaataaatggtagtttttgttataaatattaataattatgt

SEQ ID NO: 324955 - DNA, 1477 bp, Cannabis indica
gtggggcccaatatcaatccatgccctgccactctatggaaatttaccattttttttcattattttaatgccaaataaatctaacctaacccgaagtggtttcctataaataggtagtgatggctaaaggaaaagatgatgcatctcattccttcagtaaaatttttgagcctcctctcctatacaaaaccgaaaccctatctctatcttcctctcttcaaaaccgaagcctcatggtgaaaagagtgagtgcccacacacatcaagtgttactcaatcatagtgtgtaaggctgtgaagaatctagtttcaagagaaggagattcagactcaaatcttggtgataccctgctacagaaatgatacaagggttagagatctgagtggaaggagacattatattccgctgcaaccactgtaaggttccagatactttatatgtgtttatttcatatcgttttaaaagttcatatttaggatgttaataacatacttgttagtaaatctagatcctagtaaaataactccaatagttatatgcacagaggtgtaatgtatgaattgtaattattattttattcatactattttattattctgtcttgttgggtcatggctcacgggtgctctattgtgcaggcaagggtaaagtagtgtcaggtcagctacgagttagagggttttgaagatgaatgttccgaccaagctagaccacgagggttgggtccaataggaaattgtatagaaattttattttaccgcttaggtcgccctgtaagaaataacttgaaatattttgaaaataaattttacgggatctcggacatgtaattttaaatatagtggtttaaagtaaagtatatttttattacaagttattaagtttattatttatttaaaattacttggtttatggaccccgattaatgggattagtatattgtaaacacgacacgtggcgtttttcttagtaggacgttacaccgtgttagggcttaggtctggattcggggttggggctaggtccggggttcggggtctaggtgcaggttttggggtgggtttgggggcaggtctggggatggggttcgggttcgggtctgagtttggggtcgtgtctaggttcggggtcggtccgcgtctgaggtcgggtttgggctcggttcttgggccggggtctgggtatgaggccgtcttcgagtttggttctggggtcgaggtcctagtccgaggccagggttcctattcgagtctgtgttcggctttgggttagggtccaagtctgattctgagtcccatggtccggggttggcactacaacaaatatagttattaccggcgggtttattgccggcggaactcacccgccggtattaataggggtattaccggcggaaatagccatccgccggtaataactatataattaatattatattaaataaataaaaaaaattattttaaatttattattacc

SEQ ID NO: 324956 - DNA, 645 bp, Cannabis indica
tgttttattggtgtttataaaagcataatatttttgaaaaaaattccatgtgacagtatttttgtaagagttaacccaaattccagtatttttgtaaatttccttatatttttgcattcaaaagcttagcccagcccatatgataaagataagttggctcaccattcatgtccttttttttttggctaataaaggacatggctctccattgataaaaaaataacacatggttgtccaagtatatatgtcgttttttgataatttagttattaaatattattaatttattatgcaattaaaatagcttttttgtattaattttgtggcattaattgttattttccttttagaaattttttatttacagttgttcttttttgtttaggaaatttgtcatacaaaagacgaaattttctttatagaaagttgcgtatttttaaaaaacttgactttttctttctttaaatattactttcggttttgttatgtatttatcaaatcaaataatcattatttggtaggtattaaagaccaaatcgtgattaaaccacttgaagctagctcaagtggctatagatgggtgtgtgagtgttggaggtcctgggttcgagtcccagctaaaacatgttgtaatatataaacgct

SEQ ID NO: 324957 - DNA, 1432 bp, Cannabis indica
ggggaaacgaaaacccatgattgctgaagtttctaaaggtagaagaaggaagaaaatgtaatcaaagagagagctctcaaagttttcaaaaggaaaactctagtacttgaagttgtgaggagttgagatgctgaagaacccaatcttatgagtatatataatcaatgagttgtgaggaaatgaatggtagagactaaagaatcaattaatgagatggggtctagtgagtgacataatctttgggaaatcacatggttgtgtctttcctaattatttgaaagccacatgagaaaagaaaacttgttagttgaaggatccattaggtcatgatcaaatatgtcccaaaatggtttctctttgctacatacattttgtttaaagtggggctttcttgtaagttgttcacctggtgatgtctttacaatattcacaataggcaagtgtccatgtatgagtcagaagacaaagccatgtgaagctcaaacacttgtgtttccttgaaaataccaaacgatcccaattctttatatatacatgcacattctctattaacaaaatcatttgtgctctaaaatgaaaactctggaaagaaaggttaacatgggatttgaggtcactatctaataggtaggtttgctctctatgttgaagaagatcaaaagaatagttatataactaacaatagcagcactgaagaagatttggaaatcaagttcttgatatccaatattgagcttctgatcttagtatagaataagaaaatggctatgccagagtctagaagagaaaatgatttcaatcaaataatccattcaaggaaaagaaatgcaatataattcatttgtatcattcttaaaaacatttccttttggtgtgttgtgtatgtattcctttgtttaaatgaatagtgaacactaaagagtcaagtaattggatgcatggggtctagaaagaagcttagtccttgaacaatcacatggtattgtctttcaaattaaaggtggaaactagtatatgatgaggtatttcatcattcatgacaatggtttttctttgttgcaaatcttattgctcaagtgggctctattgatgttttttttccttttgttaatggttagaatgatcacatgtataaagtgttaattacaaccaaactctcatatatgacttggaagacagagccatgtgaaattcaaatgcatatgtctcttgcaaatttgtcaaagctgcccaaatgtatttagaaccacttatttgggtgcctttgatatacattctaacagtccattcatctatataagggtacataaccacatagccaaatcaacaactcctcacattctctactacaaaatattgttgtgaactcaaatacttctatcaaagaaaatttacacaaaggaagatcaacatggcatttggattgactcgt

SEQ ID NO: 324958 - DNA, 1223 bp, Cannabis indica
atctgtgaatgtgtgagtttgattagattttaggtttttttttttgggcagtgtttgtgatacgatatgtgtgagtttgatatgcctggtttaagattaggcccgatggtgtccgatataggtctgatgcttgtagatttgagataataatagaggttgaagataaaggtctggtacaggtcgatatatgtctgacatgggtctgatactaaaccacattggcttagatccgatagagcctgatatagatccgacattggtctgatactaaaccacataggcttaggtccaagtagaggacgatgtagggtccgatattgggtctcatgaattatgtttttataaaatgtgtctctgttcgacataggaggatagttggtcccatgatggcttgattgtttatcccacattatattgctctatgttcgattatgggtccgataggggacgatgcttgtccaatagtgtaatagcatttttaatatttttgtatccaattttggtccgatattggtctgatatgggcccgatgttttgctgcagaatttctaacttgtattttcttgtgttatttttccaaaattcaagaccaccatgccttataattccagcctcaaagcattacacagaccgtgtaacttggtgtggcagaagttattacgattcaaggattaaggcaaaatttgacgaattccaatgtgataaggtgaacgaatccctttttaaacttctagaggaaactgctaaactttttcggggcattgatccatcagttattaatgcacaagatcaaatctgagaagccagaagaggtacacttttattttgcaaagaagagatgcaaatttagtcgggtcaagtttgcgttggtgacggggttgaacttgttacctgagcctacagaacaagaaattaaagagaaaggaaattcgaatcggttgattgtcgagtacctcaacagtgatccttccatcagctttgaccaactgcgtaaagttttcgagagttgcacagaagttgatgatgtctacaagttggggatggccttgtttgttataggcatcctcaatggtaaagaggagaagacttgtcgttcctccttttatgataagaatggttgataaccttgaattcttctatgagtatttgtgaaaaaagatctccttcaacaagttgatggaaacttgtaacaaagattttatagaggttaagaatcggatgca

SEQ ID NO: 324959 - DNA, 693 bp, Cannabis indica
tttttttttagaaacaacacgaaaacaacataaaaattacataaaagtaacatgaaacatcaaaataacatacacataacaaaaattcaacaacaaattaataagagtacaacatagaaagaccgtattttctgtaaattaaatcaaaaaaatcgtaaaaatatttaaaattctgtaaaatcgtatttttgtaatttttttattgtttttgtgtatttgtgaaataatcccaaatttatttggatttagcctttaaaaaattcaattaatcaagtattttatgtgtactcctcaggtcccttaccaaaaaaaagtaatatgcccagaattaagacgggttaggtttgtgcttaaggcccatccaatctcaaacctcaaaaattatatatattatatttatacataattgaaaaaaactgataattttataaataagttcaataatacttacactcaactttaaatacagatgaaattacaaattttataggtttttgtatattttttttcaaaaaattattttacgagcaagttaatatttttttttttggaaaaatcatattttttaaaaacgtaaaactaaaaacttccttaagtacaacacagacaaaggggtaagttgaaaaataccctttttattaatcaattaatcaaatttgcctctaattttatatttatttgaaacatacctct

SEQ ID NO: 324960 - DNA, 724 bp, Cannabis indica
aaaaatgatagactttaaaaaagagggtaaaaataaaatagtgcaatacaaaaaggttatagagtgtaattttctcacagatcaaaagctaactaaaatctatggcccatttattcaaaaaaaaaaaatcctaggcccatttattcaaaaaaaaaaaaaattcttatggcccatttatattcaccgggccctggtactaccacccacacttttaagtttcaaaattgtattttattacgttttcttatatgaaattgattttttttttaagtttaatctttaggtttaggattctgatttttattattacaatttatgtttttaaaaaaattataattaatttatttttattatataattgttgagtttatgtctattgtaattatatgctatcatatgtgttttgttaggagattttgacattcattgaagaagcagtagctatgaaaacttattttggattgtttttttttgttgtctagactatatatatacactatccaatccatcactttacagagattgattattcaatgtttggtctctattttcttattttgaaaccaagtctctaatttgtttaagacatccttacattgtatatagcttgaaggtttattgtctagtttttcgttagattatccttcttttatgctcaccgtttcgtgcgatgcacgtatgttatgttttatattaagtattatattatgagtttggaaggaaa

SEQ ID NO: 324961 - DNA, 863 bp, Cannabis indica
tgctccacccctaatcacttagaatagctaacaaacatgcaaaccagggttagcagttctagcttttcttttaagcgtgccttagatatttaccatcgcacttcaggtcaagagcttaatgccgataaatttgtaatgtactttttgctgaatacttcaacagtaaccaaatattctttcaagcagatccttggtatccctattagtgaatgccatgaaaaatatttgggcttacctgcttattctgtgaaagataaaaagtaactatttggtgatataaaagaaaagatatgaaaattaatgcatccttggaatgataagtttttctaaattggagggaaagaagttctcttgaaagttgttgtttaatctattccaacatatgtcatgagttattttaagttgccatctactttttattgtcagcttgagcaaatgatggcaaagttttggtggggttcagacactgacaagaagaagactcattggaaaaagtgggattttctttgcaaaactaaaatgcatggttgtaaggggttcagatcctttgttcattttaaccaagccctgctagccaaacaagcttggagaatcatccaatatccacattctcttcatagcatggatgctcagataggcggcatgtcttgtctaacttggcaggaaatttattggggtcgtgatttattaaaaacctaatttgcgattgaaagtaggtgatggtagtcatatctggtgtgcttctgttcttgggattcctcgaaatacaacctttacccccttgcgttatacgataggtcctcacaacaaagttgctaactatattagtgctattgatgaatggaatctcatctctctctctc

SEQ ID NO: 324962 - DNA, 722 bp, Cannabis indica
tggatcggttactttttgaggttaaacaacatccaatccgtacaagtgcgaattttaaatttttcaatccaatccaattcgcgcatgtgcggatatccgtattttgcgaattggattgaattagatcatgcgaattggatcggatcggatcggatacttagtgaacatattgataaatgtaagttttttataaattataataaacaaggagatacaaacctgttactctcacattcatttttcatatacaaaaaattgtagtttgtccctgcacatgtcacatcctcacatgacaagtcacattaacctatctaccacccctattgggttggctcattgggcaagttcatttgcttatttatcattaactagatgtaattgcctcattagaaggcctaattctgtttagtttctatttggagctagctaatctagccccatttgcatagctatttgcctacaaatagagtcatacccttattgtaaaaatgattcaattttagttctaaagcaaaacattgttgaaattttgagagaccaccattgttgtaagccttaacaatacaataatagtgatttgtggactaagacttgttaacgtcccatccacgtaaagaccttggtgtttagtgtttttttaagctctctaaaatatttttttctatttaatttagttgttggaaatctcagttaacattttagtactttcattgagagctaaa

SEQ ID NO: 324963 - DNA, 1503 bp, Cannabis indica
tatttatttaaaactaaataaaactaattattactaaaataactaaaaatacttgagaacaaagctaatttaatgcccaaaaagatataaataactctattttcatagagttatcacccaacgggcccaaaccatccaaatatttggctgtgttcaatcacatagtaagtgccactagtgcaagaagaaggaagagttcaactaccggtacataagcaaaagactgctaggtgcaaaatccatgtatcccatgatagaaaaactatcattttgcttgctaatttcatcacgaaagttgtgaccctactttcaagcccatgttataaaggtattaacaaatcaccctctccgctaagtgttacaaaaattgaagtcatttggaagattgttaaagtgggccatggaactaatttgacattgagtatcagctctgagtctcaattaaaggacaagcccaagctgactttgtggtagagtgctcttaaatcaatgatcatctggacgagccagatccgaaacttccactctagaaagtctacgttgatggagcctcaaatgaaaagggagccagagcatgaatcattctagtttcttcgtaaggacaccagctccaaagtgccatttgtttcaaatttctagcttccaacaacgaagcagagcacgaagctatgatagctagcttgcgattggctaaagaagttggggcccaaaacattgaagtttacagtgattcccaacttgtggtaaactaaatatatggggagtatcaaacaaagggagaaagatgttgggaatattttaccaggatcttgatttactaacaagtatgttaattaacatcctaaaaatgaatatctctaaaacaatgaaattaaacacattagagtttagaaaatcttacattagttgcagcggaatataatgatttcttccgctcaaatatctaatccttgttcttttttgtcgcagagtattatcaaggtctgagcctggatctctttctctcttttgggtttggttgcaacagtcttacccactatcattgagtacttgacttgctatgtgtgggcatgtcactctatcattaagggttcgaatatgaagaacaatgaaggaggcttgaaaaatgtatagaaagtgtctctcgtctactagttgtcagagaatgaaaactaggtttggtaggttgaaaagtcaagttcagttggatgagatgagagcatcatgttccttatatagtatttcaactagggcttagggttgaattatatgcatttttaaaaaaaaaattattggtcaaaaatcactttaaggtcgaccactaaatgagaccactttctagttataattttgccattttatttcaacaacttattattctttcaataataccatattttacaatttaatcccataaataccaaaactatttcttttaataattatattaatatcaataaatatcattatattatttatttaagtagaccatgcaaagtctct

SEQ ID NO: 324964 - DNA, 785 bp, Cannabis indica
ttttttttttttgttttaactttagatctgttttcttttggctaccatctaagaactttaatcatgcaacgcttgaggcagaggatattgctaatatagccttgtttttggcgagtgaggaagggcggtacgtgagtggctaattgttatggtaaagcaaaataaaacagaggaactcaattttaatttgttattctatttctcacgtctcatttttttttaaaaaaaattgaagcatgtttatgttatagtgtatttatcaaagaataattttttatcaataaaggcattataattttttttttgtttgtgaaaattcatgtaacttagagtaaatattgtgatatattaaataataaaacataaaattattaatgaaaatcaaaatttttaatgaatgctttctcttctcaaacatggctctgccacctaaggcaatgccgtcgacgacccaacccaagccacatgcgtcactacagatgctagccaacaactgtgatccaccacattgaatcttttcttttctttatttatttctttttttataaataaataatatatttatttatattagttttatttatatattattatttttatatatttattaatttattctttttttcatttatttttaaaatgcattagcggttagtggcgggactggcggggtcccaccgctaatatcctgtgtcaatttcgatacaggacattagtagtaggatcccgccgctaataatattattagcggcagagccatattctgtcgctaataatattattag

SEQ ID NO: 324965 - DNA, 784 bp, Cannabis indica
tcactaaactaaattaaaaataaagttaaaaataaatagaatgaaagtcatatacaaataaaaattacataatgaaacataaaaaccagttacataaatcaatgaaactggattctacataataaaataagtaattttttcttaaagaaacttgtttctatgtatcattatgtaaattatattgatttatgaattgatttctggttgttcttatacagatgaaagtaactaacaaatataatgaaagtcatatacaaataaaattgtcataataagacatagggaacagttccataaatcaataaaattgatttctacataataacatatgtagttttttattgaagaactggtttctatttgtcattatgtaacttttattgatttatgaaactgatttcttgtgaaagttaatataaatggttttacttgtagatcccctgtttatttcggtattgcccctgattttgcccaaaatacgtggaccaaccggatgatgacacgtggatgggaagggattagcatttgaataaaatagctaagtcttcataaagcaaaggattatcttggacgtgcctcccggagaaggcatgtaagtctcatacgctcccggagagcaagatggaaacaaagcatctccgggtggtgtcaagtttcatctaaacagtcatctcgcatttaatgccgcatgggaggaggcgtattggaactgccacacgcaataaagtatgacgacacaacccccaatctgtacctactaggctatgatcaataaagtctagtg

SEQ ID NO: 324966 - DNA, 1182 bp, Cannabis indica
aataaaactataacattatgagtacttattaaatataaataaatattgctttaaaaataacacctgtcaataaataaaatagtgaaagtgcagagtctaaaatgatcaatagttgtctttgatgaagaagttaattaattaaataactcaagtatatttatttgttttacctgtcaaaagagaaagcttatttattttcttatatatggttttttttttcaccaagctggtgaaagatttaaacctgagtaagaaaaaaccaaccaagtacacaaaattaggtaggagttatactctccaatttagatttacagcccaaaatacccaacaagtattagctctctttgaaaaggaggtgatccaaccgcagcttctagttcggctctaatcacctcatctataattatttgttgataatatatatgtgtggtaaaagtattcaagttatattaaaaagagattttttatttgtatggttttttgtatttttttttttaaattattttatggaaaattaaaaatatgaggaaaacatataaggtaaatagttacgatgttgctaagattacttagttatctttattttttttttttttttaacaaaaaatcatatatttacgaagatatatagtattaaattcataaaatttgtcattatttgaatttatttagttgttttttttagtaaattatatcgcatttatttaattatcaaaattcattcgtaggtattcaatgttaattaacatgacagattagtttaaaataatatttgtgttgaaaataatatttaagttagtattaaaagtttttataaaaaaataaatataaatatttgataaaatcatactaaatataatgtttattcaattattaaaattttatataataaagttatgtcttgagaattaaaacatatatatatataaatttgatagtgataaaagacatatatatatttaagcataatattagcataacttaaatatatttttatgataaataacaatataaatacttaaaattttaagtttgtaactgacattataagtactaaatgtttataaaattgtaatttttttctaatttcgtcattattattgtcctaaatagggaatatataaagcctagattctagatcatgtagtttagacaaaatcatataatatcagttacttttaa

SEQ ID NO: 324967 - DNA, 533 bp, Cannabis indica
tttttttttttttgactttttacttaaattgttcatttttttgtccaaaaaaaatatagtaataaaaaagtataaaattgtaattaaataatattgattaatgaaataatttatcaatagttatgtatacaatgaacaaaattttaatatcaatgaattatctatcttagattattgtaaataatttattttatggaaataaataataatttaattcaattttggcatgcatttttttatatgaccttaatccgtaataattcatatcgaattcgtgtcgtgtcatgactcatgactttctaaattcccactaataatattaaattttatatgtgttttgcaatatgtatttcaaatgggaaatttgataaattatgcttaaacattagaggtggtgtttaattataccacccttttaaaaattttataactatcctcatcttttattagtgaccccaaaatacccctctcctctaacccaaaaaatttgcctcttctccctctcatcttcattcacgcactctctctctctc

SEQ ID NO: 324968 - DNA, 893 bp, Cannabis indica
tgaatttacgatgcagacatctggatcctcttcgaatcaagatagctcatcgtctaactgcagagcatgctttgccaagccatgggctgctaaattgtcagagcgaaccacataggacaaaactgcccccgaatatttagacaataaagttataaatattaaaatattaatttatattttaagagtgataaataaagagaaatcataattttaaaggaagcctaagaaaataactatgttatagaaataaatttaacatcacaaaaaataacacacttaaattacaaaacaatatctaaaatattactattatgtaaaatagtaatattgtagcataatgattatgatatgcactacagataaaaaataaatttttgggttggaagaaattttttttaatacgaaatgtatttgtgtgactcttagtaataaaattagttattatattaaaaaaaaactaaaagtataaatttatcatatagttaatattttttttactgtaaataataaaaatattatgttccattatatttggtaagaaaataaaaaaggataaaatagaagaaaaagagatatttaatttataagagatagtatatttgggatatttaaatagatttttttggtggacaatctatgaaagatttatacatataggacattttattaaatgaagaaaaagacaagaaggctcacattttctcttttcttttctagaaacatatatttgatactttaacaatagtacctttttatgcatagatacgaagatttcagatttttttttgtccaacaacgatatttatataaacatagatattattaaagtaatttgcgccaaaatcttctcaactatcaatttacttgcaaaaaaccatccaatcttatatttt

SEQ ID NO: 324969 - DNA, 708 bp, Cannabis indica
attgattttgagggataaaggataaaattttctggttatttctccctctcaccctctcactctccctctcttaccctcttatttttcaagcttgattgtgaagaatttggtgtggttggaagcttaatttttgggagaaaatctttgttcttgcttgttgtgatcttgaggtaattttctatgatcctaacaatatttttagttgctgaattttatgattgaaagtatgaaattgatgaacttgatgataggatgcatgttcttagattttgttgtaattttgattaattaagtgagaaatttcatgggttgattgggattcatgttgtgagcttggattgttgattatagggtaggttctagtgttgaatcatgtattgttgggataatttcatggctggaaaatgtttggttgtgttgatgaagctcttgttcaagagcttattattgccatggatgtgattgaactttgtggttttcttatgcaatttgaattggggttaaaagttggatgttgatgcatgttaatgcgttttttaccctctgtttggttagggtttgaaatctaggaaaggtaggcatgtttaggccttaaaatggagtttttgggtgttctaaacccagtcgtcgcgacgggatttttgtccgtcgcgactgggtttgacagtgagaaattttgtttttctcaattttgttttggccataact

SEQ ID NO: 324970 - DNA, 435 bp, Cannabis indica
ttgagccaactaacagcaattgagctgcctctgcatctcttgctatagaatgttgactggatgagtttaggtaaatttcacgcattagatcacttactgaatgagttgcaagaatctaagctcagtattagatttattaatttcacgtacattacagtatagagaatgataatcaagatttcattttttagtttgcaacgatctaagctcattattagatttatcaatttccaatcaacttatagaaataagaaaaataaataatgagtgagatacctgacagcgcaacgacgaagggcaaatattttcttatggttatgtatgttatagttatttaagacatcttgaaaaattttaaaaatttagaaaagtttaacacaccgaaaaatacgttcaaacagtgtattgtacctgtaattattttattttatacgc

SEQ ID NO: 324971 - DNA, 1160 bp, Cannabis indica
ataaataaaattcttaatatcaataaaaaatatctattttagggtgattctacaattcaaccccttaaaagagatgtattaatacacccttgacttgtttcggcatccagaaaaattttttagtctaattttttgtatatttatatacgttatagctatttaaaataacctacaaaattttgagaaattccgagtaatatataatatagaaaacaatgttcaaacagtctattttacaagcgtataaaataaaatagtcacgcgtgcaatacactgtttgaacgtagttttcggtgtgttaaacttttttaaatttcttaaaattttgcaggatgtcttaaataactataacgtacctgaccatgagaaaaaatttaactaaaaaattatttcggtagctaaaacagataagggttcatcaatatatccattttaaggtagtgtattgtaaaatttccctctattttatatttttgtaagtaattttttttttactaattttatacatttttatgaaaataaataataatcttatacattaataatttaataatatattaaatataaacgggtcaattcgtagcccaatccaaataaaaatcatgtcattcggattttactcaattccgactcgcatttattttttatgaccttaatccgtagtaattcgtattgagttcgtgtgtgaattgtcgcacctactcaaacctcaacgtcatactttttatgttatgccgaagtgttccattacattatgtgcaagagttctcttagtcaaacaacttgaaattttaataaaattataacttaaaacagaactagataacaaaatataaaatgatgtttcctctaagttaagtgcattgatgactatattcttcaacggaaatatatatttaaacatttgtttgttttggtttttttttttttttttttttttcttgaatgtgtgaattttaatttaagggtaaatggtggcaaaacttccaatattttcgttttggtttcactaaacccccacaacccaaatttctgcgggtaaacttacaatactcgggttctgttagtaatttaacacttccgtccaaatttagctgttaactgtcaggttggattgtccacgtggacacaatatacacgtggcacaattttattggtcc

SEQ ID NO: 324972 - DNA, 747 bp, Cannabis indica
aatattttataattttaatttattaaatataaattaattttataaaataatgaagaaatattagtgattttaattaaaatacaattaaaaagtttagaaaaaaaatcagaagctctttacatttaaaaagttctctattcattttttattataaagattaagatatttgatataataaattaaccaattaaataattacaaaaggatcaaattttatgtaatttattcctaataaaaataaatttatgtactttatttcctaaattagtcattatataataaaatttagtaaacttcccaacttataattcatgtttatggtataattatgtagaaaattgggtgtattttcatttaaaaataaaaacataaaaagccaaatatggtagttagctaagcaaacgggaattgtttgttcaaaaaaaaaaacatgaacggattgttgcattttttttattatttaaatgtcatttttgaatttatttaacatcaaatcttaccgaataaataaaaatgaaatattgtttattacgatggagatgaaattttggaaattaaattgtttgattgacattccaaaagtgtttaagtaggtaggtcaaaaacactataaaatagggttgtaaggtcggtttagagagtttatcctatatattttctaacccaatttaaagttcaggttactaaaataaaatttaagtgcaacccgcccaattttttttaaaaaaaatctataaaccaaccaac

SEQ ID NO: 324973 - DNA, 829 bp, Cannabis indica
caacggctgactacggatgaataatttaaaatattcaaactcttctaaataatttttattaaagatttagcaaattaccttatccaataaagcttcctgaatataatttatcttcaaagggcatgactacccaaattaaaatagtcaatacctataacattttaatttagaataagcaaaaaaaatctcccattaaaactagagaaattaaaaccaagtgtaatataatcatgtaaaatcatgcatagcatatcaatgacaaaaatacatattataatatataacaaaaccaattgctttaaaaagaactcaaatacaaagtttgagagaaaaataaatactacaaatgtttcataaaataaataccactcaagtttatgactttagatccaaatcaaaaagattaacttgctgaaaaagagacatgtaataataacacattgaataattgacgcaaaaaaattacaaaaggacaaaatgagtataaactcaatttcaaggtcttaaaatagagaaggcatgaactagccttaaacaatcaactaattagacacataatgcagccatgaacttattggaattattttaccaggatctagatttactaacaagtatgttattaacatcctaaacataaacttttaaaacgatatgaaataaacatatataaagtttcaataaccttacagtggttccagcggaatataatgtctccttccactcagatctctaacccttgtatcctttctgtagcagagtatcaccaagatctgagttcgaatctccttctcttgaaactggattcttcaaagccttacacactatgatt

SEQ ID NO: 324974 - DNA, 682 bp, Cannabis indica
cttgaaaccgcggttaggtttcttacttatcgttcgctatatcgggcaacgatagtgacatacatagctcgtggacaacgagtggtaagggtgctttgtaaagtactgaaattaggtgattattgggaatatgtgtgatttgagtgcttcgtgaagcacggagattgtgtgaatatctgtttattgtaataatgaagttgttgacagtgagctgttcgactttcatgtagtgtgtgatatatgtgtttgcatgaatgctaaattatatatgcatgctggatatgatttgaatgacaagtatatatattatgttgtgatatgaataattgtgttttcaatgctttctgtctagtagtttttcttgctgggtcattgtaaattacgggtgcttcgtggtgcaggtaaaaatagaagaatagcagctgtattcggccatgagtcagaggtcttccagcaatgtatttatcactcgtagtgttttatcttttgagaagcaagattaaccttcttttctatgatttgaaatgtaacctacctttgtaataacggttttgtaattggtcgtaaaagaatttaattagcaagggatccccacatcacgacagtattatgaatgaaagttttactttaaatttaatcaataattttcattaatccacactttttcctaaactaatagatt

SEQ ID NO: 324975 - DNA, 502 bp, Cannabis indica
aaacttaaaactttaagtacttagccactatttaccctattttttatttaattattatatttacatacataaatataaatgtatcactctcttcatccaactcttaaagaaccctagccgcctccattattccttcttctcctttctattttttttttctggttgagctcatctctcttaaaatattgaagacatcacacctcttcggtgtaatctctctcaagcaatttaagcaaatatggggtatacctcgttgttatggaacgacgcaattcgacaagaaactcttggtggtgatgggtgtacagcgagacaatatcacaatggtggatcggtgttcaaggcgtctccaatttcatggtgcatgggctttcgaagaggcacaataggatacgatggtggttcaaggctttgacatagttcgtgcgtacttcgacggtagttcaaggcatcttcataaattattgttttttttctttttgtaataatatttttcatcttt

SEQ ID NO: 324976 - DNA, 1318 bp, Cannabis indica
ttgggcgagagagaaagagagaagctttggaattgtttggttcaaatgtgaggggtattatgggaatataggaaatgtagtcatatatggcctatggtattacatttaggtttagaaaaataatataggggtttattatgtatagaatttcaaatttccctatcatattttattgtaaaatattatgaattagattataaaatgtaaatatttaaagcttgagaagtataaaaagatagtatgaagtatttaaatatttcattggcatatacaataaattttaagaaatttctaaacaatttagtttttttatatgtatatatgtatttgtaaatgtttttataaaaactcaattttaaatgttatatcttgatgtttaaggtttttgttcctcctctcttctttctcctcattcttctctacaactgaataacatcatagactaacacaaacttcctccctcacattaacttaaacaagagaaaaacatgttaattagataaactaaatagataagaaataatcattgttgaggtgttagggtgtcttttctttattaagacatctatatatataatatttggactagtaaaaaagtattcctagtcaatatgggactaaccacaaaagataattttttatttatttttctttaacaagacttctgttaatagatttttttaaggcatgtttcgtacgtatgaataaattggattagacaagttaatttgtctagtctaatgatttcacatgctgaaagtccagataattgatccaactaattctatccatttagagttatttatcacatctagcagtgtatgataaataatccatataagtagatttttattatttatcattttttttattttgattttataaatatatgttgaatttaataataatttaaataaaagaatggttacaaatttatttatatatttttttgttaaaacttattcattataattaataaaaaatatatataattttgaaatatcatatatagggatcgaaattgcagccataggtatgaggccgacaagaataattttttatcctcgaatgttaaacaagaaatagcacccccaccccgatggtgacccattcaaattttaatttattttgtaatattatttcaattattatacattaactctatttagcttagcttcttatataatatactagatgagagttacgtggcgagccacgtaaatattagttttatataagttctagtagtttttgtttaagaattcagtaactaagcaacgacaacaacaacggtagatagatctatttaagtttttca

SEQ ID NO: 324977 - DNA, 804 bp, Cannabis indica
ttttattgtctaaactttatttttttttttttttaattagaattttgacatcactaaatcatcatatttcctaaactttaaagatccctaaaatattttcctaaattattgagatagatagatttaaagatttttgtctaattttagtaaaaaaaatctaatatggaacaaagtttaagagtatgatttaatacatatcaaaatttgaaaaatatgattcggtagatatgaaagtttgggaagcatgattttagtacatggacaatcaccgcattagtaaaattgaataaaattagacaaaagtctttaaatctaacaatctcaataattcatggaaaatttttaatagccaaaaaaatttaaaagacataatctcaaactgccaaatcaaaatcattcaaaggaacatgagctcgaggtatagcaagaatataacatccgccctttctcagaaaaattattagtaatcaaactagaattccaacaaccatgggaaagaagcaagtaatcaacaatggcattattaggtattgtggacattgtcccacatagaataaatagtagagaattgagccatatataagaacatgagctactccactcattaccaattggttttaagatggaacactatgattctcaacatggtatcagagccatataccttgcgggcaagtgatcctattcgattcgcacctatacagatagtgaccatgtctactcttatacggttcaagatagatgagcaaaaataatcatcatcttgagggagaatattgtggacattgtcccacattgaataaa

SEQ ID NO: 324978 - DNA, 506 bp, Cannabis indica
tttattttaataaagtcagattagctggctggcttatacgtatattaattattgtttatcattaataaaaaagaggtgtattaattagcacgtattacagttttaataaggaatttaatattcagactataatatatgaattttaatgaattgccaacttctacctattttttaattttaacgtcgatgtgtatttatacttatattatataatgcatatatacaatatagaacatggacctaatagttttgaataggtcctaaccatttccaatagtaacacctggtgtggaatctatattaatttagtgtaaaattttttatttttggcccaacaattttaataatgtacactaaatatcctactaatacatatcttttacttaaaagatctcatattttatactatttacattaataacttaaaataattaatttgtgatatccgtttggtacgcatgattggactagattggactgaaaaggattggactggactggacaag

SEQ ID NO: 324979 - DNA, 799 bp, Cannabis indica
gggtataaaatcatgaaaaatattaaaattcatgtatatcctctatgatacacctaaattcaataaaatctctgaaattaataaattataaatcaaattcctatttcttgagaataggtcccatataacatgatacacacacataattaaataatgtaaataattaatattaattctctgctaattctatattttaagtatgctgtcattacaacttcctactcccttctctaatattgtatccaaaatgggtgtaatcatttacactccatgttgagggggctattaggattagttataattagtttttcacctcagttaagtgtgtggacatttcagttaggttgttagctggttagttatttttcctaactaactcaactaattctttctctgcctatgtaaaggcttgtgtatttagaacatattaagctaagtaaatgagatacatttcattctaatctctctctttttctcatggactagtaacaataaaattgttgataccacgtataaaaatcttgtatgtttttatttttttgcactttaattatttgttgattttttatagttacagagtcatgttcagtaggtatcgaaaatctatttcaatattatatttattattttatatttaattaattgattaataaaataataaattaataatattaaaataccgtatttccatttggtgtttattgaaaaatggtcgtttgcagttatgcattttagttatgaagataacattggattttgttttatttaggtgtcgtttggtaacacttctgttttctaa

SEQ ID NO: 324980 - DNA, 1349 bp, Cannabis indica
gtagcgtgccttagcattagggcgttacatacaatcgatatgaaatgtgaaataatataacatatcgaacatatatgtaaaccacgaaagagacataatacctctagccattgatctttgagcttcaattcttagtgtagctttgaattgggtaatcgggctttcaagctctctctgatttctttagatagaattcgttgtttatacagaatgagtgaggagctcaagaaccgagagtaccctatatttataatatgcacacctcataaataatttatcttacattctttcgatatgaagttaatcaaaggagcattcatattatatggttaaaataaaaaatttactaaaatatttaaaaaactaaaactaaaaagaacgatacattatatattctaaattcatttattttaaagtttctttaaaaattcttattcatgctctacatttataaaataccatttattgctctaaacatattttattaattatttaagattttaattttcctttttagatgggaatttgtgtaaatattaatattatataaatatgattttggtgatgtattttgaagatgataatttgagcactcttgtaagtttttctattttatcattcaaaatacaattatcaaaatcttatttttcttattttacctcatatttttatattataccatacattaattttcatatattttttttatattatttaaatattagattttttaaatataatttattattttaaacaaattatataaattaatataataatatcacacatatattaaaacaactttaaaaattaatataagaattatagctagcataaaaaaaatgtaaagaagacaattacaatatttcgtatgtaattgagccatcacataaattattatattatcattggacaggacaatatcggtgatgatggaggattgtgattgtgtattactacactgcatgtctattttaggagataattgttatttaacattttaaggtactaaatattagggttgaatatccgatttaattaatatttttttttacttattttgatttaattcaattagtaattagattttaaaaattcattatctgatccaacataatctcaaaatccaattcaatctaattcaattgctaattgaaatattgaatcagatttttacaccaaaaatacaaaataccaactttattacatatatacaacaacacggttacatcaacatttttaccttctctcttaattttattacacatataccgcttgcacatcaaatccatgcacctatcaaccatcaatcaactctcaatcacttgcctttcttttttttttctttt

SEQ ID NO: 324981 - DNA, 917 bp, Cannabis indica
ctagatcctagtaaaatatatcctacaactataggtttgacaaaagctttactggtgtagcatctggatccactcaacagaaccaacctcaagccaactttgttcagaacacagtctcacaagacacaaattggtaccccgactctggtgcaatgaatcactgcacaccagatgctcagaatctgataaatcgatgcaactacaatgaccctgacgatatatatgttggagatggaacaggtttgcccattcaccacactggtcattcttgttttctgtctaaatctaatcacattcttgtgttaaacaatctccttcatgttccaaaaatcacaaagaaccttcttagtgtgtctaaatttggtagatataaccatgtttactttgagttttatcctgatttttgtcatgtcaaggaccaggtgacacacaaaatcctcctcactggtgctgacaagaatggcctgtattcttttgatgattcccagttccaactccagcctttcccactgtcatttagtcccagtttcagaccagatagtgaagccaaagtcaactcagaaattgtccaagccaatgtttcctttgctgccaacacagaatgtagtcaaaataataacaatctgtttcaaatgtggcataatagactaggccaccctagggagaaaatttgtgaaaactgtgcttaacacttgtaacattactgttagtaataaaattcctttttctccttgcaatgcttgttgtctaggaaaaattcacaaatttcctttcccaaaagcatctgaaacagtgtataatgaacccctacaacttgttgttactgatttatggggtccatctcacataacctccactaatggttataagtactacattcattttctagatgcctacactagattcacttggatata

SEQ ID NO: 324982 - DNA, 1999 bp, Cannabis indica
aattttatttacccgataaatattgataccaatttcccatgtaggtaaagtaccaggatgagtttctcttagagtcatttcaatcataggttggggatcaaccaaaacgaaccctggacacactgtgttgaaacaagatacttcgccagcctaaaaaatattgatacttaaattatccacacctactcaccgaatgtataacataaaattattacctgaaaatatatgaagatccgagtttgattatccccgtatacactaggatttacctaataaataataggataacaaattagtaagtgaaaaaatattctaaaaaattataatttatctgaaaaactttattatttttaacactaaagaatattcaaaagaaaataaaacttactccccaaccagcttgaatgatatctagtccattttgtaatttgattcgaccaaaagtatattgtgagccagtgacattatatagtgtgtaaaaacttgcaaatgttccacctccattgtatttcttggttgaatcagatgtgtaaacaagtgcatgctattgtaatcaaattcaaattgtaattatttttcaatgatggaatatattatttaatttgtcaaaataaaatgaaaatgtaaaaaattatatgcttacatgaaaagtaggaggagaattaattcttgaggtataagactttgtaaatagtttggctctgatcagatcttccttagtagttcttcttattggaacatacccagttggacatttttcaccctttattgatacttctttcacattctttggaggcttgtcttccctaaccatcaatttgggatgagaagaaggtcgcatctacaccataaatacatataaatatgttataatacaaattcactatggtttcgaaaaaataaagaataaagagctatattacataaataattatttaaaaaaaacatacctgaaaatcatatttgtgattcttcaataaaggatgatcaaatgctggttgttcgtaaaaataaatacaatcataaatatctccatattgtgtctgtacatgacacagaacaagttagataagtgggagaatgaagatgaaattaataataatgaaaagaaaaaaaatacttttataatcttgattgatgatttgttcagtcgctcaagttgattctctatttctagaagttcatttcttgataattctactggttgttcttgagattcgcaataacataaaaatgtacacaacacaattacaaccatcgaaaatcccctcatacccatatttatgtcaaaaaattttatctgcaatacaaatatcgatataaattagccaaatatcaataataactatatttaattctctcacaaaatattccaaaaaaaatttatacaaatccaccaaaatattatgagatattgaaaaatgaaatcacataccagttaataggtagcgtaatatattatgagaggtttcaatagatgaattggataaatgagtttatatagagaatgattattatgtagctaggtcaattgaaaattaatcaaaaggaataaatatttaataataatttacgttatttagtctttggtaaaataaatattttcttttctttctctttcagtgtaatgtagataactacaaatttatttacattaaaaatggagaaatcaaaaaggtaaaactataatagtatatatgactgtgattttgatattttcaagaataaaatattacaaaaaaattaatattattatctgtattattaaatccaattttacgacgttacaaaacttttatataagtcaaataaataataaatacactacgttacaatttttttttttaaaggagttataggatttatttttttttcataaattcgaacaaatacatgttttaagattttatttttaataagggtgtatttggaagtaactgtgtaattacaatgtagggtaattactaggtagtaattacacagtttagtaattaacact

SEQ ID NO: 324983 - DNA, 761 bp, Cannabis indica
tcaagaactttaacaaaatacttacattagggcttgggcagagactcatgcttgaagctcgggcagagactcgtccaggcgtttgacagggattgaagatagcattcgtgaacgattgattattaattggttctagttcttttgtttaagttattctcttttggcgtcaaaaaaaatattctttattagtttttgttctcttattgtttaatcttatatctatattttactgtttttaggttaattccaatcggtgttttatggggttagaatctttagttttatgtgtttaaactaactaggttttctcattagtcttgtctactgacatggttttttagttttctctggtccgttttttgttggttcttgtttctttgttgcttttgggattctgctgctagtggtatgattatggaggacgatataggggtgcatattcctattaaggaggaggaggtggctatcttgtcttatgatgccagtgctacagatggtaatgactacgatgataggtggtgtattgttggaaggttcttgactgaaagacaaattgattttgaggtcatgcaacatatgatggcttcattgtgacagccggggaaggggatgtttgtcaagaaattggatactaatcgctacctctttcaattttatcatgaaattgacatccaaagtatgatgaatcgaagcccttggacttttaataggttcttgttaattttcagaagtctgcagcggggggaggatccaagattggt

SEQ ID NO: 324984 - DNA, 968 bp, Cannabis indica
gtaccaaacgggcccatatagtattatgtttatgtccattttctttaatctaaataaatgttaatatttatatgcccatttcatgtagggtaaatagcgacataagtacccaaagttttatatttgtaagtggcatgaacttaatgtttatttttagcggcataagtacccaatgtttgtaaaactgtaatttttctctaattttgtcaatacagactctgttattgtcttaaataggacacatataaggcctaaattcttgatcattgggtctagatagaaatatgtagtatcagttacttccaaatgttccaaatgttcttgatcattgggtttatgccgctcacaaacataaaactttgggtacttatgccgctatatacccaatcatgtatgtttggtattttgagtctagtggtggactgttgttgtgtgattgggagtggatttggttgactaggtaatttgtttttttagtgtgacggttcaaaatcatcggatatagagttcactattgctgacagttttaaactgtcgataaagttttttgccgatattttaaaccattgcctattctacctagttttgtgactgttaataggtgatgattatagagactgataacaatgcattagttgactatttaaaactgtcaagaaatccacttttttatcattgtctgctccaacaaatgacaaaggaaaatgtataatgggtgatcctttgcgagcactacaacagttttttatattatcggcggaggcattcgccggtattaataggccagaccgccggtaataatccgctgggactaattggtcgctattagtggttattagcgacgaaaatagtattccgccggtaataatattaataccggcggattaatagttagtggggtactgctggtattaatgtctgcactttcacacgcagatgcattaataccggcggtaccccaatcattg

SEQ ID NO: 324985 - DNA, 976 bp, Cannabis indica
aaaaaaaaaaacaaacaactaatgctaatcaaagtccacacatttagttagtaactgacaaaattattataattcatgtacaaacttaaggagataaaaataactcatactactttatttagattcctttagtcagtaataatccttataattattatattattttcgaaagtctttaagacttttagaaaatataattatccactatatcgaaactataaaccttgaaggtaagaagagcttgtctctctgtttatgagtagtaattgcattgactaccaagaacagaagcaccacaataactttcatattgacaattcaaatttattacaagtaataatatcactatacatactaacatttgattattttttttcctattaaataaaaatttatatatgtggcattccttgattgatcactgcccaccacatacacatgattggttgattgatgaataagcttggaaaataagatagaatttccgtatttgtatacagctgcaggattcattacttgaaaattcaactttttttctttttcttgaaaattctttgtttgaatttgttcattaacaaaccatcacctcatttaaatggtgtttaactttcatagttaatctttttggaattccatagcatatatactaataattaattagtgttggtctcttgttctttttccaagtcctgttggttgcagtctggtgaggatatgagagcttcgagtgatgatgatttctgtgattctgtcactggtttgaggacttactgcataggggcgagttgatctggtggaggagtagcttggtccctttggaagcttcagaatgatttgttatggagtaataaattaaagtttccccttaaaatatttattaattacatattaaaaaaatataatttttaaaaatatttataaaattattttttatctttaaaaaaataattacaaaaaaaaacttaatataacatca

SEQ ID NO: 324986 - DNA, 854 bp, Cannabis indica
aatatattttgttgaaaaataacatttagtgacaataaaaaaaataatgttcaatcacaaattatcactaatatatacaaattataattactagctaacgtttcattgacaagcataaacatgtttatttaatcacaatattttttttttatcattaattagttacttaagatttttttttttttggtaagtgaaaaagtcataagattaattaggatatatataactaattatttactaattaattatttaatggttgtggaaaacgaacaaaaaaatatggtgtttgcactattgatgatatggaataatttgtaaggatgatgaatggagtagacagcaacatggtacgtgggcagacaataacattttcgaagatatagataagaggaatccttaaagatggtttggcctttctatagccttttttgtccaaatgctcaatgcctacctatctatctatatcacttcactatagctcttgaataattccacatagggtttttggatttttctcttctattccaaaacaatactatacctcctttagtactactttatgattttattataagtatttaaattttaatcacacataaaattttcaaattttgatgttaaattaatttatatctttaaaataaaaattaatgacaaaaatacttgttttttatttttattttattgctaaaaaatatttaaattcttgagataggaataaaaatactcaaattatgtatttttgatattctcgttagtacccacttaacattaatgtcatgtgttatttcataattggtttaatttaaaaactttattaaaattatttaaataaatttaaaataaaaaactaa

SEQ ID NO: 324987 - DNA, 1532 bp, Cannabis indica
tataataatttttagaaagtatcgttagctaatcacaaaacgacatatgtaggggtgctagacattactgatgcctagcaatactctaataataataataatgctttaaaattaaccgcatattgtgtagtgtagtaatatgaatgcttttactatcatctttttttgtttgggctaagggttcgaaccccaccatagtctctcatgagaaggattatgcttggccttttgagagactagcttactgtagcggtgacatccttaatgggatgagaatactctccaagtgcataccgattagggttgggtatctaatctagtccaacattttttttctcatccaattcaattcaattagatattgaatttgaaaaattatcatccgatccaatctaatttgacctcaaaattcaatccaattgctaatttgattgaatcagttttttaattacatatctaattacacacctaaattttaatattaacttaaaaatatgaagaaaacaaaaacataaaaattaaatatcacattttatttaagtttaatactccataaaaatatcactgttacaagtgtaaggcaactaaaagtttgaaataactaaaacaataatattgttaagaaataaaatagaatacaatatcatgaaaataaatacataaaataacctagtgttacatattcaacacaaaaaaaaaaatcactaaaatataattaaaatatttttattatataaataatttttaatatacataaacgtaattggaatgggttggtttttaatttggattttgatattgacatccaataatcgatccaatccaattgtaagtggatatacaatattcaatttttcgtaattggattaaattacatgttgttcaaccctaatactgatgatccaattaagagagaatgaggtataaagttcatataacgggcatgtggtataaatatagaatggattataataattatgcaaacaacataatatatatatataaatatatatatgtgaaatatatatatatatactcaggggcgaacccaaattgtagcgaggggggcagtcgctcctgaaaagaaaaatcggaaaataaatgtatatgtattttagttagttacaacatatatttgtaataaaagataatattcatacacataataataggctgggtgtaatggttaagccagattacatatgtgttagaggtcaagggttcaaatcctaatataacatttatattttttcttttttgagattatttttgtcctcctgctcccttcactttaaattccgagtccgccaatatattatatatataaatatgaatatacatgtatatatatgtaaaaataattattttgatatatataaaatattaatatataataaaattaacaactacatgaatcaaaagaatcaaaaaaataaaaagaaattacacaatcggccactaaataaaaataaactgatcgtatatactgtgacagccagtagtctcgtgatccgtaaggggaaacaccgggt

SEQ ID NO: 324988 - DNA, 1581 bp, Cannabis indica
aaacgttatacgactatttgataccatgtacagacttaagtatcaaaaaattaaagtttattaaacataataatttagtctatttttgtttgctaaaataaattttgtatacgctaaagataacttgaatacttaagtcgtaacaaacataataacttaggttacttttgttcacaaataatccctactaatttataattacaaatagcttagtaaaaattagttgattagtaaaaaacactactacaaaaaaaaaaaaaaaaaaaaaaaacctcttccatgtccattaaaattggacatcataagtatttgcttaccattttgtattggacatgatcatttccatgggcattaaaaagtatatatatagggtttttatactatatactgaaattttttaacttttttatttttttgttgtggggcggaactttttcaaaaaaatactgtgttttttcttttaaaaatattatgtaagttttatattatgtactgtgttaaattttctattattatttcacagttgttttttagttattccactgttgtttaattgttctgttttgtttttttatggttgttttatttttgtaaaaaaaattctgtgtgacagcaaaattgtaaatttttatccaaaattcagtattttttgtaaaaactccaatatatatttattaggttaatattatgtgcaaatgcacgtatatttaattatattctttatttttattttggttaggtacatttttagttgtataattagttttttttttctattattcaataaacaacattattttttattaaaaaaatttaatttaagggctatttataaaagaaaaatgcaataatattcaaaatctgttgtaaattataattttagtttaaccataatactttttatttttcaaaaaaaatatatcacactttttgtgacttaaaagaaaaatacaataatattcaaaaattattgttaattataaaatcacttacaatgttattttgaaagccaacatttaaaacggagtgaaaaaactatttctaatattaaaatgatttataaagcttttcatgtgtacttgtttttttttttttttgaaattaaacacaataattagagattaatacaacaataagaaataatagaaaattaaatatccaagccattttactatttatcctgaatgtatatacaactaattcataacatcatgagataaggatgtgtatcgcttttaaatcaatgcaaaaggcgcaaattattttagcccaatagttgaatcaatgtactcatattcgacaaaattattctagaaaaacaattcatgtaccatttttgtaaaagaggaaaaaaattcaaaagtgtcaattgcacaaagatagttttaagggtaaatactatattttgaatcttgtattttgtaaaagttactaattggaccttctgttttgtttaatgataaaatagaccttatattttctaaaattgtacaaatatgatcctgaactgattttttgtcaaaataaaacttaataataatctgatctagaaatgttatgacaaaactggtgacatttttt

SEQ ID NO: 324989 - DNA, 1113 bp, Cannabis indica
tatacactcacacatagtgatatcacttctaatctcaccttagccatatcccagactataaacaattctcaggtaacaacaaaatcaaatctttctttatttttataaatccatatgatcccaaaaacaaaacccatttcccagatcttctataatgtgacagttacagggatggtataacaaattacaaagagatgaagttgtagcagagtggaaaaaattcaaaggaaaaatgtcacttcatattcattgtcacattagtggaggccattttttgttagacttatttgcaaggcttagatttgtcatcttcagcaaagaacttcctgtggtacacacattacatctttattatttcttccatttaaagcataaaaatcaaaactttatggttaattttgagaaatggaataatatattataggctgtgaaggcttttgttcatggagatgaagatttgttaaacaattatccagaattacaggaggctttagtgtgggtgtattttcactctaatgttcctgagttcaacaaggttgagtgttgggggccactgaaggaggctgtgaatgggccatggaaattgaagaaattgaatcccacaagtgattgggagttacctcagaaatgtgttggagattgtaattgttgctttcctccaatgagctcaattccatggtctgaatctgaacaagtttctaattgaatttttaccagaaatactaaaataaatttgatttattacatttatactgtacaatttgtttttcttttatatttactgatttcttctctgccacatgttttttttttgtttgtttttatttattttctctcttttctttaggtaattactcttctctcatccactcactctttctcactttttctcaatgaatcactcgactgatttttttttgaaactagtggtggttagccatgtttcataaaaactagggaaatttgaattatcatacttacaaaatcctattattttttcgctaaatacatacttactaaaattagtaatatatgataattttactactttttcaaaactaaccctcccatttgaaatcctaatcccatcttacctctctctctctctctctc

SEQ ID NO: 324990 - DNA, 1503 bp, Cannabis indica
ataagaaggttgaagtgttgtgaaaggtaagagtctattattttttattttgcatatttatataatatagtaaatttatttgtacatcagtgaaaattaaaaataccacattctaattttgatacaaaaggtatgtatgaacactagtaactaatgaccaattacaaccttttactatgaattaaaataggatttactaagaacactagtaattaaataagatatttatctgtaggacctttctctttgaattattatttttggaaaattttctctcaaactaccgaaatgattataaatttctacattttgttacatttcactcactttttaagataacttattaatgtggccacaaaccatatgtataatcacaatctcaaattttataataattacaaaatgaacaaaatgcaaccaaagtgaaaaattacaattatttctaaagttcgaggaaatttttttacaaaaaaaaaataaataaataaatatttattcttaacatgatatgtcctgaataagaatgtaaatagaacaagtcgatctgagtttctaaaatattgtctcatcccctcccattaagattttgttttagattagacccaatccgaaagtataattttttttattttttttgccacaaaactaagacgtatgagaagaatatttgaaaaatcttattaggaaaatccaattccattgagaaacatagttaggcaataaaaaagtaacatgacaagaaaatcttaaaaataagtccatacctattacctaccggttggaccatgatattacaccatgatttaccaatcattaaaatgtgttcttctaagccaagaattgtgaaaatgagtcattaattagtccccattttaacctttaatttggtcactacaacaagctcaactattggtatacacataaataatgccatttataatggacagttggataccaatatataatcttaaaaacttaccatataccatgtgccacataaaaagcaaaacatattttaatttcatttatttcttcctttatttattttattttaaaaggataataaatataaataatttgtgaaacaagcttatttaaatgaataagcagtttaagtctgtgcgcccacttatctcaggaactcaaaaaaaatatattattttaaaattatatatatatttttttgttaattttaaaaaacatcacattttcttctaaataaaagcccaaaattttttatttcaggccgaccctgagtgtcctttcaataaataagaaaatttatcttccttcaagttttgataccctttaatttttttactctactgtagtggaactgacaaaaaaataaaaataaaagtgatcctctgtttgtttagggcacgtcaaaaaagtcaatagagaattaaaattgagtgtaattgaaggtaattacacaattttatgagtttgtctgaccatataattatatgggatcttttcaataatatacttaaaatataa

SEQ ID NO: 324991 - DNA, 531 bp, Cannabis indica
atttttttttattacattttaaaatttattctattccattcctattctcattcttatgttttcattcttcccgaccaaacaccaccttagagttaagatttatgtggtgtttggtggtaaaagttctatttggtgagttttagttaataaaatttcaaattcaaatatttaaaaagtttgagattattttatatcctgaatttagtagtttgtttgtgtgtagttttatgacttgttttgtatcatttatgccactatatatttatgtgctcaatgtaacttgtttggtactataaatggtagtttgccatatataatttttgtttggaattttttctaagaatgatgtgagttagtagtgatatttgttgctctccacgtatatcaaaactaagtttttttttgaaatttttacattaaaaatacaaaatattaattttattacaaaaaaaccactacacggttacccaaacatttatacccttttcttttaattttttacatttgtaccacatgcacacacaataaatg

SEQ ID NO: 324992 - DNA, 520 bp, Cannabis indica
ggaacagatccatcaagtaatatgcttcactcttaatttatttctttgattgacaatattcatttatcttactaccatgttctatgtgtttcatataatgacatctcaacatgatataagcctttatacacttttctaagctccatcatttgaactaaatttttgtttgttcattttgaatgaataaattcagatttaaatgatgatgaaaggaagaaagaactagcattagagatgcttaaaaagtgctctggtctgccattagccatcattgtgctcgccgggcttctatctaggaaacacaccttatatgactgggagctaatgaaaagaaacgtaactcgctgcatagttcaaggtgatcaacaacatgatgttgactcaagatacaacagtattttgtgggtgttaggtttgagttacagtgagttaccatctcacttaaagccttgttttttgtacttggctcgttacgctgaagatgtcacaataagagtaaaagagttatgtcatatactca

SEQ ID NO: 324993 - DNA, 1567 bp, Cannabis indica
taaggcaaaattaactccaaagacaaaatgataattttaccaaaattctcaaaagtgacccaaagtgaattcaacaagtatattaactacttcatacttgataagagcaaaagattcatcaaggaatcaaaaattcaagtctctattcaaaagaggacttcaaacgctcaaagtcaaaagtcaatccaaaagtcaaagtcaaaatcaactctcaagaaaagtcaactttggatcaaaacatgaaaatcaagctaggaagttcatctacatcaagactacacatatcattcactgttgaagtacttgacaataaactggttcgaattttctttctcttcgatttcttgttctgtaggctcaggtaacaagttcaaccccgtcaccaacgcaaactcgacccggctaaatctgcatctcttctttgcgaaataaaagtacacctcatctggcttctcaaatttgatcttgtacatatataactgatggatcaatgcccccgaaaaatttagcgattttctctcaaagaattgtttgaaaggaaattccttcaccttatcccataattagaattcgtcaaattttaccttaatcctcggatagtaataacttttgccacaccaagtgacacgacctgtgtaatgctctaagactggaattataaggcatagtggtcttcaattctagaaaaaagaaacaagaaaatacaactcagaaattctacagcaaaacatcagaccaatatcaggcttatatcgaacacaaaaacatcaagataaattgaaaacgcaatcactatcggttccactatcgaccataatcatcctctaccagacctacatgtatatttggaaatttaaaaacaactattatactatcggacaacaatcttcccctatcaaacccacaatcggacataaagcaatataatacaaaagtacaaatgtgggacacataatcgagcccatcatcggacccactatcgccctgcgtcagaaacacattttataaaaagaataaaacacataattaatcaaactcactatcgaaccttacatcttcctccatcgaacctaagcttatgcagtttagtatcggacctatttcagacctacatcgaactctatcgaacttttatcttcaacctcaattattatctcaaacctgcttgcatcgaacttatatcgagcctatatcagtcagacatgcatcgagcctaagcaaaaacccaagtttttctcgtagtaacatagacacgacccaaaacaaacgctaaatctaatcaaactcacacatcacaaatcaggcattacaaaacaaaaatataccctaaatcaatgaacaattaaatactaaaataaaaaaaataaaaaaaaattaaaagagaaattcaaaacttaccttagacatctttgtggtcgagatttggatagtcacagtggtccaagtcgcgagatcaagttgagacggtaatctggctacgatgggacagtggttgtggctgaagttttgggttgtggtcgagatttgggtagtcatagtggtccaagtcgagagagagagagagaga

SEQ ID NO: 324994 - DNA, 645 bp, Cannabis indica
ttctttgttgcatgaacaattctcccctgagttggatatccgaaccctagtccaagggttccaaggtttactcctccaaactcaatctctagccattttctctctgggaactgatttggtttttgtattgttctgctatgagtctgatctttttgtgttgttgtactgatctgattctaatattctgctttttgttttggtgctactgttggtttatatatgttgtagaagagagcagtgaatcaaagagttagttataaaattcacttaatgacctgtttaggtaaatagaggcctaaagccacatacgttttatttactgccttgttaatttttttgtaactgttctgattttttttttacagtgaatgtggggatttactttcaacaataacattttagaaagctttagattgaaatgaattacatacaaaatatataaataaagagattgtattaacaagtggaagagttttgagaagtccaaagtggccctacttaagtcgctttaaacattttatttagacacataagtagtttttggttagtcaatgtatttaattaatagttgtaaagaaaatggagatggaataataagacatatgcagtttcgtatgtcctacttcttaatattattgactttgg

SEQ ID NO: 324995 - DNA, 749 bp, Cannabis indica
tgcttaattcgtgaagatgatctttgaaatagaagatgatctgctcatttcacgttttactttacatatatggtaaattttcgttctcttgatctagaaagttgaaagttgctgtggtgaagtttgttcgttaaaagagtccttttctgtggtcttaatcatgaagattgtgcttgctggagctgtttctagtcatgaatctgacctttttgaatctttttctggtatcttcatgagcttcatgtgaagacctctctctatgtctggccaaacagttatgggctcataacttttcatagtgtggtccagtccatgccatattttgttccaataagttctcactttttagcccttaaaatatttatatattttcctacaaaaaaaaaaaaccctaaaaatttcgttgccatttttctttttcgaaggaaaaatttggcttggaattgaaataaaatggccaatagataaaaagaatataaaataaaatagctgtgccgttttattggatagcctaaaaataatgcttcaaataaaaatgaaaaataactttatatataataataataacaagtctttacttttggcaaaagtaattacaacatatttataacacgcaaaaaagacaccttgctaatgactgaacaggaaacttacggaactgaccattcggtttgacttcttgttcttattactttttaccaccatcaattattgagagaaataaaataagtaaaaaaaaaaatagattt

SEQ ID NO: 324996 - DNA, 1123 bp, Cannabis indica
atatattatatatatatatatatatataaataaaagatagagctaagtgaatcatattcaaaaaccaggtttaccaagtaacaaataaatacttacaccaattatattatgtgacaattgtgtgttatttttttccaattaaaaaaattatgtattatttctatctctaattttatattacttgttttgtaatttaagggctctccttaggctctatgtagttcgcctctgtgtataatatgatcatggataattttattgtacatcctttaagttatgtttggaagttagattttggtaaagaaaaaaaaaaattgtaggaaaaatgtaagaaaaaaattgtgaagaacaaaaaaataaatcaatttttttaagtttaatatgaaaaattttgttgaattgagtgtttttctatacaatttttcatttcatacaaaatatgagaatttattatattttatttccactttttttttttttatattttctctacatttttttttcctcttcgaaatccaactttcaaacatagccttaaagggtcatagtttagtatatattttatctgtttcgacatctatgagagttttttaatctatttttttcatgatcgtgtatgttgtaattatttaaaaccatatgtaaactttcacattattttgaatggtttacaatgtcgaaaatatgatttaaatattttattatgagcatgactatttttttatacgtacggtaattgtttgaacttttatttcagcattgtaagctatttagaattttataggtggtcctaagaaactacaacttagcaattataaaaaataaacattagactaaaaaactctcataggtaccgaaactaataaaaatgtaccacaaaacaaccatttagaaggtgtagtataaaattgtcttaagattactcattattagttaattttagggaaattaccccacatactatttcttttaactttttttttttcaaatttacggcgtgggtttctaaagtagttgcagcgctagttgcaatagtgatttttatacgatttttgttgcgatttaagttgcagtgttagttgcaataggaatttctaaataaaattccgtaaaaatgcaaaaa

SEQ ID NO: 324997 - DNA, 1607 bp, Cannabis indica
gtaaaaaaaataaccaatactagacagtaataaaaataaaaaataagtaaaaaaaaaactacaatatactgtgttaaatttttcctaaaatataaactttagtaacaacaataaaaaatatagagtttaagtacaacagttaacaataaatacgaaggcatgacacaacagttaacaataaatacgaaggcatgacacgaaagtacaaaagcacaaatataaaaaatatgaattacatccataaatataattttaatatttaattatttatttatatttattgttaaaaaaatatctaagaagatctaaattgctttaaatatatattgcgtgttagtttaatattaacaaaaaaatattaacactaatatatttatgcataaaaaatactaaattaactcaatctaacatatttcaaaaatataaggctacatcctaacgaaaataagtcagcagtgaattgcagatgtatgtcaaaacaagaagtagagtaattgaagcatcagacttttatagaagtaatattcctatttgtgcaaattaagagatctcagccaaagaatgcgaaagattggtggacaaaaatggtagtatagattcgagtatggagctccaagaatctatcgtatatatgaagggagaataacactaattatctcagttttagcgtctatattaattcatacctattaacaataattattcccaaaaagattatgaagagagttaactctatttgtggagcattttttatggacatggttaagcatactatctcggttcaagttgtgtagcttgggagatggtttataagcctaaaaatgaaggagagggttggagctttgaaacataaattggaatactgctactattgggaaatatatttgggttgtagctgaaaaaaaatgacaatagtaaaatgggttcacaatgtctataatggtattcataaaatatccaatccaatccgtgacaatccaatcgaatctgcaaaatgtggatatatatgcacttatacatattgaattttgattgacatataaaaataaacaattcaattcaattaaatccacatatgttatatatattttaaaaatatataccattaatattttaatgtaaaaaataataatttaaaaatctaatatacatgatacaaatatattttaaaacacaatgaattaaatgcatattctatttttatttataaggaaaatataatctaaacaaaattaaatattgttttatacatacaattttttttcttcttcgtttaaatttgttatttttattttatttattttaatttattattggagatataaaataacaataatttattttatttttgtcgttagttatgtggtcaaaaaaatatatttttcataaatattaaatagttcaatattaaaaagtaatcaatctaaaataatcaatccaattcacacttttgcggattggattggattgaatttgagttatatacggattgggttggatctaaaatataaaagggcattttacaaaaatactgcatttagggtaattgttttcaattttactgccacacggcagaattaacatttatactgtcctccctttttttt

SEQ ID NO: 324998 - DNA, 1253 bp, Cannabis indica
tcataactttgatgtcaagcatatattgatcactatcattgagtctatttctgaggctaagtgggagctcaactctatggatgaagcacacaagaaagtaaagaaactgttatacaagaaaagatttttgattgtgttagatagtgtttggacagaaaatcaagaagattgggatatgctaagacaattgttgtttgggattggtattgatggaagcatgattttagttacaacgcgaagcagaaaagttgttgaggcacttgttgtggcacactttttgaaaaggccatattatttgggagaattagctgaggatgcttgttggtcattgtttaagcaccacgcttttgaagtaggtagagatttggaaaaccaagatctatttgctgttggacaagaaattgtgagaaagtgtagtggagtggccttagcagtgaaaactttgggaagtgttatgcggttcaaaagaaacatgagagattgggagtttgtacgagatagtgaactttggaacttggatgaatgcaaacttgggattcttccggctttaaagttaagttactatcacttgcctttgcacctaaaacgatgttttgctctttgctcaatctttcctagaaattatgagtttgagaaagagaggttgatccttttatggatggcagaaggcttaattcagtccaagttaaaagtcccagaggatgttggaaataactacttcactgatctggagtggatgtcttttttccaaaagacaagttttgatgaagataacagatacaagatacatgatatcatttatgatctgttgcaatctgttactggttctgaatacgctatcataggcaacggttttgagactccaactacttttaaacgaatccgtcattcatctgtgttctgcaattttaattcatcccaaattccagaagagttgtatcatgcaagtaatcgtttgcgaacactcttactgtattgtgaaggtaatttggaagtgccacttcataaattgttttcttgtttttcatgtttgtctgtgctgagtgtgagtggatccaatctcgagagtttcaaggctccaactggttccttgtgacatttgacataccttgatttatctcacacccatataaaagagttacctaatgaggtagaagatatacctattagaatatttctaattaaggaaataaaataatattattgattctgtaaatgaattattttatattcattgaatctggacagaatca

SEQ ID NO: 324999 - DNA, 1596 bp, Cannabis indica
tctaggcctactatgaaactctataataattgtgttgaaattattcaaatgcaagaccggatcagtggtcccatcatacaacgagacgtgagagtttttcaatccttgtggaaaggagtattcatgatatctggatggtacggctcaagttcctcatttgagtcgtatccggattgttttcctaattccccaacttgataccttctgaacttattctccaactcatctattcacaattagataggatcctcttgctttggaccaggttgttggaaaataacaggttttttctggttcaagtgctctcgtagatctggttggttatagttactagcggatctcgttctactcacagactgcgtcctacttacggacctcatcctgctcatggacttcctccttgagtgactggcagtcttactagttcccgtgctttctcgatcattatagcgactagtactttctccgcctcgagttgatcgactgtggctccttgagtgccccaaggtcacactcgcttcttcatgccccgttcttcccctttgggcatggtttgttgtgtttcccccattaggatttgttcgagctccttccctacgggtctgggaagaatgctggtggttccttcgttccccaggttgtgtcccaagattttcctcattttcccggggaatttcatattccctagtttatgttaggcccctattctcatttctatgagatggttctggttgatcatttctattttcaaggggaacctcattttccccaaattgttcttcatgagaagttttgaggtttctcctgagcagtttcctgtcttctggttcgtgagccataaggcctacctcgtggtcttctcactccaaggtcaatttgattttgagtattgttccctggtgccgccctagctgcggctgcctcactccaggatttttggccatttccatgctgagtcttcatcgaacgtgttgttcttgtgctgggaccgtcctcgggttgggtcctcctagaacaggtagtccgagtgcttgggccaccctcaggatgggacctcctggagcaagtggtccatttagactgtgaattaaaaggcctcctggagcccattggctcttttctagaacggtgaggagtttcttcatgtggtgtgtcaacgttctttgtgttgtcagccatgaagaacattatttttttctatgtaaggagggttttatctaagctttttcacaaagactctcaatgaaagcaccaaactattaacgcagattttcgttaaccaaatatgagcctaaatgatgataaacttgcaaagaaaaataaaaatattaaagaaaaaagtaagaacacgacggtttttacttggttttgcagtcagaattctgcatagtccacgagtcaatcttattagatttctaatattgttttagggccttttttcttatgacatttttgtcccttttttcagtataacttgcctctatttataattacatagtcaggcagttaattgttaggttttgtaccctaaataaaacccatttcaatataatcagatttacctattaataaagatcagaaataacattttatgtt

SEQ ID NO: 325000 - DNA, 1154 bp, Cannabis indica
taaaatatcctgcaaaattttaagaaatccgtaaaagtttaacacgccgaaaattgcgttcaagcagtgtgttgcacgtgtgactattttattttataaacgtgtaaaatagaatgtttgaacatcattttctatattgtaaattatttctaatttcttaaaattctgtaggataccttaaatagttataacgtacatgaatatgaaaaaaattagactaaaaaatctttttagatgccgaaacaagtagagagtgcatcactacaccccttttaaggaaatgcattgtagaatcaacctatatttttctataaaaaaaacattaataataattaaacatgcaaattttgcgaaaaataaataaataaaaattaaagaaaaatttattttttaaataaaaataataattaacacaaattatattaaataataataattagaaagaaaaattattaaatttcatataataatattttaaagagtaaattactcacgaggtaaatattaagtttaattctcgtataaatatttaattttaatttttgatattaacactaactaacttataattatttttttctctaagtagtgagctaaatcattatttgtcattttttatttgtatttttaaatatatatttttataattttaaatgacttaaactaataaattttaaaagagtaatttgcgacataaatatctaagtttaacactgactttaatgttacctaaccattaaatgttaagtcattatccacgtgtactttttttattggtatatctaaactaatttttttttttaaataaaaaatttaatgactttaactaattttaggtattattatcgccaaaaattaaacttaagtatttatgccacaaattactcattttaaagaatataatttaatcattattattattattaaaaatcaaaattaaaattattagggaaatttacatgatatactaacttttactattttttacttttttactgtgtttttttataagtttcatacactgcagtatactgtgttaagttttcactggtattctactggtgttttactagtgttttactggtgttttgagttattctgcttttgtggttttgctggtgttttataaaacacagtatttttaaaaagatttc

SEQ ID NO: 325001 - DNA, 886 bp, Cannabis indica
gcaagcttaaaaaaggagaagaagatgcaaaatttttgaatgaaaaaatttgcgccgaaacaaaatctaccttgatggatgaagcgcacctgaagaactgatgaagatgaaaatccaagactctcagtcaaggacttgggtgcgggaaacaagaaggaaattatgaaaaatttgattcaaagctctcttatttataggtgagttaaataccttaatcctaatgcagttgggagtataataattttaaagcttaaaagaaaaagataaaaaagaaattatcttctcctattttctttgtaatttcaaaatttctatgaaaatcagaataggaattctaaatttaaaaggcaacaacaattccttatgttattaagattaaggtaaatctagagtttaaaaagaaaaagataaatgataggggtgttcatctgatccaatccgcacatttttagtcaaacaacatccaatccgcactaagtgcggattttatattttggatccaatccgatctgcataacaatttaaatccaatccaatctgcaacagtacgaattagatcgattatttttttttaatgataaattatttaatatttcgtagaaaaaaaattaaaaaaaagactgttatttcttaatctccaataataatctatttccatctctatttatatataaatcaaactaatatacatatatgtcaatatatatgtactcatctttagatttacactaaaatatatatgtattcattactaaaataaataagttaatacatatatttaaatttatgtatataagaataattttttggtgtcttttattataaaataaataaaatacaccaactcaatatattactaaaaaatattaagaaattagaagtttgt

SEQ ID NO: 325002 - DNA, 719 bp, Cannabis indica
taaatttatttgtttggtattttttggtttaggtatcaacttttcaagcacttaaagaaatcttaattagactgttataaattcttaattagattgttttggttggatgaagatgagctcaaggaaatcttaattatactgttataaattcttctcgaagattgttgaattaaagttttttgtttaatttcattcaattttactaatgtggtaattgttcatatactgtattatgtccctaaactttaatatttattaaattgtgtccccgaactttagcatgtactaagttgtgtctcataaactttcatcgactttcgttagtaaatttagacaaaaaatctttgaattcaaaacacataatttaatttatgttaaagtttgaatgaaaaaaatattaataaaatcttaattagcttatcaaatatatatgtgtgcatatatggagcctctagccctctagtgtacgtggttgttcttccaccacccctttcttcatttcattcagcgaaagaaaagaagaaaaaaacttcttcatttttatacattatttttcttttcaataataaataatatatttctttgacaaaaatccaaaataataataattaatacagaacatctcacttaaaaatattctagagacctctttttaaatttgtttgtttgaaaaaaaaaaagattcaaaaatattctttttttaaatctttctttatttt

SEQ ID NO: 325003 - DNA, 827 bp, Cannabis indica
tcactagtaatttaacttattagttaggttgagatgttggcctagtgtgtacaattacatcgacatcacaccaaaaatttataagcttttttgaatgaaaactaagattacgcaatagtacttttatacaagtttagtcatttccaaacaatttccatatatactaactgccctaggattttatggtgacctttttcttaatttcaatgtatgacctaagattaattaactaattttattgtagtatagagattaatggaaatgagtatactactaattatttgtatcacctaaaaaagtaatgttcagttaataaaaaggtaagtaccatttttttataagaatcatcaatatacgatgcagatatttgcaatcggccagtatagagacctttttaaatcaagataactcatcgtttatgctttgtcgagtcatgaattgctgaagtaagcaagttagtcacatagaacaaaactacctctcaaaattaatttaaacaataaaattataagataatcaaatggtacactgaaaaagttaaaacttgtaaccctaaaatactatatgagacttctcaaaacaaacacgtaaatactaaattctaggggtgttcatcaaaccgctcaaactgtccgcaccgcaaaaaaatacggtttgaaattctttgcagtgcggtcgcggtttgaatttttcctaaaccgcgcggtgcggtgcgatttgcggttttgaattattaatatgcggttcaaaccgcaccgcatcgcacattataaaaataccaatttttatatgtttatttaggtccaatatgtgaatgtccaatccaa

SEQ ID NO: 325004 - DNA, 1120 bp, Cannabis indica
gatttcttagttataggtccaaacattcacctcatagacaaactaacttctgatcttaacaagtctttctccctcaaagacttaggacaggtgcattacttccttggagtgaaaatctttagagataaatctagcatgtatctctcacggacaaaatatatcacagatcttcttgtcaagctcaacatggaaggtgcaaaaccctccctaaatccaacaagtttaagcattaaattgtctctcacagaaagtgaaccttttgaagataagacattgtatagaagcaccttgggggcattacaatatctcacccttacaagacctgatgttgccttcatcatcaataaactaagccagttcatccatgccccaactactactcattgggaggcatgtaaaagactaatgagatacttgaaaggcacaattattcatggtcttcacattacaccaattgccagtttaactttggaaagatactctgatgttgactgggcttcgtgtgttgatgaaaaaagaagcacaaggggatatgtcatgtattttgggggtaatttggtctcctagtcagccatgaaatagcaggttgtggcaaggtccaggtttgagagtgaattttgtgcccttgccaatgctgctacagaggttaagtggttggtatctcttctctctgaacttcgtataaccccttctcaatgtccaattatgtgggttgataaccaaagtgttgctgccattacagccaatcttgtgttttatgctcaatccaaacacattgagatcgatttatattttgtgagggatctcatcttatccaagcaactctttgtatgatatgttcctgcatttgataatgttgtagatactctaaccaagccactatctactgaaggattcacctacttaagaaccaaggtgatgtttggtttaatggaatgtaatagtaatggtaatggtaatagtaatgtaatggaataagaatagtaatgagaattgattaagatgtttggtttgttattggaatgaatattagaataaatgatatattgacaaaataatccatactttaatttttatatttatataaaaaaaagggcattagagtcattttagctttact

SEQ ID NO: 325005 - DNA, 1392 bp, Cannabis indica
acacaaattggtaccctgacttaggtgaaccaaaccactacacatctgatatgcacaatctggtgaatgattctaagtacaatagacatgaaaggctctatgtgggtagtggaacaagtttggaaattcagcatactagccatgctttttttaagtctaacacctctgataaaaccctaatccttaaaaacttcttgcatatacttgatattactaagaatcttctctgtgtttctaaatttactcttgacaatttgacaatgatattttctttgagtttcaccctattgtttgttatatcaaggaccatataaccaaagccacaatcctgactgggactctccacaatggcctatatacttttgatccagatcaatttcaagttgtgtcactaaatcaatcattcaactcttgtccagtttccattcttggtgatcaagaaaaatttatctagtcacttctggtacaagcacctctgagcctggtgtcaattcttgtagccattataagaattcacttgtttctctttttgatttgtggcataatagattaggtcacccctcagaaggagttgtgcaaaatgtgatgaactcttgtaatatctcttttagaaataataaaagatttgtttttattttccaagcatgttgtttaggaaaaattcacaaaatgtcctttcctaaggagtctcacactgtgtattttgaacctctgcaattagttgtctctgatctatggggactttctcacacaatttctcataatggatacaaatattacatgtcctttgtaaattctcacactaggttcacatggatttatctactcaaaactaagtctgcaactctttaaacctttcaaaactttaaggcagaaattgagctccaaataggtaaaaatatcaaggtaattcaaactgcatggggagagtatagatctttttcctaacctttaattaaaataagttgggattattcatagacatccttatccaataactcataaatagaatggcttagtggaaagaaaatttaggcaaatagtagaacatggtctaagtttgcttgctcaagcttccatgcccttaaaattttgggacgaagcctttgggtgtgatgtgtatcttcataatattaatagactacctacacatgttttgaatcaaacttctcctattaagatgccttttcacattaaacctgagtatgccaaccttagaacctttggttgtctttgttatcctgacataagaccttataacaaacataaactggagttcttgattatagtttgaatcacaaaggttaaaaatgcttagattcctcaagtaggctatacatttctagagatgtggtgtttgatgaaattaaaatcccctatgtttccaaaaat

SEQ ID NO: 325006 - DNA, 883 bp, Cannabis indica
tccatattcttatatatgactcagtattttatcatttattccatgtgggacagtgtcccacaataatgcccaataagaaaggattgattgtcttggcccagtagtttaatcccaaagatgtattagtttataagcctggaacgtattagtacattatggtccgtattaatactatgtaatatcaaacttgatcttgttagttttgagtacatgtgattaatatttgatcttttatgaaattgtagactatggctgctataacagaagtagtgaaaagcagggcaaagaaaattgatatagaaagaagaaaagggaaaagaaaaagggaagaacataatagggatttggttgattctcctcctcatcttcttgtactctcattaggaacaggtgctgcaaagaatgtggggaaatatgatgttgacacagttaataattggtcagttgttaattggataaacgatcctatttggaatttgtttgggaatccagatcgtccaatccttgaaatattgttagatgcaaatgcagatatggttgatcactacactactatgttttttaattcttctcataatcaggaaaactttcttcgtattcaggtacgtaattttatggagcattgttattaggtctaatatggtgaccaatactatatagatatcacgtgttgcgattggttaattatcagttttttataatatttattatgttaaattgtatgagattcgatattaattttgaccaataacgatatgtcatctcttgtggtgtttggcaccaaaagagcatttttaatggtaacattttttaaaggtgctaaaaatcttaacatcatctaaaaatataatattttattttatctctcttctacattattttt

SEQ ID NO: 325007 - DNA, 1884 bp, Cannabis indica
atagaaataactcagttaaaaataaaaaaatcgatatcacagactaaatatatatcataatatttttttttataataaacaaaatattgatgatatttaaatttatttattaatttaaaaatagtattcaaattaatataatagaagagaataattcagtcgcaccattttttaagttatcaacattaccctcttcaagggtagttatattactaaaggaataacattagaaggttaaaccttcaaaacaaacaaggtgatgtttcacattaccattcccttgctagcattaactcattttaaatagcccttaaatgactttttatgagtgtacaacaaaaacaataaaattacaaaaaaatgtgaaaaaagcataaaattttataacttgtacattttgaaaatatatttacactaaatcatatattttgagcttgttgagttataatattgtattgtattaaataataaataacattatatttggataaaatattgtattatattaattattatgaccataaattttaatacaatgtgaatcatattatttaatattatgctatagttcttccaaataaaaatatctccgcaggttttctgtcttcttggaaagtcagttgtctcccaaaagagctttcctaaaggcctaggtgtccatccggaaggagtcttcaagaaagctagtcttactctgaaaaagacttacagatggctagttgtttcgtcctgaaaagaggtcccagatagttgactccaactgtctctattcctattgaggaagacccttcagaatgtgtttcaattcatagtcccaaaagtggtcgcttcatctaggagcactataacttaagttgggaggagtttgttaagtttggtcataactaacttatacaacttagcacttgtagccatcgacttaattaggatctatatcttgaatctataaataccaccaacacttagcttttttaaagaagaacaaaatttgatgagtttcgagaggtgatcttgagagagaaagattgcgaggtagagagagagaggtacaaagaaaagagagagattgggcttgtgttttgtatgaagaatcttctatggatgaaaaaaaaattgagtaagagtctgagagataaatactttgagagaacctaacagagaatcggtctcgactgtattatagcctgttcttgcttaatcaataaagagaatttcggtggtgttccagaactggagtagagccataaattatgtcgatctataggacttgaacaagtataaattttggtgttgattttattatgctattgctctaatcgtttttggttttagatactttgtttatccatgcttctaatctccagtaattgtgtatgaattattaatcttgtcattattaattgtttgttaattaagttttagttgatttaattctgcattttcccacaaatcaaagcttggtaatcgatcaagaatgtagaatcaagattttttttgctgtgcaattcttgaaaaggcaattaacggtgtcaatggtgagattcaaattggagaagttcgatggaacaaatgacctcgcactatggagagaacgtttgaaagagatcttagtgcactagaaagtctctaaagttcttgaagatgagaagttactggctaagaaaaaaacaaaagagaaagcaaaatggagaagatagcttattacacgatcatcatgtatctgtctaacaatgtgagacgaaagcttatcgcagaaaatacggctaaagggatttggaaaaagcttgaagaattctatatgaagccatcaattgttagcaagattaattttctagaaaggttatatggttttagaataatttcttttctttctttagatgataa

SEQ ID NO: 325008 - DNA, 1157 bp, Cannabis indica
gattttagaaaaaagtaatgattgagacactcaaattgtaattataagtgtaaatacatctcatttgttgtgcaatttgaaagtgaaaatcacacagcttaccttttctgggttatctgtttatgagtctttttcagtactctagagaatgacttgtcatattaacttgttagaaggcgatttagaaaataatctaatctcatttatttgatttcttattgctccccaatatcattttagttattatattaaattatatgggacccgatacttagttggaccaatagcgatattgacacgtagaaggatgctaagcaccactggtgccctttagcatttctctttaagcaattatgtgcttatcatcttcgtagcgatgccatttgctcattattaatgaaaattgctaattattaatgaaaattgctaatttccaataagattataaattccttctaaataaaagtgagattataaagacaagctaatatagtatatttctcagttatatactctgaaaagtgatagctagatactcttattattggatgaaacagaaatgttagttagggaaagaaagatgtgctcacattgtaatgtttgttccgagactatctttgagtattcactattgaagctcaagtatgattctaagcattattaataatggttaatatatgattgacgactactaggcctaggatacacaagtgaataaaattatataaatatgaaatcccaactcaatatttattagtggccaattgtacatgcaagtgtccaaatcaatatcacaaataactcaatctatatcacaatccaatcgagccaatctcctttagtattttttcagtgctttaaatcaaaagttacagacatgaacgaattattgtgaattataatcatgaatcaaaaatagaggtatatcaaaattagttctaacttaaatcacacgtcggaaatttacatggtatactaacttttgttatttttttacaaaaatactatccgacggtattttttatatttttactgtatttcttttataagtttcatactgcagtatactatgtttcactgtttgttctctggtgcttttttagttgttctactgttgttttgagtttgttcttgttttgtgttttactggtgtttta

SEQ ID NO: 325009 - DNA, 901 bp, Cannabis indica
gtctattttgctaatttcaatttgtcaaaagttcattttgacaaattttacccgtcaagacaactaaaactaacctaaaaaaatttcacttcttctcagtcgacggtcgactcccaccgcgcccttccgaccaatctatcttctcagtcgacggtcgactcccaaccacacccttccgaccagtccgtcctctcagtcgacggtcgactctcacccacgcccttgctgccctctctaaccagtccgtctcctcagccaacgacgatccatttaactcgtctcttcagtcgacggccatctcttcagtcgacaatcatcttttcagtcgaaggtcagatgtgaaatatctgttgtgaaataaatgaatagtctctgctttgaatcaataccattaaaactatggttttcttttctgataactatctgcatctttaaaaatctcaatagaatttgcattgaaatttttttacttcttttctttttgctacttcttacaattttttattgttggcagaaactgaagtcagattttagatccatgggactagtctcttttcaagttaatagctaaataacaaatattatatttatatatcatgtttagttgaatttttatatatttatataatcatgatatatatatggtcatgtttattaggatttttttgtatgtatacgcatatatatacacgcactgtttgtgggtttatctattgcgatatatatattttagtttctgcaattatttatgggttctgcttccgtattcaagaattaaaattgttaagtggaaagtctcgaagaatgtaacatcgtttataaattatacttgtttgtattaatatcataattgagtataattgagtctaatgtcatgatatttttttacatatatatatat

SEQ ID NO: 325010 - DNA, 2028 bp, Cannabis indica
gggcataaaacccaacaggaccgactatctctacttcagccagcttagtcacgaatggctaggtgacaccaactgcaagaccatgtcaaaagttggcaagtatgccaaaaaaaatactttatggcacaaggctttcgtggaattgtgcaccatgagtttcagttggtgtctctcttcagatgttctatccctaccttggaaataagggatagaacgaatcacatcctttctttgttaggtgaagagagaaatattatccggttgaccagtgtggacaaattccagatgcatggcctgtatccccctgctccttgggttgtaagagtgccagttgctggtgcggccagccctagagatgggcaaggccctgacttggacaatgaagaagaacctttgtcccatattgtgtagaatttggagagaagagagagatatctccataggcgcctgtcccgtgggggtcaagttggttatgcctctcttgcctacgtctagcggcaaggacaaagctgtagttgtgagctctgataactcttcctctaatgatgatggtatttgatagtttataacaccatgcttttattcttgtgctaaatatttttgaatgcattctcactttgctactttctttttgtaggcttgtcttccagaatgagaggtctcgcacgtgggcctttagatgagcccaccagccaagtgagggccaaggtgaccatgacctctcgctgtgctaatcctggtagaccatcactacatctccctccccctaggcctgcacctgctaggcaagctgtagttcagcctgccgaccagggtacgaggagccccaccagagcagcggggttagcttctggtagaaaggctgctgagtcagccactcgacgtatagagagggatattcctttcttggatgaggtattgccggatttgggtgatggtgtgcctaactggctgtactctgccggattttgggacctttctctagtgatatatgctttcagctttgttcatctttttggcactgtataagctgcccgacaatggtgttatttgcatgtggttggccaaccttgagcatccatacaagggtctagctggccatggcaatccaaagaggggactgggcggccagaattgactgtttgatattgacattgtttcgctttgttttcaggccttgatgaagctgagttcggcttgcgacgaatctagagggtcttcagacacttttcaggagcgtatgaaggtcttggaagtatctgttgccataaaggacaaagtcaatgccgagctggaggtccttctaatagagaagcagagaatggtctctgatttagagactatgctaagtgccaagaacaccgagaacactaaccaagttgctctcatctctaggttgcaaactgatcttgaggaacacaagaagaaattacaggaggctcttgatggctagcaggccattaatgaatattaccttgatttgtcctctaaactcacttacgtgttttgcctgacatgggcagtctgaccttcgtggagagaacactggcccatgggagggcattgttcaagagccggatggagacagagtagactgcttatcaagaggggtcatcatcacgtaactgtgacgaggtgatggccgacccaccagtggaggaggtggccagccaggatgttgcccaccaggccggccaacacaatgatgatggggctgacctggactctgtagttcttgacttggcggctccaacttcagctcctgctacccctgcacacatgtaaatggaatttttattagtattcagcattatgtttgtattgtatagactctgtttttatgttctgcatagcctgtggcttttttagggcacatggcatcttagcttaggaacattactcattttacatttcacgtggtctgtgacctttttgaaattgtatgtcctatatggcctggagccttttcagaacattattttcatgtcctatgtggcctgaggcctttttagaacattattttatttt

SEQ ID NO: 325011 - DNA, 945 bp, Cannabis indica
tagttattgagatattctttaaaatattttaagttgaaaatttgtaaattttggatcaacttaaatagggatatttttttctaattgaagtgattagttcaagatacttaatttgatatttaatttaattttggaaaattatttaagttgaaaattttgttattttagaacaacttaagttgatcgaaaattaattttagactttaatttaatttccaaacaataattttgaaaatctatttataattgaatataaaatgttgaaattatatcaaaatatagtaaattaaattcctatttaattggcttacatttttacttcctatgttaaaatatataatagagtttcaatagaaatcatgtaatttttacttcctatgttactcttgaaatatctatatattaggaatgtcttccctatttaattggcttacattttcaaaatattagtaaataaacatgcatcattgcaatattattatttaatattactcttgaaaatttactttaatatactagcaagtttaattatgtttattcaataggatttttagcaccaatatgcaagccaaattggttgattgatattaatactgggcttgtggtactgtaatgcttatatacctttgatggctgttgaaaataccatactagaaggtgttatataaccctcacttatgaatttgttactgcctaataaatacttactaatttttttggtaactaattcaagttatttaatggtaatagtctcaatattatttttgcttttttaattaaattatgacaatatttattgtaatatttttttttaaaaaaaaattaacaaacatttatatatgtaagtatatcttcttatatattataagtctcctaatcacgtcctgcttgattctcttatataccctcagttttttaatttttcattacccttaattgtctttt

SEQ ID NO: 325012 - DNA, 577 bp, Cannabis indica
tttttgttgtttttgtgcatttgtgaaaataactctataaaaatcccttttaatgcaggccctggcccaatatattttaagttatccataaatgtgggcaaggcaaccatatgcataacgttcgcttgtgttaaagcccctctgcctctgggcccatccacagtacatgatcactacatcacatttgtttcagagaattattacacatatacactactaaatgtaaataatactaaatttgttagagaaaatttaatatatccaaatacaataataattattataaataactaatttaatttatgtaataaaaaaattactttccttaaataacttctcaccaaaacttttataagattttcttataatttttttctttattaatcaaatttagttatcaattttataataagcattttgttgaatagtgtgactacttaaaatgaaaagaggaattactccatatattgttttttaatttttttttttttcaaatttacggtttgggtttctaaagtggttgcaacattaattgcaataaagatttcaatacaattttttattgcagtttaggttg

SEQ ID NO: 325013 - DNA, 2078 bp, Cannabis indica
ggaccaaatcctgtccctatattcatattaatataattcagtttataaactgaaaagcttccattttctctaattggatttttatgtgagtgtgtgatcatagtgaacataatagtgagtgtgtgtgatcaagatcaacagagacattggcactaataggttcgaaattagtatctttgtttaaaagtttagtcattagatgcgaaataaaatgagatagtaatgaaagtgacgtcatgcaatacattattatctatttttgtttaagccactaaatcatattttatccaaatcggattcaaaattgagatagctagctagcctagcctagcctagccatactcttgtgaaagtagcaataattctctaattttgtagcagctgcacgtgattttcaaaaagcctaccaatcattatttactattattaattattattttttctcaaagagtttaacaaaaattactatctcaatgatattttaaaaactttatattaaatttagtataaaatataatattatctcaaatttaattcataattaatattattattttatttattataatattactaattattataattaattgatttttattaaacttaacattctttatttatcatataattattatttaaataaataaaaataattatttttgtatatttttttaaaatattaaatatctattattataattaattatttatttaacttattttacatattgtgcattggatcatgtaatagttaaatataatacaaatttattcttttaaactaaatttagcacaaattttaaatcttgcattagacatagtctaaacttaagcttagagctcaccgagtctaacaaaaatatatttttttataatatatatttcacgatttttaaaaataatattacacttttttaaataaaaggcttaatatttttttttttcctaaaacctaactaatctcagggtcagtcatgagctcatgtttagtttggttaaatctgagtgttataaattaattattttggtttgattttaaaaatttagtagtgtttctacattattacatttttcaggttttatgtgtgtatgtatatatagaagttaaataaagtcacgtgttttgtcacgtataaactatattgtggacttataacaataataggctatataattatttaagtgtttatttagtagacatattagattatattttattgtatattattttattaaattatgttacatatcatattttaataatattatatgtgttaaatttgatgtacttaaatttaattttgtacatttatatgtacgtacaatttttttttttttttttataacaatatgtacatatacaagttaatatttatatgtatataaggtgaatactaaatataaattttagtgttgatttagaagaaaaaatactaaaatacctatttcactatatcaaaatataatacattatacatcagtttaatatattattatacaatacatgttactactttaataaatgaaaaggaaattaccttatatactatttatttaacgtttttttttttttaaatttacggtttgggtttctaaagtggttgcagcgctagttgcaataggggtttctatacgattttttgttgcaatttaggttgcatagctagttgcaataggggtttttatgtagaatttcgtaaaaatgcaaaaaaaaaaaaaaacttaattggaaatgtaaaaataaaatctttaaatatatatataatattattattagtataatttataagtatcggatctctcaaataattaattaaatataatatttttttatagaatattactaaccactcttaaaacaccgcttcgtagcaatactaaacttttatataacaaactaaaaatgacttattaaaaattaacaataaaagggtacattctttttatattaagaacaaatgttttgaataattaatttttaaaacaagaagcatgcatgatgacctacttatttataatatatataattttatattaaatatgcatggttatttaatgaaaattgttggtttaac

SEQ ID NO: 325014 - DNA, 930 bp, Cannabis indica
aaaaaaaaaaaactaccatttaaggggtctactacagaaatttcttaagctttattagtttatttcttttttaacattttaaagttaccaccacaagaaggaaaaaaaaaaaaagaacaactctctttgagtatttttaatgaaaatacaaagaaataatcaaagttaaaatatatatagttgacttaatgaaaaatattctcaataccattatatatatatatatatatatttttaataaaattattaaattttgggtttgtgaataggaacacaatacccaaaattaatgtaaatatatcttacagttttttttttaaaattatatagcatataagttttacattttttactggaaattaatgtttagagtatgagtaaaaaataataccattaattaagaattttcttatatttcatattctaattaacatataatgatatatgtagttgttttaatgtcatcatcacttatatgaacaattaattttattttgttagctagaatgtaaacaatcaattaattagtaattaaaataataaaatgaggtggtgtttggtttgttagaaaggaatggtaagtgtaatggtaatagtatgtagtggaataaaaattgtaataggaaatgattgttatgtttggttgttgaaattaatattgaaatatatagtaaattgacaaaattatatagaattgttgggcacggtcatacctattgccctttaatttattattattaatatttatttatttatttatttatttttaatctttttttagtagattgttttattcttatcatattttatgaagtatgtcttcttcaatcaaagtattattgtaatatttaagtatcagtagtcatactagggtgattctacaatgcacccctttaaaatagatgtattgatgcacccttaacttatttc

SEQ ID NO: 325015 - DNA, 578 bp, Cannabis indica
caatcttcaatctgtaattattattatgaaatatttcaattcaaattcaaattctaaatattttaatttatatttaaaatctaatatatatatatatttataattaattttttaataataatataaattgatatttatccaaaaatatcttaatatatttatcatctaaatataaatttaattattttttaataatccactaaactatttattctacaaaaaatcatctatatatattttttaccaactaacacgtagtccttttatttaattacggtagaatctaaaatattgtactaattaaattagacggaataattagagttttttttttttttgaataattagagttttaatattttgtagtcaatataagttattggtttatagtttagcactttaaactataaaactataaatatatatttgacgagatacggtatgatgagtttttaatagggaaatttatactctgatttttcccattttattacatttatactgtgccacgctggaaacaacatttatactttttttttttttttggcagtttactgccttttaaactttagccgtgt

SEQ ID NO: 325016 - DNA, 820 bp, Cannabis indica
gacaaatttcacaagacatataccatatgtgaagcaaaactcacaattttaaaaaatggaaaatattaattttttgctcaaaaaagtgagatatcaaaaagcatacatttactatagaaaatagaaagaataataaaataacataaaaataaataatcaagtgtttgtaaaaataatgaatttaattctgtgtgagaaaagtattagctttccaccgtagtctcatgtatttattggtatcttacatcttcatcggtgtcatatcactattgctaatttggtataagtaaatattaaatctcatatagtttaagaaaataacttttaagtaaaatttctaaccaattatgaggcgccacccataaaacatgatagacactattagtgtccattaataatactttaaattatataactcaataatgtgtctccaacgtacaaaaccaaatttcattagctcatgtgttgttttctcataaactaaagaagaccccactcatgacatcttttccaaagcccctataaaagaattgtctaaaaattataatactataacttatagtacaaataaacaatagttatgtcattagcattcttctaaaaatgaagtttgaagaataaaaagtaaaacaagtattattttaatattattaaaattacagttatattattttaaataaattatatattattttttctaaagaataaaaaagatatctattagagataaaacctctcatttactggtatgtgaaataaagcaaaattccaaaaagtgtattcaatagggttatagtgaggtttatgttgggttttatgc

SEQ ID NO: 325017 - DNA, 921 bp, Cannabis indica
atatatatatatataaattctactattatatattaaaagtttgttgtaacttagtagtgtgccaacataatatttaatgttatttcttaatcatagaacacactttaatttttttatttggcaattgaatttttttatacattaactatagaaagacaaaaattaacagtggatctacttatttggtttctacataaaaaacaaaaaataaatttttaaaaaactatgatttatcaaaaatctaattttaccttaaaacaaataaaacaaaattgctgcaatgtcttttacatgaattttcttttacggtgaaatgttaaggctatttttcataaacaatagaaaaattattgaataaaatactgaacattaaactataacgagaaaatatttttgttaaatatttatttattgtatataataataaagtttttttttttgagaaattatcttatatattaatttttaatttttttatttttaaatttatggttttaggttgctctagtaatttttatataggttattgtatggattttagttgcaatttaagttattccgttagttactttatgagtttctatatgaatttctgtagaaatacaaataaaaaactacatacaagtataaaaattaaaaattctattttttttagatttaatcacacaaagtagtctttatttaattactaaaattttatcatagagttaatacttggtagctacttaataaattttattttgtggtacatgttgcttaaacatttttagaataataattgtgacacatttaaattttacaaattattatatacaatttattttaattatacaattaaaatagatgtacttaattatctatgattaaaattaaggacaaaatagttttttaccccaaattatagaacttataaactcttac

SEQ ID NO: 325018 - DNA, 661 bp, Cannabis indica
ctttctaatctgatctgaccgaattaaatacaataaattacccaattaagattagtatttttttttattaaatttcatgcatttattgataatacaaatattgcatgagtacagctcactgatacaaaggattataagtagaaaatcaccaaatctgtgattttatttctttaattattgtcaacttttacagaaagttataattatttttcttttttctacactatgtatatgtatcataataaggggaaaattctatgtaaatttactcaaaaatatgtatacatagaaagatatctatcactttacaaaaaaaataaacatatatcactcatatataagagataaaataatatctctactgaatatcttgttctcactaataataatgataaaaaaatggattatcttatatatgatttttttattttttttagataataataatagtatttctcaaaaaacaaaaatagtaataatagtatttctaattattttatttttttacatatacattttacatctctcagtgtttcagtttagtttgataaaaaaaaatacagaaattactcattgactcaaaaatgaaatagagaaaaaaaaagtgatgcattaatctttcttatttttaaattagggaactaagccgcgctttgcgcgg

SEQ ID NO: 325019 - DNA, 1663 bp, Cannabis indica
ctaaggaaagaactggaattcagtttgcaagagtcttgtagagatggacatagctgataatcctcctcggtttattcagtatctcaatgagtatgggcaattggtcgagtaagaagttgactatgagtggctcctcgtcaaatgtaaaacatgttcgggttatggccatcttatggtggatgtcaaaaagttgagaagagtcaagagggtaaggagatgaaacaaaggaaggaggttacagggactattaggaaagaaaaggaagttcctattgctattgtgtagcaggtaggaaaaccagtggaaaaatcagcagcttcggttgctgtgcggaacaaaaaagaagtgaaggataaatggattaccccgaagaaaatagcacacaagcagagagaattgggtggttcagatcttcaggtggataaaaacagtcacaacctgttcgacatccttgatgttcagacagaaaatttggaatgtgagagggtgaaatagtttgaataaacaggttgatgtttttaaatttttgtaatatgaataaaggtggtgttggagcttttttggagactaaaatgaaggggaacaaaataaaaggcatggtgaaaatgaggtttcaaaactgggattactattccatctgagttactgaaggcggaatttcagttgtgtggaggagtaaatttgctcgagttatagtgaccaaggagacaagtcaatttgttcactattatgtcaaagtggcaggttttcctactgctattagtgtcacatttgtttatggcctgaatacaatagaagaaaggaaagtaatgtggtattatcttgctgggctgactttgccaactaagtcgtggcttatgcttggcgatttcaattttgtctttcatattgattatagacaaggtgggaactcggtttcttctggagatcttttagactccaataactggttatctctccagttaatggatactttgaaaagttcaggttcatcttatacctggaccaataagtaggaaggagggaagagaatttattcgaagattgatcatatttttgctaacgaatactgggttgatctttttcttaatttggctgctctgtttaaattggatactctgtctgaacattgttcttgtttggtgtctaacaggaagcttgaaaacattggttacaaaccatttcggtattataacttctggtctgagcatgctgagttgaagaatgttgtcacagttggagtaagccttgttcaagcatgagtttacatggtatttttctgaaaatgatgagactaaaacacagattgaatagatttaataacgagatttttggtgatattgggaagtcctatcttttggcaaaggagacataccgtgaggctttattcgtagctcaagccaaccctgggaatttttcttttcaagaagctgaaaaaaaggcagcagagatctttgaactcaaggtaaaatgtatcatagcttccttagacaatgtagtaaaatcacttggcttaggaaaggcaatgataataatgcctattttcatgcttttcttaagaaaggaagatgaataatgaattgttcttttgttaataaggaaggaatgtgggtttgtgccctaaataaacccatttcaatatagtcagatttacttattaata

SEQ ID NO: 325020 - DNA, 716 bp, Cannabis indica
taattttaatatatatatattatatagacaagaaaaaaaaaggcaatgttagaaaataaaagaaagtgttgtattgtttgtacatatgaatatgataccttcaatgatacaagaccgtatatgttgatacgagcattttgggattcacggctccatacatagacgatcataaaaactagtgagcctcccataaatggggatgataatattggaataatagccatcacctgattattaattggttatcgtaatttctcatattaaatcactttattcattgccacaaaataatgagactgtaaaatattgtcattttttttccttaccaaaagtgacaatgctccaaaaataaacatccatacaaagtctgctgttctcttgtcaaaagttcccttctctagggacacaccatatctagctctatatgcaaatcaagaatcaaagcacacaaagtcattgaaatatgagagtatttcactttatttatttaagcccaagttcataaataccattttttaatttacatatctttattatgacaaaggctattatcaaaatagtgataaaagatatagtagcgcttggccctcttacattattattagatcaaaagcaaatggaactgaaaagggccccagaaagaagaaattggtaacaagcctccacacctgcaattcgcataaataattttttcaatatatatatataaataaatt

SEQ ID NO: 325021 - DNA, 1668 bp, Cannabis indica
aatgttatggtggcttttgaagtaatacattacttaaaaaggaaaactaatggaagaaaaggttacatggcgcttaagctagacatgagaaaagcctacgaccgagttgagtggaggttcttggaagctgtctttcgagtgatgggatttagtgaacgatggattggattaatgatgggttgtgttaactcagtttgctatcatgtcataaatagtggtttgaaaatggggccaatcattcctacaagaggcattcggcaaggttgccctttgtctccttacctttttattgtgtgtgccgaaaggtctgtcatccttgattaaacattatgaagccaaccgtctcatcacgcggtgtaaggttgctaggagtgcacctactatctcccatttgctttttgcagatgatagttatgtgtattgccaagcatcggaggaagaagcaaattgtgttctctcgctattatatatttttgaaggagcttcaggccaaaaagtcaatcttcataaatcatcgactttctttagttctaactccaggatggatattaggagtcagatttgtggtttgatgcacattcaagaagcggaggttgatagcatgtacttggggcttccaagcattgttggtcgcaacaaaaacgcagtgttgggatttcttaaagagagaatgaggaagagaataaatagctgggagggtaaatttctttctcgggctgggaaataagtgcttatcaagtctgtggttcaatcgctcccgtcatatgccatgaatgtcttcctttttccaatcggtacatgcaaagaaatagagaggatgatggcaagcttctggtggaaatccaataaatctaatcgtaatgggagtggcattgtttggatgaattgggatagaatgactaaacacaaagctgaaggcggaatggggtttcaaaatctaagggactttaatcttgcaatgctgggaaaacaaggttggagactcttatttagacatgaatctttagctagtaaagtctttaaagctagatattacccgaatggtaattacttgtctgctgagttggggtcaaacccgagctttatttggagtagtatctatgctgcaaaggacactgttaaactcggtctaaggaaacgaattgggtctggtttgactgtgcagattacatcagatccgtggcttcctgtcatggatagaatctctccttctctgattgttcctggtcttgaaaacttcactgtgaacagcttgtttcaagtaggacaacaaagatgggatgctgatgttgtgtgtgatttattttccccaaccgacactactatcatacttggtatccctatttcacaatcaagtggggctgacacttggtactagctcgatgagaagaagggattttattctgtgcatacaagttgcttcaagatcaaaagtatcattcggacaaccccgagggacatactttttggaaaaaactgtgggcacttaaggtgccgcctaagacaaaggatctggtgtggagggcggcatccaattgtcttgcaaccaaggtgaatctttgcatcaaaaaggtcttggttgataacacttgtcctatgtgtggtgtatttgctgaaacggaagtgcatcccttagtttcatgtcagtttgcttggtcgtgttgggag

SEQ ID NO: 325022 - DNA, 1200 bp, Cannabis indica
aataataattcatctaataagtaactaaaaaatgagtgtacaaatgtgcactcatcacaagctcatcataatgttataacattactatgaaaaacttggaggacaaataccatccctaaaaaaccttacataactatgcacaaattttattcaagatatcagggaaggtgctcgagacaatattttcataaacttcatgaagacactccgggagcatcaccataggcaaggctaaccctatgtcaccacgggcagggccaaccctccatgtccatagacactaccgtgatgagtcatggggccgaccctctatgacgagcggccctccgtgaaaattcatagggtcgactgtccatgacaagtgacagggccaaccttggtgttttgtactcataactcaatacactcgtgaatgcgacaaggggtaactacacttatggtccactcatgtgttaccaaggctacttacggaatattctaaaagcatctccaaaattaataatctattaaaatatttattttgaatattagtttattattatttaaatttaaatttagcttaatcatagttaagtgagatgtgtatctggttaagttaaccataagccacacgttcatgtaaacctataaataggtcattcaatcacttttaaaacaatttttgaaaaatactcacttgagaatagaattcttgaaaactatctttgggtattgagatcataaaactacaagggaattagtccattattgtcgaaaggaggtaaaccattataaaatttggtatttatcattgttaattctattcagtttattgtgatttatatttcttgtattcatcctatttgtttatgattttttgagatttgttgacgaaaaaaaacgttaattttttttttgtcgtttgtatgttatttttttcttatgttatatgtatgttgtcttttattgtttttataaaactacctataattaaagtttaaaaaataaaaataattgtataatttaaaaaaaaaagtaaaaatgtgagaaaagagtaattactattttagatcttgtgttttgtaaaagttaataatttgaccttctattttgttaattgataaagtgaaccctgtatttttttaaaattgtacaaataggatcttgaactaatttttgtcaaaataaaacttaataataatctgatctaaagatgttatg

SEQ ID NO: 325023 - DNA, 1149 bp, Cannabis indica
cttcatgttcagcttcattgttggaggcacagaaactgaaccgcagggcattgtggagttggagcccttatggagagatcaaaatgatccctactccaactcttttctcgtttaacgctctatcaacatagaccttccagatgggcaattccaagactacctcttctgggtggtcattcatgctggaatctactatgaaattagcaagggcttggcctttgattgacacccgcggctgatactgaatgtcaaagtggctaagttccatagaccattttaatagcctgccagaggactccggcatctgaagtactgggcggaggggatggtttgttagtacttttatggcgtgagcttggaagtatggtctcaacttttgagacgcaattagtaagacaaaaatgttagtttctcaatcattgggtatcttgattctgcacctagtaatcttttgcttacgtagtagaccgagtattggacctttctttcctttcgcacgagtgcaaaacttatagcatgatcagacatgccaagtacatgtataaatcctccccctccacaggctttgacaaaagtagagttttggtcaaatgctccttcaacttttggaaaaattctttgcaccttttggcccatttaaattttttgttgcctcgtagcacgttaaagaacaggatacacttgtttgttaattttgaaatgaacctattgagtgcagcaattcaaccagtaacactttgaacatccttaagtttcttgggagaaggcatgtcaaggaagccttgattttctcttgattagcctcaattctatgagagctaacaatgaaacctaggaacttcttagaggaaatccccgaaggtacatttttggagtttagcttcatctcgtactttcttataaatgcaaagacttcttcaagatcaaggccatgctccttggaggtattggtcttaactaacatatcatctacataaacctccatgtttctccctagttggttcttgaacattcggtggaccatccgttgataagtggctccaacattttttagcccaaacagcatgtaacaccctaactaacataggcgtattacgtgatttttaaacatgttgtgcagctcgtcgctaatcaacgaggtttatggaa

SEQ ID NO: 325024 - DNA, 996 bp, Cannabis indica
tatataactgttaacatagattactttttataaataattatgtaccttcttaaacaataccatgtcaatattatattttgatatagtattttattttattttacaaaagtgttaaaatatataacacttcaataaagatgttattttaattaaatattactctaagttaacttatgtgaagagaaaaattatctattacatggagataaaagagtttaaattcattttgtattaaaatttaaataatatttattttaaattttcgtagagaaaaagctacatttcaaatttcagcctaagtctctcaacactttgagacgactctgattgaatttgtctatattaagagttaagacttatgcttattaggttagattggatttgtgttgtgttgttatattttcattatggtgtcattggactaaattaactaatgattactatgaatgttagatttttattttattactatgagaattaggttttaaattatatatttatgtatatcttattttatgaaattgatcagcctaatgatggctaaaaaagattggatggttccaattcaatctgatagaaaatcagttaatatatctaatgattggaacctaaccaatctaatgcatccatttgatcgaatcagatcggttggctcaatttgatagtattggaccgaatgagaaaatccaacatccaataaataattagattagattggttgggttaggttaggttggctctaaatccattagatgtgatccaatcaagagcacccctaacccaaacaacatacatataacaagaaaataatataagattacaaaaaaatcgtatttttataattttttttttaacttttgttaggtattataacaatatcccttttttgaaggggtaagttgaaaaacaccacttttattaatcagttaatcaaatttacctctagttttatatttaattgaaacatacctatttttatatgtattgtacccaaaa

SEQ ID NO: 325025 - DNA, 1816 bp, Cannabis indica
aaccaacacaacaacaaaaagaaactattttcaatgggatcattaattaataatttaattgtgatctcctttcgaaaaggaaaagaaaaaatttgttatcatacatgtcaaaaaacaacactttaataatttgaataacatgtcacattattattacgaggaaggttattggacactagtggtatctagtactttttatacgtagcgttctataattggttagcaatattctctaaaagttattttcttaaattgtataaaacctaatattttttttgataagtataaaacctaatattttattacaccaataacagtatgacgaaaaacttacaaaaatattgaaattcgggttaactttttcaaaaaataccgtcacactgaatttttttaaaaaatactgtggttttataaaacaccaatagaacacaaaatagaacaactaaacataacagtagaacaactaaaaaagatcagtagaacaacagtgaaaacttaacacagtacgcaatataaaacttacagatattatagcactatttacactatacatcgaaaagtgtggcatcattatcaagtttctttttttcttttcttttctttttctgaaaaaattactacatcacgtattaagaactattagttacaaaatatttatatatatgaaatttcctgagagaaataagtcacacgtcattgtcttcaattaataattaagccaataatttcaggctaataattccacaaaggaccaccgatagagtagatatactttatggaacttattggaacaaaacacattgtgttataaatttctcaaatgtgagatttctagaaacaaaacaacacggatttataaatattctggtcaagaccaggtaatccacaacaataaattttacaaaaatcatcatataatatgtcacactaacaaaatatgccacaattatatgataaaatatatgaaagtttacatcaaatacctttaattgaatctaatttgcaaattttatttttagtttttagtttttctttcccacgtttttagttgtttacctaaagttttagcacactttcattctctctttttaatatttttctctctccttttcgtaactttaaaataatttctagttacgccgttactcaattgactctaaaaaaatagcattatgatttactcttcaatcaaaacatttcaagatgtatataggaagcaatcactactacaaaacaagtctttagaagtgcttttttcagcttaataattaataaccgacgtcataaggttgaaattttttagaaggaaatttgacgccacttttagcgtcggttatttccaaataacagacatcatagggtgtgccccctatagcgttagttatttccaattaatcgacgccaaaagggtttataaccctagcccatcccttcgtcttcctcattcgatcaaccaacctagaaaccccaaactagagaaatcccaaaccctctacgccaaccaccacggaaaatcacccccatttcacaattttttcaccattttagctcatttttatttttaaatcttctatttttcatacctaaaactatatacctaaaaaaatcatatttttcctcattttttaaggtaaaccaaaagtaaaggtagtggttgtagttgttattcctccagccaccgtttttagtggagaaaatattgtatctcaacgtctattaaggtataaatttaatttctactaattttaataatgtacattgctttatttttattttatattttttttaagatttttctatattattaaatatgtat

SEQ ID NO: 325026 - DNA, 1295 bp, Cannabis indica
ctcggacagaggagaatttggaggagtcgtgggacctgcaacacaaggggttagatcatttgaaaaatcagtagcatcatcatcattaatatcctgaaaactgggagaagagatgaagggaagccaatggtgatagtgtataatgggtggggaggtagtggagttgtcattgagctgtccaaaaccggtggcaaaagggaattctaattcattaaatgagacactatgagctatatataacctaccatttggatgaagacacttgtaccccttatgatttggactatatccaagaaaaacacatttagtggatctaaaatctaacttgtggttgttgtaggcacgtaaatgtgggaagcaagcactaccaaagactttgagaaatttgagatttggagtgactttgaacagtttttctatgggagattggtgtgctaaagttggtgtggatagatggttgatgagaaaagtggctgtgctaaatgcatcccaccaatatctcaatggcatggatgcttgagataatagagtgaggcccatttctataatgtgttggtgtttcctttcggatttaccattttgagcatgagtgtgtgggcaaggatgtcggaagtgcactccaattgactcaaagaatggtgctaaattgcggtattctcctccccaatccgattggagagttttgattttggcatcaaattttctttctacaaatttttggaagttaagaaatgtgtttttgacatctgattttaacttgagagggaatatccaagtgaagttgctatagtcatctatgaagtgcacatagtatctatagccttccttggataatatgggagaaggtccccatacatcggtgtgtataagctcaattggtgattgtgatttagtatgtgaagtgctgtaatgtttatattttgactggcctatgtgacatgcattgcagaaggggttgtgtttttgaaagaaactttttcattaaccaacatgtgctttaatacattgacattgggatgaccaagacgcatgtgccacacattggcatcagaattaaagctagactcagcaaacaaagataaacagctacgggaatgactcgactgtggaagtttggcagtatttctgctcttggaggaaacagtaaagctagagatggagttgacatgtacttttgatgatgatgttgctggaagtttcaattgatatagtccattgttaagcaccccccgaagcacctcctcattcgtgattaggtccttcacaacacaaaaatcagcataaaattccacata

SEQ ID NO: 325027 - DNA, 921 bp, Cannabis indica
atgcaaaagagagagatatcttaaatcagcatgaaaaaaattgctgatttttcttaattattaacaaaatcataagctaacagagatatgaaaccactgttatgtacatatatcaagaacagagaacggtagatattgaaacaaactatggatctgttataagaagaagaagaaaagaagaaaacccatcatagattttcaatcaaagacagcaaaaaagtgatgatgaatttgaagagagagagagagaggtgttcatctgacaactcagaagaatggtaagaattgaggagagagcttaagaaaagagagagcccagaaagaaagagtcttttttgttagttgcagacagtagtagtcccaaggacgaccctaatagaggttttaagcgcttaaatacatcttcaattaagggtgtgctaatctcatactcctaactagttggtatatataccaccatgattaaatcttaaccgttcattgctacaaacttgttcgacctataatggagtactattattaagattttattactatatagccaccttaatgtcaacaagaggtggctcctcctacaatttgttatgaatggtttccaactccaataaatttcgaacaaattatttgagagaactaaataaattagtgttagtaatttgattaattcagactctttataatttttttagttttggttttgagctttaaaattcttcatgtattgtagctacctacttgttatgatgctagagagaatattaatattgtttagaaaatatttgtttttagttatctttgtgtgttataaatttgaaatttttacatgaaaaatcacttttgcacaatttattacctaaatactcctacacgcctatatcttacttttttacttactaaagtttgttttattacacaaatacc

SEQ ID NO: 325028 - DNA, 632 bp, Cannabis indica
acctatttttcaacttccgagtctgaaaaacatgcctgaatatttttttttttaaattttttctcataattatgtttattatagttacaatattggactttgtaaattcttttaaaaaattgagtagtttacagtattgacaaaatgttcctgatattccagtttatattccaaaaacttaaaacttattatactattcgaaaattttcaaaaatttacaaaaataatgttataactatatcaaacataatcataaaaaaatagatagaaaaaatataactcctcagtgctactctcaaccttttattttgatatctttcttaacctctaagtaattgtaattaagaaacatacatagatagttaaaaacttcttgacaaaaagtgaaaatatggttgttctgttcttaattagtgctattgagtattgagaaatagttgtgttgtgcttactatacagcccatgcagaaagagccacatagagcaaccaaagtgctgaaaacaactccaagagttggtgatgatgatggtgatgaggagccatttcttgaagtaatttcattctcatttcttggcaatggctcatcatcataattggacccttttagtaatccttcttccatggtttattt

SEQ ID NO: 325029 - DNA, 1309 bp, Cannabis indica
aacaaaatgttgttttctgttttaaaaaccaattcactttaggtcaatatatattgtttttaaaaatcactaaccaaacgtgacttgtgttttaaaaacttcaaaaactattttttgttctcatttctaaaaacaattttttaaaataaaaaacagaaaacaataccaaacatactctaagttttattacaagctacaaatatacatgctatagttttcgtatccattctaaatcaacttttttcatatttttgggtaagataaaaggcagtctacttttaataccatgcttaatacatccaatgattgttgacaatgataaaacttcttttatgccacaaagcttcattcttatttctctatagatgataaatcattacaacaaccaccatactatttgcttcttgaagccattccatcgagctcttgaaatcgatcttagcattacttgaagatgttgctttgttgttctccatcccagccactgttttatggcatcaagacatctttgctatataggcattcaaaatagagatgtcgaatgtcttccttttgatcaccaaaaactaagcacttgttacccgaacaacattaaatttgaactccagtctatctcttactgcaagccacattatgaatcgatgtttgagagggttaaatcgtccccaaatatgagtactccagtttacgggcacaagactcgggttgagccaagagtatccttttgaataagtagaagaaataaattgttgctctatatacttagtttaatctttctcttttcactttgattactgtcgccaatacgagctactatttgtcagaaaagacacaaggttccactatggctggttttttatgtacacagtattgacctaatatattttacccaaagggtatcttgtttggttgaaaccaatacttagttgataagtgtcactctaccagcaaaagataagtgtctagaactccaaacccaaatacgagcaaccatcttctcaataatgcctgaaaaatctgcttttgtgtgcctcttagaacaaatctgtatgcctaagtaccgaaatgacaacttactttggatgaaacccgatgcatctagcaccctctgaacttcactttgctccataccgcaataataaattctagattttgcttcactttgcactaggcttgaggtttgagaaaacaaaatcagaccacgaagcaacaaaatatagacctgaaatccacattgaataataaaagaactgttggagattattttaccaggatcttagatctactcacaagtatgttgattagcacc

SEQ ID NO: 325030 - DNA, 1177 bp, Cannabis indica
aattactggatgatcatattcatatttccacatagtgttacaaaggagattgaaaagctttacagagcttcctttggggtttaaatggatatagaagcaagatacatgtggtttcgtgggaaaaagtgtgtcttttgaaaacctatgggggtttgggattcaaagatgggatcaaatggaattaagaaattcttgctaaatacatatgggccatttcagtcaaaagagatattctatgggtgaaatggatcaataatgtgtatttaaggaatacttccatttggtcctatgaacttaaacttgattcaagttggtattggaaaaaattatatcgcttaagggataaattctctaataaggacataatggcaacttgagcaagtgggacttttagaacaaattggctgtacaatagctcagttcctcagcagcagttccactatagcagtggcatatggagttctttgaacgtgcccaagcatcggttcatgctttggcaagttgtgaacagtcaactcttgactcgtgacaagctcgagcaatttaacattgagttggacactaaagagtgtcttgtgtgcggtttgacaaatgaatctcagtagcatctgttctttagttgatatctgtcgagaagagttgcagacctagtttttgagtggcttggcagcaggtattggcctacaaattttgaaggatggcattgttggctatcgtggaagtcaacaagcaggaagcagaggattcatgtttccattttggctgctgtgatctatagcttatggatcaatcggaatagatgcatatacaactattattcttattcggctagagcaattgtaaatgaagtgaagagagttgtcttgtatagattacaatacttcaaaaataggaaattaaaagattatgagagagtatacatagagatgatttgtaagtaggccggttgtggtctctttattttgcttggattgttggttgtaattatttgtgattaatgaagcaatttcttcttgataaaaaaattgaattgtaatgttttaaaaaaagaacaacattttttgttatatagccacatttaatataacatagatatattcttagcttttattttgcttaagtatatttttagtcgtataataattagctttttttattcaataaacaacatcatttt

SEQ ID NO: 325031 - DNA, 620 bp, Cannabis indica
ttttagtaatgcacttatgactgatttaccaaaaaaaaatttaattgaatatataattagaaaaaaagataattattattagtttgaagttaataattaagaaattaaatttttaaaatatataatttaaaaattagaattattaatttttccaaattaatattttgtatacatatttatataaaaaatttcaatcactaacattattatacaaattctcatttttcattttttaaaagtagaaaatattgtgtggtctcttctattataattgtcttacattcacgtttagacttttgtttacatgcgacactttcattttcccggtaattttgtttgattataaagacatgtaattttatttaatttcataattttattatattcctatagatttaaaaagagtacattatgtttctaattttaaaaaaattactttattaataatacacatattaaaatattatattttaaattatatcacttaattattacaaaatacaaaaaaagagtaaaattggcacacgacttaattccctaatatattaataacactactagtaaatcgggttttagtgacacacattgagtaactctaaagtgtatagtgacacttcaac

SEQ ID NO: 325032 - DNA, 1235 bp, Cannabis indica
aatataaaaaaaaaaatactttgaagataaaaatgtaacttttatcaaaaataacaatttatgtaattctccctttaattatttatttttgctatgtagaaaatagtttgatgtagctagtgggcgcacgtactataaacacaatatagggctagttgaggcccattaacagccgtaaagggtcaacaagagttggaaacttgaattttttcattaatgttgctagtgaacaccatttttaggttaatctttggtggtggtggtgattgtttaaaatagtcgggcgacggttttaaatagtcggctatactgtttagtattcctgatgattttacacagtcgaaaaaagttttatcgacagttttttactgtcgtctattctgcctaattttctcgacgattgaataggtgtctatcttagaaattaactaaaatactttacacgattgttttaaagcgacaaaaaaaaaatcaattttatagtagtgaactcttgtcgcttattataaatttaaaatcttaaataattatacagctatttatctatgttatatgatttggagtttataaaagtaaagaaaattgtagatgagaaatttggagctaataataagaggttgtgaaattgtaattattggatcaatagtcaaatgacatgttttatttatttattttatttcaaatgacattgttagctatatacacaacaagtaggctgcttatatttttaataattacttaattaataataatagcaactaagaggctgccgaagacaatgacacgtgtcagagacccagatgggctggcggtttacttaattaatctcaaatagtaatgataataataattgtttaataattaatatataaatagacaaatttgaaagcattataagcatatgcatgtgtataacgtaagatgcatgacaacgaaaaccccccctttgtttacctaactctacaaaatttgaatttaataatacatgcatacttacatatgtatataaatatatacacacaccatatatcatatgatttttctatatatatattttcaacaaaatagctaattcttgatgataattctagagctatatagcctatatagggcctgtttggcacaacttttggaaaagctaaaaactgcttttcaaaaaagctgtaacaaaaaggtgtttggtaagcagttaaaaaacagcttattgaagaaattatggaaaagctacagctaaa

SEQ ID NO: 325033 - DNA, 589 bp, Cannabis indica
agtggaaaaacaaaaggaaaaaactctaccatcaggttacataaaacttacggtacgtcacactcacatccttttacactgcaacataactatgttcaataacacataattaagagaaagtactcaatttaaaaactacagtagagtttattcaaaaaaaagtagcgtagatatattattgcaaatagggtaaactatgattgcatcattttattgaaaagtgaaattaactcgatggatgcaatgaagcggggggctgttatatatacagaagaagatagaaaggaaaaactatgacctaacccgagtcaagtcctaaccaataactatgagtaaaacagaaaaaaaaaaaaaaatatacaatgtacaagtgaattgaaacatataaatgggtaatattcctaatactcctcaagtggactgtatatatcatgaataatctgtttgacttaatattatatgaaaataaaatgtatatgaactatatgtaaagtggaataactataaacatattaaaattatataggcgataaaagtactgaaatacttcccgccattgatgtttgagcttcaattctagtgatagctt

SEQ ID NO: 325034 - DNA, 719 bp, Cannabis indica
caagcctcaccattgacacgacgaaattgggtaacctcagcgaaaatggtgacaaatcccgatgaggagtggaattggggttggcggagggagaatatgtaagaggaaacgaaaagggttttgcagggccttgcgagggtggagacgatagagatccaaatcactagaatggtcaagagaagacgttgactcttggaagctatggtagacatttcctatctctctctggtgaggatgaagcagagattagtgtctcaaattttgagattgtgattatatttcactctgtgattactggggtgaccatgggaatgtctcagaattagtgcaccattagacctttgatcattgcacttgcttttcatcagatttttgaaggcatgggtctcagtgactgcattacagttagaaacattttattgttcctttattaatatttgtggtaaatatcacgatcatgtacgggggatacagccactgccgatcaacgtcaaaggaggggattctaatccactgtcgatcaactggtgtgggatcagctatcggatggccgtttattgaggcctcggtataaattggtgacagttatatattactttttaattattatttaattttatttttatttgtcaaaaaattggttagtaatttttattattattattactattctaaattaaattgttgttatcctaattttggcactctgacgtggcatc

SEQ ID NO: 325035 - DNA, 967 bp, Cannabis indica
agagaataattcttatgaaggctgagagatgtgccatggcatggtagaatttttgtcccaaaatttttggtcaaatccattttgggcttgtttaagttcagtataaattcatttctatatatctattttattgataatcaatgtgtataatagaagaaatatagttccataagggcataaaacctaatagaaagaaaatgagaatgaatgaaagtgaaagtaaaagtgaaaggagaaaagaataggtggccgaaaggaagatgagaatgagaatgaaataaagtttttgagtcatatcgctttggccaatttattttttacttagcaagtatcagcccatgattttcgacgcaattgagcttaacatcatttggtcactaatgctttgaataccaacatattatgtgtacgtgtttccacaaagatgatacgtaacgtatccaactcaaagatagccaacaaaagcccaatcacggatctaattgaagtaatgggttagatccacacgaaaagatgagtcgcaaggccatccagaatatagaccacttgcatcatgacccaaacctctcaagttttgggaaggcatcatgcccataaaggaagaaacaacagaagccctccgaatgagccattgggatacttccagagggtcattccaaaagacatgatcccaaaagccaaggccctctaagaccaaaccccacaatgttagggctttgtcctatacgtcaaactataagagtgcgcacaccactaaagggagtataccccttgtccgacgaccactactctgacaactacagtgcgtagaggtagcatatggatgtcacctatcgacatcaagtggtctcccatcgtacggaagatgggcccaaagttaatgtattaaatgtaagaaaacttacaaaaatactggaatttgggttaacttttacaaaaatactatcacatggaaaagttttcaaaa

SEQ ID NO: 325036 - DNA, 1204 bp, Cannabis indica
cgtggaaataattttttccttcactactggaggtaagttcttccccactcggataaccttggtgggatcttcatcatctatgcatacttcttccacttcttccattggttccattatatgttccatgccaactcgtggatcaagttcatcttcttggaccacccccagtgctggctgggaagatgttccagcttcagagatatttccttccaacttcatgtgcttttttgatctcctctgattgacccattgcttctgttatcgcttgcaaactttaagaaaaaatggtggatgggtgttaccactccgaaatccattaaaaatggtcttcctaagatggcattgtaagcagtagggcaatcgactattacaaacatgatttacttgaatgatgatactacattgcttctaggaacttctccatttattgtcatcagaagttatatttttcccatggggatcagtgagtgtctattaaaaccttacagttgaatcagaaattgcagtagattggcttccaccagaccaatggcttggaaagcacctttgaaagtgatgtttatagagaatccattatctacaaggattccagaaacccttttatttgttatttgagcctctatcatcagagggtcgttgtggggaaaattcacacgcctggtgccatcctccatgaaagtcattggttaattcatcagccttgaatgctaagcaggtaattgtaccagatggcaagcttcactttgattcaactcattcaagtacctcttctgcgcatttcaagtgctttcagcaatatgaggtccagcaaatatagtttccacatgaccatctaagagtggtaaagcaaatcttggagggtaaaaaattttgggaccaggggctacagctactgctactgtcgaagcgttatgtgccccctgaagggcttgtgcatttggagcatgtattccacgagcttgtggatgacctactccctaaaaaggatttatggctcgctggtgccctagaatgaaaagttgtccgtgtgcaactccctgtcctggatatatgactaggatccttacccaattggataagtgtccattccgtactagtccctcaatttcatcttttaagtagtcacattcatttgtggtgtaaccaatatcaccgtgttattcgcacctcttgcttggatctcttctttgttttttgcctttat

SEQ ID NO: 325037 - DNA, 874 bp, Cannabis indica
ttttttcaaaaaaaaaaaatcttgtcttctttttcaaaaatgaaaaatatcagcttatatataagagcgaattttgaaattttaatatttgcacagtttggttcccttgataattttcaatatgatcaaaattgggattcactttacttatttattgatattattattttaatgaaagtaggatgaataatggcatcaccacttaaagttttaattttttaagaagtataaatctaatatttatttttaaccgcataagtattaaaagtttgtaaagctgtaatttttctctaatttcgccagtacaacattttttattatcttaaacatgacacatataaaccttaaattttacatctagatcatggaaacaagtattaattacttttaaattttcttttaataaattcaaaacgaagtctgaactgacgaaactagagaataattactattttacaaacataaggtatttatgctgctaaaaataaatataaatttatacttacaataaaattttgagtacttatgtcgcatttacccatacaagtataccaaaaattatagattctacaaacatcatgagagaagctaattatccaataaatagatcatagaaatggacacttttaaagttctttccttttatctctgaagccttttttttttcctgtgttatgttaagtaggaagaaaataagatggatgccatgcataagctatatcatccatatgttgtttagtagacatagaaatatagaatgacattttatctttgggtaatttgtggcataacctccttaagtagttaggtgtttgcaactaacccccaaattctaaaattttggtggtaaaaccttctaaacccaagttctgtt

SEQ ID NO: 325038 - DNA, 1639 bp, Cannabis indica
tacatattaaattatataaaaaaaaattactaattagctataaataaatatgtataactgcatgcactatatagtgaactttatgcctatataaattaggttttacagtagtacaattgaataattattttgaaattaatgtataatatataaatttctagaaagctatatatatatataaatagctcctattgttcaaacccgaagacgtaccccttttctataatattaattaattataattattagctatagtgatatgatcatgaggtttgtgtttaataattaaagaatataagctgatgatcatgatcatgattagctttatttatatataaattatagtttatgctctattaaaattaataattaatattacgaaattccactataggctgaactgtattccaatggcatttgttttccacaattgtcaattataggctaacatctttctttttgccttccctttaaccttattcacacatcaactttattaataattataattaataacttctaattacacactagttaatttttaacacatatatatgcatttggagcaatatgtaaatgagaattgctataaagtgcctaatagtaaaactaatatacttatcccttattttacatattttaatttaatattaattattataaaaaattattaacaatttataaaatactagtacctcgtaatgatactcttatcataaaataattttatagatcctaatacaaacaataccatctctaaaattttacttgtgtcataacataacttataactaaaggtgaaaaatacgattaattataaatatcattcttttgttgtcactaaaatatctgtggctaaaaatatatatttgttgtgactgaatgtattttataatcacaatacttattatgataaaaatttatattgtgactaaattatcgtgttcctttaattattaaaaaaaatagttaaaagtactactatacatccaatcatccaaacatccatacatactcacggcacgtgaccgaatgagattgatcgagaatgctacaatcttaatcaatcccattctgatacgtgactcgagatatagaatgaattgggatgaaaaaccaattttgaaatttaacatttatatattatgaaactttgtttgaataatcaatatacctagaaaactattcattcaacattatgaatccggaacaaaatgtagatgaatgaaagtatgaaacgaattgaaccctattagctttatttattatgaaaagtagtgaaggtttggttggaaggtagaaaggaggaggagtagtagtattatagtggaaaatgcaaaatggaatttagcaaagaagaagtatatgacaagtgtgctttgatgtggggtcaataagaggtgttatagcatggtgtggaatgggctttgtgggccggaacagccttacaagtcccaatcccaatgcttggagggttgtgtgggggcccaagatggtgagtgagataggtgacgttatcacaccccaaattccaatttggctaatccaactccacgtgggcacactggtcatatgtcctactcagctcactcccctgccacgtaatcactattatataacccaaaaaataaatcaaaat

SEQ ID NO: 325039 - DNA, 706 bp, Cannabis indica
agaaaaaaaaaataatgttgaaagtataagtgagtgaatttttgtgtttcaatacattacaagagaacccgttttaaaaaaaaaaaaatagaaaaaattcattggagagacaagcaagtgtatattggatatgttacacgtgagggtgacaaaaaacgacaagagagagcgcagtaattgttgaagtgttgtctccaacacttgtaggtttctccctttcataatatgtccatcgtttgaccaataacacttcgaaaagtccaacactacattttgactcttcttattaacataataatgcttttttttttttagaaaaaaaaaaacataataatgctttaattaagggattgttgaaaaaaaaaaagtgtaactgtgtaataatgcctacattttttatggtaaaattttaaaggatgtttgatgaggtaaatatattaaagcatttctaatggtatgatgctaaaaattaacatattatttaaaaatataatattttattttatctttttttcacattaattgtagcaatcttacttgtaaaaacactctaatatataacactcgttaaaaatgctataattataaatctcacatattattatttaatatatatcttaatttttagctacaataactttttagtttcaattttttattaaaaaaatgaatagcatcaatgttacaatatagcatccatacaaat

SEQ ID NO: 325040 - DNA, 1013 bp, Cannabis indica
aataaaataataaaaaaaaagtgtcttgataaatctatattttaatctttttttttaagaaaaaactctcacttatttaattattagtgcttggatattcttatacataaaatatgagattatttagaaactagtttattatatctaagttggcactacttagcaaatggtcaacaactttgtgtaaatatcttgagaattgctaaaccctagctagtaatacaacatatgtttaatatatatatacaatctaccaatctcaatatatattaatatttttgtcctcgacttataattattaattactacttggttgtgtgttttcaattttcaggttgttttgaaattttttgaaatattacagctcagtacaaattgtatgttcaaaatttaaaggtaataattataatagtttgaaaaacacaatttaatagtttagatgtaaaacttgagaagtccaaaatatttgagtacaaaatttgtagcgataagttttttttttttttttttgaaagcatgcaatagcgatgatatattgaaaatttgaaataattatgtcaattatttctaagcatgtcacgtcaaacaaagagacacaatttaataataacattaataatttaaaaagattaattttaaaaaaatatgaaaagttcatgagacaagatcattaagtataatatataattccaggtaataaatatgttatttatttattcatactaatatatatatataaataatatacatatagtttttaaagattaaaatggcaccgcttttaaaaagttaaaagctacttcctgaaaaaactgtaataaaaatgtgtttggtaagtagttaaaaaataatttttaaagaatttttggagaagctacatctaaaaattaaagttgctccaacctaacctttagaaaaaattattttgattaaaagactataataattttttttactaaaactatatttactaatttattatatattaaaaaataaaaaatatttaaaataaa

SEQ ID NO: 325041 - DNA, 1284 bp, Cannabis indica
aaaaaaataacaatattataaaaatactttcagttggccaaataaacaaatatacatctcaactaaaaaaaattacataaataccacttacacacatttaacccaggatctatgcttcctggacaactatcacgcaactatcgcgcaactacgcagcaacccaccgcaactgaaacgaaaatttaataaaaaagagaaccgccattaattctggcgacttcacctgagaagacaacagaatcaatcaaaacagaggctgttttaaattaataaaaaaaagtgtagaaaaactactacgaaactaaaatccaactggaaatccagtttaatatgcattaaactaatgttttgacttcaatttatagatctataaaaggcagatctcaaaaagttgaattggagttcgcaaacaatccaactcaagtataatccaaaaaaaaacatcaatactatagtaaaatgtttatgctggtatattttgttgttttccaaatttctaatggtgaatttgttcatattaaattataaaaagacatgtagatatagttatgtacatgaaaatattgttctgatttttaatgtttcacaacaattgcattatagttgcataaacattttgctaacagttatttcgtctgattgaaaccttcgtttgatgcaaccttcggccaatgacccagcaaccacccagaaactttcgtctgaatgaaaccttcgtctgatgcaactttcggccaaccacctagcaaccaccatgcaaccatcgtgcaaccatcgtgcaaccaccgcgcaaccactttgcaaccatcgtctaattgtgtaagcggtatttttgtaattaaaattacataaaaggtataaacgttgatattaccttataaatgtatttttgtaaataaaatatcaatttatattttctatgtaattatgattgaaataagtcgttataccaaaagctagcccatatatataaatggagaatttacaccagttactgttaccaatttttattatattttttaaaaaaatttgttctattttattgatagtgtcaccccattttctattgtaataatttttattatatttaaagattgcaaaaattttgatttgactgttcatatcacttttgtgagagtcattattttaaataaaaataatgatgaaaatacaaatttgctttatatatttgtatttatattatatttttttttgtttttcattttaattctcatcctctctcccctgttaatcttcttcttcattttttttcttttttatttt

SEQ ID NO: 325042 - DNA, 901 bp, Cannabis indica
gtaaagttcaggtggtttagccgccaatatcccttttaaaacctaaattttttatttacagttttacaaatttaattttccaaaaatacaatttaaaatttttaaaattacaaaaatacaaatttctcattagaaaaaaaatagtgcgggaaaataactaaaaaataatataaaaacaacatgacattaaacacactgcaatatacaaatcaatcaaagataaaatataaataagttataaaataactaaaaaatagcatcgaaaagcaaagaaaagaaaagaagatatcaaccctttacaatatgcaaattaacggaaaatctaacttaaaataaactacaagacaattaaaaaaaaataacatcgagaagcttatcactatattaaaatatctgtaaacaaataaactaaaaatgtacatcaagaatattgcacataaactaatattaactgaacaataactaaaaatcaatcaaaggtatatgttcactttaatatgatttgataaaacaactacaaatcacgtattaaattgatgcattaaaaaaatatttaattaaaaataaattagtcatcaactaaaaaatatacttaacaaaaattaaaaatgtactattttttgcaactaaataagaacaaatgaataactaaagaacaacattattttaatatgtaaatgaagtagaaattaagaccgtctccaatgcaagatgtaaaatttgtattaagtttagcacaaaaaatgattttatgttatatttaacccactctttacaattgtactccaatgtaaatatgtaaaaaaatataatattattgattatcaattaatttttattgaaaacatacaaacattattattttttattttttattgttttaataatatagtaaataaaa

SEQ ID NO: 325043 - DNA, 957 bp, Cannabis indica
caatttagtgacacatagagcccaaaaaaataaataaaaaattataaagtattagtgataattttttattttttaattcaaagaagaattatacattaatcactaaacaatttacaggaaaaattacaaactaataccagctccactcacggctacccaataattacaattgataaaagtgcatttttctagtttttattcttctttgatacccttccctctaattacaagagacaatcagttttttgacatttttttaatgcacctgtcaactatctcaatggacaaatatttcttctaaataatacaaatatttttgtaaactcatatgttgtaaattactatagctagaagtgcattcatcactcccttttttatgttccgagtttggtgatgaaattttattatataaaagatttaggttatgacattaattttaacaatttaattataggaatgttaattttttactttacaatgttataatgatgtatgatcaatctaacttgttccataataaattttttatttgtttgttgattaagtaaaatagataattaaaatgataattaagtatgaagttgcttgtgcatttttaaattatataataaattgtaagaatccgatatttttattttggtagttgcataaatcaatttcatttatagtgtggaataatatataatactaaaatatattatcaatttcaataaacgtttaaagcgaaatgtttagggttaaacatgaattgataaaactaaaatgattaatattgattattaaaaataaataaaaaatttaaaataagtggacaaataaaataactatgagaaaaatgaaaaaataaattataaattggttttagaaaataataaagaattactctatctactattttttttttttctaaatttatgatttgagttgctccggtggttgttctggtaatttttatgt

SEQ ID NO: 325044 - DNA, 1123 bp, Cannabis indica
taaataattaatgaaatgactttaatttagttttatgacaagttctgttttttgtttttgtttatttgttttgtttattaatagaaaggttatattatgtaagttattaaaaaaaaccatatgaatttgattggttggaaaaccttgaatttgggggctattattatacctcaatttcgtctatggaagtgtatttatttatttgttttaattctaatgttaattttgggtgaatctatatttagggaggacttaattttgggaattgaggggtgttttggggggtgagatttgttggagagggtgtggatgagattttgaggctaacaaacaattaaagggttcttagttttttcccaacattgaaagctgtgagagatttgtgggggcatgagactcttaagtcctctcattaagttgagatttgtgttgactgttgagctctctacccagagttagctgcattcatgattgaagaaatagtaaaaaaagaaaacaatgtaattcttattaaagaagatccacttttttaaaactaatattgaaacaaaaatttgttttcttgtagctgtactttgtttacaatgtggggatttctttcttattctttttttcctttcccatcttctagattttcaaaacaaaatcgtttcacttaaaacaatttcttttcgtaaataacaagcgtattgccactaaactagactaattagcataattttttaataatagtaaaagtctaattagttagttttacagactatcatttctttatgttttatgttagtagcattttgattagtgaaaatcatgattaaggtttgcatatttgccaactaagtgattcaatactataattatgttggatatgtataacaataatatgtaaataccatgctcttttctttgttggtacttaatatataatgattgtatatatgcctccctttttttgattgtatatataataagtacttttggctttgggttgatagcctttcatatttttgcagttaacacatctcatatgtcttatcgttttctatttatttctatgtgttggtgcaagttgcaaataagaaatggacaaaaccgtgaatgtaaaagtttaaatataaaaaaa

SEQ ID NO: 325045 - DNA, 823 bp, Cannabis indica
atttaatatattcctaataaaatagataaataactaaaaattgattatagaaagccaattcctctcatttgtgtttttctttatattaatatattagaaaatttaactgctcaatgcatgcgcggtataaataaaaagttattctatataaaagtactaatttttatacttatttagtatttatttaagagttttataaaatttagtaataatcatttaagaataaaataatatatagtagtagaaaaatttaattaatatcatttttttttttggtaaaatatattttttttccataaatttttattaaagtaatactattagtccaatgcacactttttctttttcatagaaactaatctatcataattaatatttttggttgtaatttatttgacttttaatactcactcactaaaatattattgtttgattattttttaagaggataggaatgcctaactcatattattattaatgtaattaataatttattaaaaataaataaaataaatttattataaaattgtgactcaatgaaaaataaggttaatataaggtaagtctaaaaactcaatctcatggtggattattggtccaatagacttagtgactctttgattttattttcaatttatttatttttatagtaaaatgacaactaataatatataaagagtcttaatcaagactctttatttacccaaaattaggttacccttataataactccaccatttttcttctttgtgcttgcctcaataaataatttttttcccttcaaaatgtagaagttattaaatgttataataataataataat

SEQ ID NO: 325046 - DNA, 920 bp, Cannabis indica
tttttgtatttttctattttttccctatttaatatatacaaaactacatagatatttttttggagggagcgctaaaactccctaaagttagtaagtgcctgcctcttttgagctcattacgagcaattagcagttttttatattatttattaaattataatatgtattatttaatattgaattgtactaataattaagggtatatataaatcggtctaatctaattataactgactgtcaaacattaaatatccaattgtgaatggatcaaatttgatattattttttaatattcaattggattagatcgaatgttggacgaggtgtccaaaaatcctatacacttggctgaactaattagtattttcatttaatttagatgggtaattaaattttgtattgttatatataatatatatgtatatatgaaaataggtaaatagcatcataagtagctaaagtttcaagtttgtaagtggtataaacccaatattcagttttagcaacataagtatttaatgttcgtaaaacaattatttttatctaattttgtcagtacaaactctattattatcttaaacaagacacatataaggcctatattctagattactgggtctagatagaaatatgtaatatcagttatttctaaatattcttttaacaaattaaaaacggagatctacactaacgaaactaaagaaaaattcactactacaaatattcgttttcgcgacggttttaaaaacgaattttttttgggaccgtcgctaaaaaaattaagtaactgttcaaaaccgtcgggaaaaataagcattcccgacggttttgaacagtagcaacaataataggcgacggttattattaaaataataaatatacgaaaaaaaaaataatggggtatacccgacggtttaaaa

SEQ ID NO: 325047 - DNA, 1963 bp, Cannabis indica
attgacatgcaccatgattgttggcctgaggtgaggtgcccttctgggttctcaaccttcagtctcaggaagccgttttgatggtttgagtaagctaaaccctaaacctaatggttctcttatatcccatctccaaatataagcccaatatacccataagtagaaaaatggcatttgtaaaaaataaaatacccaaaaaatatggtatttttaaaacatctttgataaatgtaattattttttttttcttaaaagttttccagtcccatctgttaattatatttttataggttttcttttctacatatattttaaaattatttaaaatcaatcgatgagtctataatatctaaacactagatttggtatttttaaaacgtctttgataaatgtaattttttttcttaagctttttcagtgccatcttttacatatatatgtttttatgcgttttttttccacgtatatttctaaattatttataatcaatcaatctaaatatttatttatagaataaatactattttggacactaaatcagcctgaatcacgagtatacatgaactcctgggacttggctggctcgattgtaagcgagtttgaggacttcttcttgttcgcagtagttttggtcctcttaggttctttggtagaacctgaggcctcaccagtttgagtaactctcttcttagacttcttgtcgaccgagggaggactcttaaacacattctccaaatctatatccatatctgtgagccaagaggagttcattaacacttaaacaaaataaataagtaaaaataggaaaaaactcccatttaagaaggttaccataatctttagaagatgacgagggaggactataatattcactaaactccttagatcctatgatcataaatatatcataaaagtttagtggatctaaatcccagcttaaatctatgtgacccgctctatccaacatagtcccatactactcggcaatcccatagtaagaactagtgcagctaatttgaacattgaactctgggtaccaactatcaaacctatgtgctatgcgctctatgagaaaggggttccaagtataaaaattgtactgactattgctgaaagacactaattgttacgcttagccgtaaacactatgggtgaccatccacattgatgacctcaggatgcttcttcttcagcttcccgagggactgtattttggagataatgtgtccgagctgcatagtcctgagtttcctcatcacttgggaccagaacctactgccacaacgcatacttgggatatttataatcactcgtatactcgtgttgagcgaggaggctcacggatctcaggttggcctcgttcaaaagaaactcggctgatcggagaccaaagggaagacccagcaagagcctgcattgctcggccatcttgggagtaggagttggtctttacgagaccgctgtcaaaagataatactacaagtcagcgaggccaaaattaaagacatggaataactaaacccaagtttggtgcagatttacttaggtattatacgaaaggtggttgtattgattggggagaggccagttgtccagaagaagtcttctttgaaaggagtcttatttggtaacccaacgataatcttacgatcacctgtgtgagtcccgagatagtaaaagcttcctgcatcattcttcctcgcagggactgccttgaccgagtagaaatagaatatttcaaggggagtgggacactcccatcctaaaattttgtacaaaacccttaagcttgccaggattttgtaggaaatagtgttggaattattttaccagatcttagatttactaacaagtatgttatttaacatcctaaatatgaacttctaaaatgatatgaaataaaacatataaagtataagaaaccttacagtggttgcagcagaatataatgtctcattccact

SEQ ID NO: 325048 - DNA, 932 bp, Cannabis indica
ttgagtgttaatgagtctcttttgctctcgcttactctatttatgtaatttgtaaaagtactatattgcttgacaactaataaatttttagggacatttttatttttacagttttaaaatagtttttttttgcattttttacggaattttatatagaaacttctattacaactagcgctgcaacctaaattgaaacaaaaaatcgtatagaaacccctattgcaactaacgctacaaccactttaaaaaccaaaactataaatttgaaataaaaaatttaaaaaaatagtatatgaggtaattctcttgcattttacttagtatattataaaattgaaagaattatcatcttaacatatatagtattattcttttaaagaaagaagaaataagtgtctttgaaaagatttgatacttttgatattattttaatttattccataaaatacattgagaaattaaataaataatattattatgacgtggattattttattaaattttatttttatgtataaagttgtgacaaaaattgtaaagttaaatttatttatttgtagagtttttacttaatttaagaaaataacatgctacaaaattattaatattttgagtaaatattaatgttattacaattaattatttcttcattatataatactacaaataataaagcaacatgcatacataaatatacatcagtcaattcgatttcctaatttcttatatattaaatattagagtaaatattattttagatcctgtattttgtaaaaattatcaattagaccttctgttatgttaaatgataaaatagcctttaaatttttcaaaatactaaaaataggaccatgagctcaatttttaaaaaaattatttttttaatataaccaattttaagacaatttgtaacacggacagatacaaaaaat

SEQ ID NO: 325049 - DNA, 1781 bp, Cannabis indica
tttgtctttataatttctctttagttttccttttgaagttattttcactaaattttgacaccaaaatatgttaagattttcgcaaatgcacatagccaaaatttcattgattgacacccccactaaaccactagcaagtaccttgctaaaagcatcatcagagagggtagaagcgggagagaccaaactgtctccctgtgatctcgcatccagtatctcaggctcagaagactgaaccaagtcgtgatccaagccaagcactgaaggctcactaagcctattcagcggattaccatcggcatcgtaatgacccaagggataattggagaggatgatacaagttctgtatctctttctcctaactggtgaggcctcctcaagatcggactcaatatcgcgactttcaactccctggtcaacctctgggtcaacttcaacatgaggctgagtagcctcctctataatcctgactcgaccccttataaccaccctagctacataggggtcacacggaggcactctacgacaagtctattttgttttggtcaagatcataagacaaccaagggacctacatagttgtcacctcccctatccaacacctagagccatttgcattgaagagataaggggaggtgaaaaacttgacaaagctacaaagacattctaatcaacagtacccaagtgtaccttctaagtaactcataatgtacaaggtcgattatcggcccagtaccatcttaagtacacctactaagacatattgtaagtcctaagttatacaattaactttaatggactcactataaagccttatacagagttttcaaggggaaccacgcataagaatacaattgtatatggctttaaggccatcacgagaccctagccaaggtcaatagagggaaaaaactagttgcccccttggagcctttgccttggccgactagggtcccaagccttagaggctggccagaccccatgacccagcctgcggctggccaggatctcattttccgggcataggtcggccaacctatggggtgcacccccttggccggccagaccccttaatatccttccttggccagccaggtcttaaacaagacctctttggccggccaggacctgtacggatccaaacatgtgttttttcaagtactcgaacacattcttcgtgttcttcttgactcaaagagccaagaatcacaacaaaggtcaaattcagatctttttcgtctagaaatcacacattatgtatcctaaggctatcacacggatcaaaatattgaaaggaaaacaatctaacgtaagaattaaaggatgttcaaagcaaggaataatgttaatccattcatggtaaaatcaaccaaatcaagtgaaatagcaagactagaaagcttgctcactacaagaaatcgttgaggaaaaatgtgggaagcatggttcgtcaaaacggcacaaaaatctcgagagaatagtgcttgatgggtttagccctctagagagaaggaggagcttcttcaaatgtaaatttctagtaagagaagttaaatgtaaaaagtgaaaagggtttttcccccaaaagcacttatatagtacatgtggaaccccttattcacttacttcacctacacaacaagaagacaattaaatcagttagtttactacaacaaataagatcagacaatcaaggcaaagtatttcaaaaggctaaaaatgcagaaacttctattcagcaaaagctacaacagttctgttaattccatttttggcatatt

SEQ ID NO: 325050 - DNA, 643 bp, Cannabis indica
tttatttgacgttgatttctctactttgttctatctttccggaattaatggttttttttttcaggtgttctcgtatgactggggttgttctgtgcatgggtgtggaagatggatgcattgttcttgatattcggtgtctacagtataaaagaaaaaaaatgtccaaggcaacataaaagtaatttttgccgtgtggtagtaaaattataaatatttgccctaaaatccaatattattgtaagtataatttgtatttagtaatcgtggtcatttacaaaatatacataattttgcatatgcacaatataagaaagttttttagacaaagtaattaaatttgtttatctgtatatatataattttacgaaaaaatgtttattgcatgtatttattcatagcacaatattatttttatgctatttttatatagcagcaacatgaagataataaaaaaaaattatccatatatttttatataaataaagaatagtcaaaattcaaaaaaaatataaattgatatttttataagctcactatttaaaaaaagtgtatttacgaaggtcttaaaaataattttttagagaaccatcgctaaaaaaattaagcgagtgtttaaaattatcgagaaaaatagggtactctc

SEQ ID NO: 325051 - DNA, 2322 bp, Cannabis indica
agttgttacatgtgtagagcattggttccatttatctagagattagtgggttggaagtgttaactcactaaagaagaaatcatagttacctcaagaccaactctacaagctttgttcagtgcttagagcatcatcaggtgtgtgagctacaattgattaataccaacgaagttaccaaaaagctttactcaatgctcttattcattagatattaatttaattacagcactgtgagctaatttgaataagaaaaaaagaagtagtaattttagatctcctttttcatcaaagcttcactaaagtgatcccaatacactaataccctgtttgaataatagtaggggccataccttagcgatggacctcctaacaaaaagattactttatcgcatcttgtcggtttgagatgtgatcgattcacttgcacaaggtaaagtgaatcccactgtgaagcaaacatctatagaacaattgctttattctcatctcagatggtccctgttccagtaccttggtaccggtactggattcatgtggcagtcatagaaaactccaacctattaatcccaggtttaaatgcttatgtgatgatataaggtccctccctctctcatttggagtcttcggtgtcactttcttagccactatctttggaagactcataagaaacatcttcaatactgctgccctattcttgataattattagaaatagaaggagaatctttgtcactgccccctttcctgagtcatcttgggaagtagggggagattcttcatcactactttcttggtcgagaaataaataagtagtgtaattagttgctcttttttgagtgactcccttgatcttcttgaaggcttcttcgagcttaatgaaactgtcagctctgtctagaagctgttgaatggtgtatgctaatttgagcttcaagtctttccaaaatggactcattactgttagtctagctgtcattagcatgaccttggcatcttcactaagtatcttgatctacatcatgtcctctaagaattatcaaaggtaatcctttagaggtttgtcttcttattgcttgatgcagccaaatcattgggcttgattggtctgtgccttgatggagagaatcggtcttagaatgctttcttaagcatctcctaggaatcaatagatcccagggagagcttaaaataccactattaagttgtttataatagcgtggcaggaaagactcgacaacgagaatcatctcgaaagtcttgcaggtcaatttgtactttgaacttgtgtaagtgggagagagggtcttcttttctagtgtatggatgctacattgaatttctgaactttgaggggatctctaaagaatcaattcaatcttagagaggaaaacaccgctctcgatctaattcgtactatgttggcttttgagtagtcaatttttggcctacacactatggtgatgtgtgtattagttggctacttcaaactgatgtagttatgtaggctcttttgtcctacaagtggatcaaaggcattgatcagccttggccttatggttgtttcctagtcgtgtggccttgatgaaaactatggggatatatcccatatgacgatagtgtcatctcttaagtgtttgcttcgtgagcagctgctcatagtactataccgaatatttccttcaaaatagtcttcctcttactgacatgtgtggagggagttggactaattgctcaggttcaacatgtctccatgaacccatgggaagtatttgtactgtcgaccgtcaatacttaagggaagtacctacaccaagcaccttgttcatcacgaaagtatttttgagtgtggagtagttcattgatcttcacccttcgaaactcatactctttactattattgtagagcttccaaggtcttccctaaagtctgactgcatgtccctttccctttgcggggtcacagggtggtctagagtcatgaggacatgaagagaatcccatggaggagattggtttctcacatagtttgaattgattcgaaaagaattgcggttggtcctatcagatgcgtgcgatagacctataggcctacgatctcgagtttgagtcctttcggatgctcgctcatcactcgttttactaacaagtgatttctccgtgtcaggaagagatcctatggatcaacgtttttgagtctaagtcctttcgaactctcgctcgtaatccacttccttacggggagtttcagtgcctgctacttactaagtaatggcgtgggtaccatgagtggtatgttgctttgcatgttcatggttgattgctt

SEQ ID NO: 325052 - DNA, 740 bp, Cannabis indica
aatggatccagaatcaacctattaccgaattactcaaagaagaggaagcccaaattcagactttgatttcagattcttggtcaaaattagagagcatgtggagacaaaaatcaagggagacttggctttccttgggagacaaaaatacaagattttttcacgctgcaacaatcatcaggaaaagaagaaatagtatttggtcaatcaaggataaagacaggagagtgtggaaggataaaaatcacattgtggaagtcatcaatatgcacttccaggagctattcacttcctctaatcctatgatcgatggggagtttgaagatttgtttactactcggatcgactccctctcgaatgagtgttttgctgctacaccctcagaggcagaaattagagaagctgtattcagtttacaccctctaaaagccccggggccggatgggttctcgggagttttctatcgcagatattgggagttagtgggaccaaatctttgtgcaacagtcaaggaattcttttccactggctatatgcacccgaaactaggggtgttcaataaaatttacaaaccgcctaacccgaataaatcgcccaaaccaaaccgaataaaccgacaaaaattacaacccgaaataatacaatgaaaatccaaaccgcccaatgaatatattgggtggtttacaaattattctaaaccgcccaatcaacccgaataaaccgaattaaaccgatttatatat

SEQ ID NO: 325053 - DNA, 1235 bp, Cannabis indica
gggctcccacttccttagccaacattaagcctactagcatagcctcatgttcagcttcgttgttggaggcacaaaagctaaagcgtggggccctctggagttggtgctcttacagagagattaaactgatccctgctccgactcctttctcatttgttgctccatcaacatagaccttccaggtgggcagttctgggagtggctctttcgggaggtcattcatgctggaacattctactatgaaattagcaagggcttggcctttgattaacacctacgacttatactgaatgtcaaactagctaagtttcgtagtccattttcatagcctgctgaaggaatctagcttctggagcaccttgcagtggggatggtttgttggggatggtttgttagtgcttttatggcgtgagcttcgaagtatggtctcagcttttgagaagtggtcaacaagtaaaatgtcagcttctcaatcattgggtatctagattctacacccaacaatcttttacttacatagtagatcgtgtattggacctttccttcctttcgcatgagtgtgacacttatagcatgatcagacactgccaagtacaggtataaatccccccctccacgggcttcgacaaaattggagctttggtcagatgctcctttaacttttagaaagcttcttcgcactctttggtccattcaaattttttgttgccttgcagcacgttaaacaatgagatacacttgtatgttaattttgagatgaacctattgagtgcgactattcaaccaataacactttgaacatctttatgttttttaggagaaggaatgtcgaggaaagccttgattttctctagatttgcttcaattttgtgggagctaagaatgaaacccaagaatttcttgaaggaaactctaaaggtacagttttttgggtttagcttcatcccatactttttgagaaccgcaaaggcttcttcgagatcaaggccatgctcctcgaaggttttggacttaaccaacatatcatctacataaacttccatgtttctccctagttagttcttgaacatttggttgaccatccgatgataagtggctctggcatttttaagctcaaacgacattaccttataataataaatgcctttgttggtttagaagttggtgtcttcctcgtccgcgacatgcatcttattggttatagcaagaataggcatccatgaagcttagcaact

SEQ ID NO: 325054 - DNA, 1143 bp, Cannabis indica
aaatatagtatagtttattttttatgacataaataatattataggttttggattttttttttttgttttacatttatataggttttttttatgccatatttctgtaagaaaaaaaaagtaaaaaatttacatttataaataataataagttttactagaaaagtcacaggtgccgaaaaaattgctggaaaagttattgtcaccgaaaaagtcatcattgctagaaatatcgtctgaaaagctactgtcgtcggaaaaattaccagaagtaaatgtttcaaatataagtaaaaatagaattgattccataaccagttctgtgacataataaataaaaataaataacacaaaataatttaaactagttataattaaaatagaatcgattctataatagtgttataatgaataaagacaaacaatacaaaataactcaaaccggttataactaaaataaaatcagttatataacataacgaatacaaacaagtaacacgtaataacttaaaccgattatataatataatccaagacttagcctgtgaacctataatgcatgtaggttatacaatggtcaatacattcccaagaccgcattaatagattaaggcaacataataaaatatctaacatgctttccactgtaaattgaactaattactaactgagaaaagcttacggaactgtgagttgagctcatctctagccatgattgtacatatcttgacggtctttagtgaacaacttggtggctctgataccaaaattgtaaaattcgctcttcaaaactacttgttttagactttaaccatacaaaaccatatataaacatacatatatatataattttacaagtcgggatcccgagttaaaaccacttttgcaaaacaccatgtatacatatacatatatatatatatattttataggtcacagagtgacagcaaaagttaacccaaaatacaataagatcgaaaccctccaagttgtactgccttgatatgtacaatctgttttattattattaaataatataatatatagatcaaatatgtgtaataaactaataatatgtaacgtatgacaatttatattatttttcattatttcgtaacatataggagagttacttgttactatgag

SEQ ID NO: 325055 - DNA, 780 bp, Cannabis indica
gcataaaacccaacagttatgaggttcgagctaaccctaccaacactagtacgttagaggtactaagtgtatgtggtatagaggttaatggagcttcaaggagtacaaagtatttgtactcttgtcaaaaatgttcaagactcgtacacgttggacgcattataattactttttattgagtgtgtgggcgcctaagttacaagggcaggttgtatattatgtcttatgattttcttactgagtttgtcgagtcataaatatgtgcttcatgtaaaggtaaaggcaaggtcaaaactgaataagtggtgagtttggagctccataaacattgtacataacaggaccgttagacctatagagttcaaatcgttgggacatcgtgtgctcgattatattagtcgctgggcgacatcttttgtttggtttcattttgtagaacatttctaaaataaatttgagatctcggtgtttgtaacttctatttcatttatatagtaaagttatgtttattataaaagttttcgttaatcatgttttgtaataaaacctttgatgaataaaggcttgcacattagttaagaaaagcaatgtagcatgcctaaatcagtaagacattacattttgacaccttggcccccttctcgtttccttttggctttgcttcctgttgaaatatgttttaccaggatctagatttactaccatgtatgtaatttaacatcctaaatatgaatttttaaaacaatgtaaataaacacatataaagtttcaaaaacctta

SEQ ID NO: 325056 - DNA, 507 bp, Cannabis indica
aaaaaaaatgtattgaacctccaaaactcctttcgagaagggacataactttgtttagaccaaaccttttctactttaatttattttttgaactatttacgcctacagacacaaatctcaacttatttacagaaatgtggtgagacaatttattattggaagtgcggtatattacttttttccctgtaaggggaaatttttttctcttttaatttattcttttatgttatttccatcagactcttttatttttccattttatttttttaagagagtttctcttctttgtttattattttttatctatgctagactaatgatagtttatgctttaaaatgattgcattctactatttttaaatgactataaggaaagtttatgtttttttactttttgctatagaagatgatacctattagtttctagctaatctctttagtctattaaacgttacactaaaaaaattaattacatcccaacacataaatatcaaattatttaaaaaa

SEQ ID NO: 325057 - DNA, 1659 bp, Cannabis indica
gtttcaatctcgatctgagtctggatttagttctgggtctaagtcttgggttccgatcccgatctgggttcgagttcgggttcgagttcgggtccgagtgtcgttccatgtttgggtttgattcttgttttgggtctgagttctggtcccaggttcgggtccaggttcaggttttgtcgttgtatgggttcgtatctaggttcatttcctcgtttgggtccggggcaagtttcgagtctgggtctaggtccgacttcagattcctaggtccaggtcaggtcctggtttggttttgagtctcaaatttagatcggggtctgggttccgaggcctatattcccggtctaggtacccaatccaagtccagttcctaggtcctgctttgggtccaggttcgggttcaggtctcgagtcttggttttagtccaagtctcggtccgggttcaactctatgtctcaatcccagtcttggtttgggtttaggttggggtccttgtcagggtttggatcctggtcagggttgcggttcttaggacctggtgagggtttaggaccaagtgacgtctatgtcctggtccaggttcaagtcctagggcttaggtcccagtcctagtcaaggtctcggtccaagttgtggtctgagtttgggttatggtttgggttcggttctggtctcaagtcctggtcctagtcacagttttagttctgggtttgggtctgggttcagttctgggtccgggtttaggaggttggggttggggttggggtccaagtcttattccgagtccgggtacgggtttttcagatctcgatctgggtccagttctgaatcaaggtccaggttcaggtcctgggtctgggtcccaggttcaggtgtgggtttgcgtttggatcctggtccaggtcttgtgttttgatcccggtcttggtttgggtcgatattcgagtccgggtctgggttcgtgtccatgtaaaggtctgaataccaatttagcttaggggcttggtctgggctgggatcgagtcccgagttcgggttcaagtctcagtcctagctgggtggggaccgggtccaacactgggtccgagctcaagttctggggctgggttcgtctagttctgggtctcggtgcaggtcaaggtcctggtcacagtcaggttcctagtaacgttctggttcaagtttcggttttgggttcagggtctgggtctgggtccaggtcttagtccagctttggctccttgtccaagtcccaaatcaagacatcaactgtaacaccctaactagcataggcgtattacgtgatttttaaacatgctgtgcagctcgttgctaatcaacgaggtttatggaaaacgtgattaattaaaatttttgctttttaattaaacttgtaaaatatttatacaaaagactcgggatcccgattacaaaaccatttacaaaagtttactgtttatacaaaatatttgtcgcctagcgactagttacaaaaatagcctcgctgtcccgatgatcgtacgctccaggcctaaccgccccgacatgtacaatcttcataggctcgttcacggtccatcagctctagccttgcctttacctacacataaacatagcactgtgagtcgacagactcagtaagaaaagcataataatac

SEQ ID NO: 325058 - DNA, 778 bp, Cannabis indica
ctacttatattaattatatttatatcaataactacaagtaagaattttataaatataattgtatattgtcaaagagtgcaatctattatttatagtggagtaataatggaattaataaatcagattattctattgaagagttcaataataatcaagtgtttactggagctttgaaatatacttccatggtcctcagatctcctctatacaacctctacagggaaagtttaatttgatgaataaatttatgaaagagttaatttctatgagaaataattcttaagaacaaaatagtaattttgttgaaactattattttgaaggggagttatatttacaccccataaaataataactatacccccaaaatataattacttaattgaccttttataaaatgaccaaaatagatatctttaattttttttattcattttttaataagcaaacccttagacccaccactcaaatacttattttttaaaatctttacaaaaaaaaaaaagaaaataaaacattttcgttagtcataccgtttgctccaaagaatactgtatggcagatatgcctaattccattgtatggtttttcttaattaatagattctactttaaaaaaaatcacaagaataatatactattacggcagtggttcttcgaaggttatggtgaagcgagagtggtggaccagtgatttgttgcgaagtttggtgggatttggtgaaccattaaccaagtgcaaagtgttcttgtacataacaatgacagaagtattctttg

SEQ ID NO: 325059 - DNA, 1643 bp, Cannabis indica
aaaaaataatataaatgttttataatttaatatgatggttaaatatactaataaaataataaaaacgacataaatataaatgaaaaagtagtacatttattgtggtataaattttgcattatagtaaatattatgtcaaatttggcacaaaatttgctatgtgccaaatttacatcatttttttgcacactattggagcacatatttttgttaaatgaactctattttaacttttcaaaacttatttacacttccgttaaagatattctaaccgaattgagttaacttaacataattttttttattattagaaaaacccatttgagaagaaaaaatatcatacaaaaataatagaagcctcaattctgaaaacaagaggataactatgactataaatcttgataaatttaccaaaaatatagataatttatttgatattgtacataattgatattgcggagtgactttttcgtttttgtatggttggtctattctattgctcttttcttgtgcctactcttaaaggggttggttcatatgggatatgggtacaacttttacctttgtaacttcaaatgatccaatctaatgcaactctctataaatcaaaatgacaattaacacctcaatggacgaacaaacaacaacaaaggccaattaatgttgtgaaaacagaggtatagcattaagaagagttaatcaatctcttagcaaaatgatataattatctatatatatatatttacagaccttgtttaagtgccacatgaagatggctcctcctccaacggagccatgcctatgaatctgagaagcgaaaaggaaatgatttctcaagcagcacaagccatgaggaggagaagcacaagttggtatgtgaaggagttgttcccctgtgctcatgtccattatactcatccctgttgccgagctcttgttgctgcacactatcaaagcttcatcactattacccatacccataatttattctcttgtctcttaattttctgtaaagaaaagaatgtctttcgtttggtttttttgcagtgtgtagagatatggagattattatattatactaataataaataaggaaaacatactagaaagaaacgacaacttatttaagagcgtttttgctttgcatgcaaaaacagtacacttgcaaggaatgaacgacacttggcacttggtcttgtcagatgcgacaaagtttgttatggtattctggctgttttggtagtgttctccttcttctaatccaatggaaatatgccacgtcatcttatctttctagtgggtccgtaagattttctgtagtggtcggctatgattattaatgttattaaaggtagactttttatttttcttaattgtgatgtttatgttagaatttgtggataagatgaataaggttcaattttaaaattaattgaggagtagtctattcatcttatatattacattttatttgggaaatttgaatatctatgcattaattggaggataattttttccctaattgaatacatataaaaattgaaaatatgtgataattttatctaaaacccaatactattcctcccataactcaaccttatctctctctcttccccatctctctcttcgtctatctctctctc

SEQ ID NO: 325060 - DNA, 742 bp, Cannabis indica
gattgtagttggtcatggaaaaagctagttggagttaagaatcagctgaaacttaaaactgactttgctgcatttacattgcagaaatttagtgtttaaagaaattatcagctactatacagtagcccagagaagaagtcttggtgtcattatgtgtgggatagactgattattcctaagcataaatttattctttggctggtgctgtggggtagattgaatacgaaagaaagagttagtaaatatgatctgaatgtagatgcaacttgtctactctgtgggaaataaaaagaaactattgagcatttattgtttaactgtgagtatagtagaaagtgcctgatggaagtgaagaggaagctgaactgggggacagcagcagtcggcttgcagaagctgctgcaaattcctagcaagatgaaatatgtttcagcaagtagaagaagcatgatgaagacaatactggctgccttagtataccaggtatgggaggcaaggaatgatgttctgtggaatcaaaagcgatggcaaatcagtgtcattgtaaataaagtaaaacaggggagcaaaaggagattaacagggtaatgccaagcaaagcaaaagaagcagataagaaatggttgagtaatttgtaattttttgtaatattctgtaagtagatgcatatggtatagcagtcggatttgtacataaactgagagtgtaattgatagtttgagcaatacaatttccttattca

SEQ ID NO: 325061 - DNA, 2272 bp, Cannabis indica
accatctcggttcttgattcactcgttggcgaattttccatctcagttttgattaaagccgaaggcaaagatccctggtggttctccggggtgtatggcccgtgctcttataaacttcgacctgcattctgggatgaattagcaggtttgagcgcgatctgtggagactcgtggtgtgtggggggagatttcaatgtgactaggagacctggggagaaattgaacagtagctcgtgcacaaggagtatgaaactctttgatggcttgatacgggaattacgactgattgaccccaagttagagaatgggagatttacttggtcgaactttagaacatctccagtttgcagtagactagatagattcgtatttaccaataactggaacgtcatttatccgtttgccagacaagaaatgttggtgaggctggtatcagaccatagtccggtcgtgattgacttaaacccgccgagatggggtccgggccctttccgatttgataatcaatggctagagcacaattctttccccaagtcatttggaagatggtggaaggaggccatttctaacggttggccaggcacaaagtttatgagtaagttgaaaaagactcaagaaaaggtgaaggagtggagctcatcaactttcgggcagaacaaggccacaaagagagcgttggaaggcaggctggaggcattagatagactagaaggaaccaattcttgggttcaaagcctggtcgaggaaagaagaaaattaaaagaggaatggcagctgaattttgaagaagaaagaagtatctggctgaaatcaaaatgtaaatgggctaaggaaggggatgcaaattcaagatttttccataatctactaaatgcgaggaaggccaggaacaccatttcaagaattgaaagagaggatgggtccattattgataaggaggaggaaattgtggaggagctaattggttttttctcgaaactttatacctctgaggcaagaagggggagtgggattgagagcattgaatggcaacgcatcgcgtactcctcagcatgccaacttgaaagttcttttgaagaagaagaggtcaaaagatcggtttttagttgtgaaggaagtaaagcgccggggccagatggttttagcttggcggttttccaaaacaactggaaaactattaaggatgatctaatggaggtgtttcggacctttgagaaagagggaagaattgaaggtagcatcaagaaacctttatctgtctgatccctaaaagacttacagctgcaaggtcaaagacttcagaccaattagcatcacaagtgtgtacaaaattgtagccaagacacttgctactagactacgtggtgtcttaggagagactatctctgaaactcaatcggctttcgtcgaaggacgacaaatcctagactcggtccttatagcaaacgagacggtagaggattttaggagtcgtggcaaaaaagaattcgtgtttaagattgacttggaaaaagcatatgatcgtgttgattgggattttctggatctggtgttgaaggaaaaaggtttcggggaggtatggaggaagtggattagaggatgtgtctcatctacatcattctctttgctcattaacgacagagtgagaggcaagttcagaggttctagaggtcttagacagggagaccccctatcgccgtttctctttacactgatagttgatgtgcttggaaggttggtagataaggcagcacaatcagacacattctcggggtttcaagtaggcaaagacaacattcaaatcagtcatttacaattcgcggatgacacccttttctttgtcaaggatgaggcctcactacgaaaactggttgagattgttgaagctttctgtggcatttctggtttgaaagttaacttgaacaagagtcaactgttgggcatatgccttgaagaggaagtggtggcccaaaacgcagaaatagttggttgtgaggtaggtacctggcctatgacatacctgggaatgccacttggtggctccccgaggaaagagaccttctgggagcctgtcttggacaaatgtgcgaaaagattagatgggtggaaatgctccttcttgtctaggagaggtaggcttactctcattcagtcggtcctatcttcccttcctatctactacctttctctcttcaaagccccaaaaattgtcctaaaggcaatagaaaaaatgatgagagatttctctgggaaggtggagacttagcagggg

SEQ ID NO: 325062 - DNA, 1764 bp, Cannabis indica
aaaacaagatgcaccttgttgatataagtagtatcaatcaatccataagccctcttaaactgtgtagtctcatacctacacagtttaggaatcatcccacttgaccttccccatgcggtgtgggattgcatagcttacctggtatttccccttacggatcacgggactactgactgtcacatctattttgtcatttaacaaaacagaaggtctaattagtaacttttgcaaaacacaatatccaaaataatatttacctttctttttaaaattataagttaattcattattttatttttataataatataactgaatattgtgttcacatttacaaaaataaaattattaccaaaagtaaaaacaaaaaatattctcttcttcaattaaatatgacatcctcttccattaatttcatcaaaattgaaaatcacgctttattagtgaaaaatgaaagttttaatcaatttgtattttttttttttttaaaaaaaaatgccttctttcaaaaataattagcatttttaattttatttttgtaaaaattaatttatatcttaaaatcatattcattcttatttatcttttgtaagattgtttatttggtgaattaacacctatcaagaatttttattttattttttaaaaaagaaaaagaaaaactgaagtgttcgaatggctgaatcaaacaataaacacaaatcaaaaaataaattgaataaactaaataaaatagagacaagatatacatcaccctttttgtggtgactaattctgtgctcttcgaaagttttatttaatcttcaataatagaggaatacagagttattctcatcaacaatatagtgtcttacgccttacaaattaactcatatgagatagatgtgatcaaacacacacagtcctctttaacaaccctcctcactcattacaaacataattatcatttaaattcttctctaagtcgtcattaaaaaagtaatacatagtcttatatataagcaactcaatataagagttaactgaaatttaagtaatacatcgggagctgactcgacaaacctactccatctgaggtcaaaaaataaactctcaaatctaacccaaataaagttcaatatttttcaaacaaagtacattgttaggtcttctcaaatgggttaagaactgcaaacattcgagactttgaagataagtatacaaagttggactcaatgttactaagtatatatttgatttggaatgcttgaaataaagttttgtggagtcaaaaagtttatcctataaatataattgtatataacattaaaagagaaattagtgaaagattttcttagatatatagtgagaaaattagttgtatatagatagaaattggctccaccatttagttactatggccactgttgcctaattcgatgtattgaggccaaattggcttgtgtattagaatcttattttatagggataatacaaaaaaacattattctaactatcaatttacttgaaaaaaaccatccaacttgatattttgtggtaaaacccccaaactatcaatttacttgcaaaaaaccattcaacctcatattttggtgggaaaaccctccaaagtactattccatttacatttttaaggtgtcgtttagccagcctcattaagtcctaattttgcccacgtggcaatgacaggtcactaaaaaattatcctgcgtggccatattttataaaataaaaattagaatgagtaattaaaataaaaataaaa

SEQ ID NO: 325063 - DNA, 2130 bp, Cannabis indica
tagtaaataatatttgaattgatttttttttatacaaaactaaagacttaaaatgtacaaatttgagtcgtaatcatttgtcgatatggactcccttgtaagattgtgtcggacaacgggaagaagttcgacagtgaatattttaccaacttctgtgtccagcacagaattgtgaaaagtttttccgttgtagcccggccacaagccaatggacaagtagaggccgtcaacaaaatcctcaagaccacgttgaagaaaaagctgcaagcttgtaaagctcagtggctagagaaaatcccttgagttctctgggcttgtagaatgacagaaagaacttcaatggggcatacgtcgtatgcaatggcctatgggtatgaggcagtaatcctggtagagaccacagtcccatcccatcgacgagatacttacgacccttcccgcaaccactctctgctccaggagtcactagacttgatagaagagctacgagaatggtcgcaagtccagctcaaaatgtactaagaaaagatcgcctgacacttcaactcaaaggtgaaaagtcgtaccttcgatattagtgatcttgttctgcgaagagtattcctagctttctaggaactgagagtgggggtgcttggacaaaattgggaaggcccctacgagatactcgagaaagtagtacaaggtactttttggccaaaacagatggacagatcaagggtccccaatgcctggaatgcagatcatccgcgttgatattaccaataggtggcgaacacaaggcagtgacactatttggagcgcctttttgtaaacagtctatgtaattaacttttgagcaaatggcctttaggcatcgtgcaatgagaacaaaagtgctttatgtttacactttacactttatgttttttaagccataagctatgttttaaacaagtgaccaagaacgtggagacatccacacttctcaactcacttgggggtatcatgcctaactgactgtgcccccaaataacgtattgtgtgctgcattttgttgtttcgtttactttgtttttttttctgatggttctttgcttaaaataagatgcatttaaaccaaattccttagaaaaagaaaaccgctttaattccttcttaaaacttaaataatacactcaatatgaaatgagaagcattttcagccacagctccctaaaatgggaggtacttgcttgaattccttcttggaaacttaaaaaaaaagagtcgtaactcctatagatttcgatgttatcctgaccaggaaaataccatctgaagtctatatcgtttgaaaccagccttcttagataaaaaggcccaaacggtcgaaaaatattggagctctgtgatcataaagaatccaggaaaaacttgaaaaactgtccatgctttcagcagtttcagtcaagaaattctcagagggtcaagaccaagaccatcctgcctggcaaaaggaagcacataattgtaaaacttgatacaaaatttaatatttagttaacatttttattaaaaatatacacaaaaattatttttatcattaattttattattatactaaatgtaaaaggtttataatttaatataataattaaatttaataataaaatattaaaaatattataaaaataagtataaaaccgtgtatttattgtgatgcaaatttacatcatgccatatgatttaaatttggattaacttttgatacattattagagcaaattttttacaagatgtgttgattgttttctaaatagaagctttcttctttaatagagcaccaatttgtatttttattaaagatgttcttagacaataagttgagcatataaggcttaaaataatccttaaaagtattgttagagtttttctaaatatttatgcgaggaaggaaatgacttttaggataaatgtccttaatcatgtttaagtctttgagaatttttcttctcttctttattcatatataatattatgtagggtaaatagcggcataagtacccaaagttttatgtttgtaagcgacataaactcaatgtttatttttagtggcataaggacccaatgtttgtaaaactgtaattttcttccagttttgtcagtaca

SEQ ID NO: 325064 - DNA, 811 bp, Cannabis indica
tatattgaaatgagttttacttagggcataaaacccaacaaattcttgcttaacttgatacccctaatcatcccattacataaggcatgttcaagaattcatgatagaatattagcggcccaaatgaaaaggtaaggggaaaaagggtctccatgtctgatcccacactcaaggttaaacctaccgactttatcaccattaagatagacaataaataatgacgtggaaatacattggcggacccaattgtagaaatttggaggagcctcaaaactacggagcacatgatcgatgaatttccagctcagcttgtcaaaggctttgaccaggtcaatcttgatagcaaataaaccttctttacctttcttgagcttaaacgagtgaataatttcctggaccaaaacattgttatcctaaatattctatcctggaacaaaagcagtctgggtaggacagataattcggggaagaatcggcctaatcttgttagcaatgatcttaaatataaccttataaaccacattacatagggaaatcagtctaaactgggagacttgttttgggttaggcacctttggaataagaataacatttgtagcatgaactcccttatgcattatcccagactggaagaagtctattactgcgtcataaaaatccatacccacaatttgctaatagtgcttgaaaaaaaggacagacatcccatcaaggcctggagccttcatgttgggttttatgccctaaataaaactcatttcatataatcagatttaattattaataaagatcagaaataacattttatgtt

SEQ ID NO: 325065 - DNA, 1008 bp, Cannabis indica
tctctctctctctctactctctctctctctctctctctctctcctctgttttctttctttgctctgttttgaagttttcatggtattagagctccttgactcatgtccatggcttcctctggtgataactcgtctccggttggtgttactgatccttggccttaggcgcctccaaatgctactgtccctgttcactggaatccgttctcgaattctttaacttcgtcactcaccatcaagctcgatcgagccaactaccttgcctagaaatcccaagtagttcccacggtcattggtcatgaccttgatgaaatactgtttaccagtatcactcctccttgcactcttatcaatggtgatcccaatcctctgtattttcaatggcgaaagaaagaccaactactcctttcttggcttcgatcttctatgaacgaagccattcttggcgctgtctcaaattataactcttccaatgctgtgtggatagctcttgaatagaaatttcctagtcagtctaaagctcgattacttcaactcaagggacaattttccaatcttcataaaggtaatctaagcatttttggctatgttgataaaatcaagtccatctgtgattctttagctattgctggtcattcaatcactaatcttgatcttattcttcacttgctcaatgtcctcggaacggagtttgatcctgtcgtttctggtatcacttctcgaagtgatgctctcacattagaagaagtccaagctcttctaatgtctcatgagactcggcttgaaagacacacatccatgatggatctttccacaaaaatggctgcaaatctcacatttggctccagacctggcccttatcaacatccttttgcctatgggagaatgcctcctggtgaacaacaatcaaggctgcctaacagaaactatggctgtcctccctcgaataacaagcatttgtgtcaattatgcctgaaatatggtcacactgcagccacctgtcattac

SEQ ID NO: 325066 - DNA, 529 bp, Cannabis indica
aaacagaattcttcgcacaccttccgttcgtagaaaatccaaagctgaaagccacggatcagccctaaaatcctcatcttcactagcatcgccatcttcaataaccttcctaatatactcctgagtaggaattagatcctcatagaacaacataccgtcttcccgagatttccgttccatggctaattgtacggctccggctgggccgggaatgaggaactgccgccgtgaagaaggaggagatgaggatgaggggttggggttgggaagagagagggttttggacgcttgcaaggtttgagaaaggggatttgatcgtcgtctatgtcgagagcttcttcccagtgttcatcttcttccgtatttttcggcattttggcgccaaaaatggataaaagagagagagagattatttaactttgaatttcgttagttttgtaggggcttttttcgacatttttacaaatattgtgcaaatattagccgaggagttctatttgtaccctacaaaatgataagtacaactcaa

SEQ ID NO: 325067 - DNA, 991 bp, Cannabis indica
gaatgttgatgttgattttttttttaaatttccaagaacttagcaaagtcctcatcaagtttattcttcataaatatttgaggataaggaattggcagtttattcattgaaagatcctctttcttcatagactttacagtaggcttctcttcaggaatctcttttttgacttctactgtgtcttcaacctcaggaccagttgacttatcttctacacccccattaagtactttaccactcctcaatgagatggcattgcattgttcttttcgattgacaaatatatcactagggaaattactctttttctatacaacactcacattattggccaattgtcccacttgcacctctatgttcttcatagaagcagtaatattagactaatgagtctccatgttatccaaccttgctttattcttgttaaatctcttgtttgtctctatcatgaaagtacccaaaatgtctattagtgagttcttatcttcttgttgttgtgcattaaacccaggaaggtattgcaagacatttttagtgttaccataagaaggattttcatgctttctcaaccccaattagtagtaggtaggcattggagcacccccagtaattattattataaggtttagtggtcatatattgtgcttattcaatactcacctcaatcccttttgatgtagatgcaacagcaacattctctatagctgatgtattcttctaagcagctaagacaaccacttgattagataaagtagaaatttgagttgatatatttgtcataggatccacttcatgtaacccaaccacttttcatggagtatttctttcattagggcaattatagctattagtggtcatctaatctagtaaattaatggcttcagttgtaggctaagataataacgctcctccggcagcagcatcaataatactcctagttggactattcaacccatagtagaaaattgaaacttgcatccagttctcatag

SEQ ID NO: 325068 - DNA, 1499 bp, Cannabis indica
attaaaaaacaaataagtagttgagtgtattttttaaataaatttataacatcctaatgagcttagattactatctaaaaataaaccaaggctccaccgacattctagaccgtttgttcatccatagccactcgcagcatacatactaaaactgatccagctcatcaaacttatattcaatattccctgtctattgcctatagggaaaggtaaggggtgagttaaaagcccagtaaaaaatacttttaacacacattgacattcaatacatcatacatgtcttaaattcacaataatacaactatatacaataccatcatattctaatgtattaagtatttcaacatcatactttaaatgatgacaatatgtaaataattttatacatggaaaattatatcatatacgtccatgctaatccaaaaccataacatcatatgtagagatcataatttttatatcatattcatagattaaccaaaatactatgaaataagcatatcacaaccatatcacaaccatatcacgccattcatcatatcatggccattatatacataattcgggtctatactcgccctacaataacttgggcacatttagccctactattgctatagaataaggtatctctacattcaacaacaacgtcattgtatcatacctcatcataacaatgtcatacacgaatcagacaaattcaggatagtgtatctctacattcaacgaccttaccttgtatcataccccactatggcccctcatttatactgagacgttagcatacaacatacagcatacatcctatacaaatcataccaaccataatatatatcaattcaaaagctcatattgtgtccataccacacattctcaatattatatacatattcataataataaatcacaaatcatattctaatacacaaatagtttaaattatacatttcaacacatacaaaactacatatccttacctcaaatcccactgctcaagacttgttatcccgtcactactccatataataaggcatgagtcaaggccttaacattacaatgcatacccttacagtacaatagaaagaacattattttttactcacaactacacgaattcagtaaaagttaacttcataaaaattatacaatttatttatctttccaatgatatgtagatcattaaaaatggattacaactgagcgagttatcataattttaccaaacaaatttcttagaaggaatatggagtaatgaattacaggactcaacgaaaacataaattttttgacatagaaatattcagaactagagaataatatctccataaaagttttagaaaatttacttccctttctaatgatattaaaatttttgaaattagaattatattcagagagatattgtgattttaccataatagtttttaaagcacaacgttaaagatacgaattacatggtacagaagaaaaataactttttgacatagtataactccgaa

SEQ ID NO: 325069 - DNA, 1579 bp, Cannabis indica
ttaaataacatacttatgagtagatctaagatcctggtaaaataaattccaacacttttagggccaaattcgtagtccaagagttaatgtcaatgtgtagaagtgcacatgagaccctgcaggacacttcttagccgaccaaggtccctatggagggtaggctggccggccatggtgcagtcccaaggttggccggccatagggcaagccaagggttgccggccagctcctgtgagggagctggtttgtcacttgatgcccgtttaagtgtcggggtcttcgttttcttagatgttgacttggccttcttattggtgagttgtactgccacgtggcaccaattttgtccacgtaagcatgcctcgtcagaaggacaaaatttgggatagtagatttaaatgacttgattaactttttaatagatattttgatctaaattaagcaaagtcacttgttgataaattaattaaataattttgaataggtaaatttataatttttctctcatctgggacataacttagaaacatgataggtctatccaaatatgtgatatatgtaagcctatgttttgcttatgggcttaaatgcatatatgagcccatttaattttggatatttaaatggactagggttgctaatgaaatttgatcacattgatagatttatctaggcctaattagaattaggcctattcaatgaataaaagaaatttaaataaaggttaaattcttctcttttgggccttgtgtgagagttatgtgggaatagtagtggatacaacatactgaacccaaccctccctcacatgaacaactccaattatgaatgcccaattgtcttatttaaataactgtataagggtaattatattagtttaatctaataaaacttattggaaaccaaaactaattctaaaaatatttgaaattagtcttgtaatagattatttttggattaattcgggaaatatacacttagcttaagaaataattctagataattgatttctaagtaaactagtttgtatttatctaagtatttaattcaatagaaaattaatatttacgttgaattttttctttaaattaaagatacttaaatattagatatttttgacatttaattaaaagaaaatttttatttttgatggaaattaattttaattaattttatatcaacacaaattagaataattttcataattattttattctgttttaattaagaaatttaaaaaattatatatagtttttaatatattgattttttttgaaattaattaaatttatttgtagaaaaataaatttgagttgaaaattaatttctgttatcccaattttcgcactctgacgaggcatcacatgaatggtgacacgtggaatccacttgtaccatctgctcgggaagcatagtccgagcaggatatctcgctggcatgcccagagcaaagtattcaacaatccgcgcagagcgaccaacacttagcgaattaagcttttgcatcgtgagtcatcagcacaatccctataactcagggataaatttacgtggatatggcatacacacgatcccacta

SEQ ID NO: 325070 - DNA, 612 bp, Cannabis indica
cgactccgctatcggttggccaaatctgaggtcaacagatgcgaagttgaagtcgtaataatttaattactctttatataacaaatattttagttagctacgttatatatgtttattaattgaaatatttataaattttgaaaacagggcatacaagacgttagggggggtcaaatgcgtttattgaggcgtatctaaaaatatcaatagtaaattacccaaaacaacctaaaaagtaagaatatagtttttatgtattgaaatacatcgttgacatcatcgtacatgaaaatcctaacaaatactcaactaatgtaaaagttgtaagttttaattattaattatcttatttattatattaacaaataatataatatataatctcataaaaatatttacctctttttacattttagggaaaagaagacatatgatacaaaacctgtgttgttaccgttacaacgatagtggatagaacaattgcatgcgataattcacgaaggcttacaatgatgctgaattgtatgagagtttttttctcttatttttctatgtttaattagataactagcaaacttttttttcttattatgtttagttagataataactt

SEQ ID NO: 325071 - DNA, 993 bp, Cannabis indica
ggttgttttggatgtgttcatgttggtttatgtgcttcaccgatgattgaatgagaattacaatttttttacaaaaaatatttttatttttgttccagaagtattttttctagaaagttggtaaataattaatcaatttaggcttttacagaaattaatttgtatttaaattgaattagttatattttttgaagtttgaaaatatatctaggttagggttggtgctcgtgtgcgcgaatctgaggtaaagctcgatcaaacaaggcttcaaacaagccctgtttgagttttctcggacaaggggctatccaaagctacccctcactgagaaatgggcctcacgaaccctgcatgcatcctctcctctcgactgatttccccatttttgccattttcaacttttaaaaattatttttcaatgaaataaaagtctaattttggtagaattttatgtggaatcttatttttcaaataaaatataattgttagattgaaattaattttaaattagttttagataatagtaggctttaaatttgaaaaattgatttctcaacaaagttgctatttttgttatttttgaaaatttatcattttttatttgatttattaattttaattataagatctgatatttacatatataaaatatgaagtgatcttctgaattgcacctcgagtacaattgagtgttgtaccacatgcactacgtactcgtcccgtactagtattggtaatgttgtgtcatacccctaaacaatatatactgtaccaatgcactctgtaccgaaactgtactagtgttgatagtatacaaatcacataatacaacatgcatattgttatcccaatttttgtcctcttgacatgggattcttacatggacaaaattagtgccacaagacattacaactcaccaataagaaggccaattcagtacctaagcaaatagagaccccaacactcaaatgggcatccagtggcagactagct

SEQ ID NO: 325072 - DNA, 543 bp, Cannabis indica
tttaattgtaaatctgagaaattgaatttaaaatatgcaaattggggaaataaattaattaaattatgtaaatagaatctattcaaaaaagaaagaaattgtaatagcatgtgggaaaagggcctacttgcaatgttttttttttttttaaataaaaagtaattattttttcacacaattgatttgtttaaatcattattaaaagttcctttcatcttgttccatctcaattttttttgtttttttgtttctacacatatttgttacactttcttataattgagtgtttttttggtatcaaactctttgttcatattctttttaaattaaaaagaaaaacaatctttttttatcaaaaagaactcatatgtatccttcttctcactaagaacatttcaaataaaaatgcttttaagaatatttgatgatatgaatttatttttggcatcttttagtaaatacttaccattaaagtgaaaaagaatacttaataataatattttttatattttctcttttttaattattattattttatcataa

SEQ ID NO: 325073 - DNA, 1454 bp, Cannabis indica
taatattattaaattatatttttatcaattataaaaaaaaaattataaactggacagcagcagcaaccaatctccctcagctgatcagatggattgggaaggccaaaatcacaaagtttcgaaagcttgtgtttgccgctgctacaacagccttgatgtacaacatttggagacttagaaatgatatattttggcaagctaatgtcattaataccagcaaaatgattgagaaaattaatgggtgtgtaaagatgagaattgctttatttttacctaaaaagatcaaagacataaatagagattggtttaacaaactatagaagagaaatgtatagaaagtttgattgtgtatagattgtttaggctcggttgagggtgcaaataggatgtaaatatcgatttgtgcaatataatctctaatttatcaaaaaaaaaattatatttttatcagttataaaaaaaattataatttataagaaacttagattgatattgtttgttaataataaaaatataaatataagtataaaatatttttaaaataaaataaaaaattagaaatttaaatatttttaaatttcttttaaaaatattttatttttgtaatacataataaaattttagtaaaaaaataatttattatagtctttaataaaaacaatttttttttaaatttgggttgtactagctttagcttttagtatgtaattttcctataaattttcttataaaactgttttttaacttgcttaccacatactttattatcatagcttttttgtagtaagcagcttttagtttttcctaaaaactagtgttaaacttgctcttaagggtttttatttttttttaatgttttttatatatgtaataaaatataatatatttaatattataaatttataatatgtattttccatcttaatattggatggtattgaatgatcattgaattagatcggtcggttagattcattggatttacatgtcatccaagaactaaccgatcaaatattagatttataaaaatattatccaatccaatcatgaatatttaatttttagtgttcggttgacattggatcggtattgattttttattagattggatcatttctgcacagttatagttatttaaggtatattgtaaaatttaaaaaaaatttagaataatttagaatatagaaattaatgttcaaaccatttattttacatgcatatcaaataaaataaaaaattataaaaatagaccaaaaaatttgaaaaaaaaaaacttaaacaaaagtaacttcaacacggatttttttttgttttactctgtgaatttttatttacaaaaatatctcttcagtaaaaataataaatcgttttttagttgttttatagtttacttatagttttcattgagattagttttttagtatatttttatagtttattttataattaattaa

SEQ ID NO: 325074 - DNA, 2862 bp, Cannabis indica
aagactgctttgccggtcatgttgtgttaaaaaaggccttatggccagacaaatataagaaaaggaaaagagaagtagttagatagctagagtcccaggctctttgtacgggtcttctaggccggtcggagctggaggatctattgtctaagcggggggcacgccaacttcctggccaaaggcagaagtggtcgcctcgggttgaccataagccacctaagaagcacaatactcgagaaacatgtctttggaatcaccctagtaatcaaaatttacgttgggattagccttccagaagtaataaaaaacctcgagacttgctgtgtctaaggcatgtaccttctctccaagcctcctcacctccgctctctactgctcagcttatgctctttgctgttcagcctccgatttgtgcttcttgacctcagctttaagctcctcctccgtagacttcttctctgcttccaacctacggaagacagtccgaagaactcccctttcatcctggagactgttcacttctactgatagggtggcaatggtagcttcaagctggtcgaaatcctggaggtccttagtcagctcggctaccttcttctcggtggcaaaaagtttcttgttgatttcgccaagttccattcggacagctccgagttgaaccctagcttcatcaccatccttctaggtcaggtcaacttctgtcctcatagtattgtacatgggagtgttcttggatgcagcagacttagctcaagatttagtgtaagccatcttcagacaaccacagaaaaaaacatttgagtctgagccaagtaaaaaaggactaaaggaagctgtccagaaagactcacctttgtaaactcctttaggactcttccaatcaacaactctagggaagattcgttgtcacctccggccagctgctcgttcaccttagcaaccagccgattcatttagtgagtgagcatctccttgccttttttggtctctggatgcagtgatggaggtggggtagtagctcggatctgctcagatccacttttggcaagctcagttccgcctttcaactgttcgggcctctccaaactttctcctcgagagactttagacttagcagctttcgggcctgaagaatccacaatggttagctcctcagaaagatcgataacagcttcggctggtgccttctctctagacagtgttgtcccatcacccttaggcttcttgggcggaggagatgagcttgagcttcctcccactctcttattcagaacttcaagcatcttctgagacatgtctgtgcaaaataaaagtaacgtggttagaagaaaaaagcactagaagtataaaagtgtaataatcaagaggattaaaaacaagacggagtatcctacgcttcgggagaagcgtttgcctgagcaagactcgaaagttcatcatcacctgacaagtctcctatctccgccatgacagttttcccctttcctactacaagagtggatggtcgagcaggtgaactgggctacctatttcgaatggcatgttcaacaggcgtgggctcggccggaagtgtcttcttcctttttagtggagtcaccggctcttcctcaacctcatctttaggattcagaggctcatgagcatgctgttttgctcctgcaccacccttcaacatagcttcacgcttaagttgaattagttcattctccttatgagctccctcatcttggccagcactggacttcctcttcttctccttcacatgtcaggcaatgaatccttcgggtaaagcccgtactccacaaagttgtcctcggaggtcaacaaaatgatgtttcgggcatcacccagcagctgagtaagattttgagctttatccttgagagcaagtgtgagggctggacggttatatacaggaatctgttggaaccgagtataggtggtacccatgccttccaccatatagtattcatcagtaaaatgccaaattttgctaatgcccttgtccactgtgctcgtcaaccacttgaagtctggctgaaaaaagtagaaatatcctgacctaccttgtttgggagtagacttgaaatcgaagaaccagccaacctcattggcagaaggcatatcccacttctaggtggcatagagaacgaaaatggcagatagatacttgatgcccttaggagtgaactgggtcgggcagagacaaaagaagtctgcaccttcctaaagtacgggtgcagaggcagcaatgcccttgtttagcatgagcaccctgttaggattttatgccataaataaaacccattacaatctaatttgatttgttatcaataagagattagaagttatttattttaacatgtagttttcagtcctaaacatatagtgattcacaattacagtgatgtcaacacaatagaatgtgattgtgattatatgattcgaaagataataatgtccttgtttcatcagtgcattggatttacactattgtgataatcagcgatgaagtgtacttacactttgcataagtgttatgttctttccagaacatttgaaaagtatactagcttcgaatgtgtggagtatacattggactggaccgatattgatcttggttaagatattatagtacttaccgttgtatctttccaagtcaatatcactagttgatcctagatcaaagatctcaatcctgatatgcttaggctcaatctcaagagtgctattcatgttctttgatttgttagttaagcccacttttgggtcagggtcatacgtacattttgggaacatgatagtatgattgagtaggagcgctgaacataaatatggaatctatagcttctataggtagtt

SEQ ID NO: 325075 - DNA, 900 bp, Cannabis indica
gcgttagcaaaaccttaatgcaacttttgagaagcataaaaaaccataatcatatttcaatgtacgtggctctagatgcaagaaaatttactatactattaattatttgacttgaacaaatttttcattggaaatctaaaaaataatgacaatgcaacgggataaacattagctacagtattgatgcattttttcagattatacctgattttgaattgattgggagctccacatttatttattagagatatactttttatgaatctaaaaattgatattaggaggattagtttgatgcaattaaaattgtaattcattgttaaattaatgtttcaaacaagtttttctgttctttctttcatcaatgcaaaacaacatttgtttgaatggattttggtctttttctcaggtgaagtcaccaaaattaattatggttttttggttggttgggtttcatttcggttttcttgcggggttgatcgatctaagcttgcatcacaaggataacaaagtgtttgtttttataaatgacacattccttgaagaagactctattaagaacttcaagccgcaaagaaaagtagtgttagaggaaatactttcagaaataactccatctattgttccatcatcttctactcaagtagaggattatcctaccctctcggttgaaccaatacaagttgatacaattgagaaatctaccacttaagttcctgttcaaaaggtcgcggctcctcgtcgtagtgggagggtttccacaaaaccagctcgttatggcttggatggtgaaatcaatatggtcgttggtgacggtattaatgacgatccattaacccataattatgcaatggcaagtccagatcagaaataatggtcagtctgttggaaattatttta

SEQ ID NO: 325076 - DNA, 1691 bp, Cannabis indica
attattattattatttctctcaagagatcttagggtttccaacatttttgttggttagaggacttgattattaactccgatatttctttatatttgtgcgactgttctttggacaaggttctatatcaggcgacattagtcatttgattgtctgttttgatacttttaaggtttttgaacttgaggacaaggtctcctactctgttttggaccattctaaattcattgatcgaatcagatttggcatttgagaatactcagcactaggttgattgtcaacttaggcactggacccagcactaggtcaacctgggcgctgggccccgtttccaagggcttaggtttgtagttttctccctcagtttgtttgaatcttcattatttttgaggaggaaaaaaatactcaacacgttttggtgaacttgattggaatcaatccaggttgacaatatgtcaacctgtgcgctaggtcccaattatggccctccagaaattttgtttggttccaaaaaatagttgaatcgtaatatttcctgaaaatagagaaaatgctgagaagatttctcagaaaatatcattgaaatcggcccaagttgacaaaatgtctacctgggcgttgggccagccctatgtgtcaatctaagcgttggtccttatttcttccctgaaattatctatttctttatttttgatgaagacaaagaagatgcaaaattcggatcgtcgatttgatacttggaagatgcactggggtgcctagacatcagggccccgggtgctcaaaaaatgaatttgctccgaatctgatcctgatatctcaaatatgtccgtggtatgtctagttggtatcccagtgcaaagtttgacccatttgcactaagacggtcccaaaaactaaaaccgtggttaggaatgttaacttgggcgctgggtgaaactttagttgcccaggttggcttccaagttgcaaattcgtgtaatttcagctccaaaaatttggattagattgcttcatgtcttcatggtatataatattgaaagatagtgagttggatttaagttattgaagtccgaacatccatcccggagctcccgaagtcaatctgggagcagggctagggtcccctcctaggtcgactgctatgactctagtctactcaactttgtgatctcatccttcttgctacgtgccaaacattgatatccacgttaccaggaaatttttttgagttaacaatcttatatatacttgtatttcatatattgtctaatatattatccactaaatacttatttttagagcataaatcctaataatcttttctttgatttttgatacagcaagtgttgtgtagatgacataaaatagtggctgggatggagaacatcatggcggcaagttaatgggctattaagatcgatttcaagagcgatctggtcaagttttaagaagcaaataattagtatggtgcagtggtgtaccacctttggagaaatagaaatgaagttttgtggtataataaagtattaacattatcctcaatgattaggtgtatagggcatgatgttaaaagtagattgcattttattttgccaaaagaatattaaaaattgatctctaaattgttgataattgaagataatatctgtctaaaaattgtagataacaaaaaataatgatactcatgggt

SEQ ID NO: 325077 - DNA, 772 bp, Cannabis indica
cctctctttaaaattgagttagccttcacaacgctcttccagaaccaagagtcagagtttttatatttgtattttaggaaatccttcccttttaagtatttcgccgttaaaactctgcaacacagcgattggctaccggtaaggatatgccacccccactttgccagaaacgcccgattcatttctctagtttttcggaacctgaggccgctaagagatttaggaaggcacaacttgtcctaagcttttaaatggagcccatgatttcttttttcaaaaccctaccagaaaaattggcaaaagttaacctatggtcgtttgacaggaaaaataaataaaataaaattaattaatacaatgttaatagtggttattgtttaaagtgtatcatagaatgtgtctatgcactttctagaaatttaaaaagaaatttgtacggtactacaagactagtagtactattatttgtatttggacataactacatcgtgtcaggatatctataataaccaatcatgtatgcacaacaaagtgggggatgtatagtatatgtcgttgaaaatgatttatatatatggtatacgtgagcaacatctaaataaatttatatagcattattgttcaaatgtgaaaattgttgtttgtccacgtataaagaaaattaactccgtttatgtgtgtatattcatgttagctgccttaaagaaacagaaaattataattacaaaaaaaaaaaaaaaaagaaaagagaaaattattaaaaaatatatat

SEQ ID NO: 325078 - DNA, 521 bp, Cannabis indica
tttttttttgcgccatttcggtgccgtgtgtgttgggtgttcccttcccctgcttttacctcctttcatgagctgtcttctttatttgggaaactgccaaaccaaacgatgccttaacctgaaacctgaaagaaaaaaacatgagatatgatagtattttacaatttcagctagtgctttaaaagattttgacacggcgtgaaactggtatgagtttaggagacacgagtatgatctaatacaaaaaatgtataaattttaatataaattggcacaacattacacgaacaatataagcttcagtacaatgatatcaacttaagcaaaacacgacacaacaaacccaaaagacataaaaagtatgcacaaataatctattatgaaagcgtgacatgttaaaaactttatatagtagaacctgttaaaattctttatcactcattaaatatgtagtatcataatttaattctatagataaatatatttcatattattataagtatgaaaaacatagatctaaa

SEQ ID NO: 325079 - DNA, 874 bp, Cannabis indica
tgttttattagttttatcttttttttaaaaaacgaataataatctctattaagattttcagttgtacggagatatttctattaaagattttcattaatttaattttattagatgaaattttattgtaaagatatagttaatgctcgtgtgcatgatctaatttgcttcgtatgagtactgtatacatattggccatgaaaatatagatcaacttaatcatcataaagcataatatattatatatatatatatatatataatgtttttctcttaagatctgaatatataattatgctatagctatatatataaagttgtgggagtttaaaaagttgaaggggtccactgaggaagtaaaagattccttctcacgtgttgcaatatgagaaaaaagactcagaatttatgacatttgatatttactactcattaacgtgtggaaagaaatatatatatatatatatatattaattcagaattgtttcataagaaattttggtgcctattttagtataaagtttgacgtattttaatttaaaataaaataaattaattttagtatcaattataatattttatataaaatctagtactataatcactattgaaactaaaaaatctcccccacacaatttagcatgcatatcataacattaatttagcatttatatattatagcccccacttacacatatatatatccttattcatatatatagggaaatttgattttgtattttttttttttttttcttttttttttgcgttttctagagagaggaagagagacctagaggtccggattgggaagttttttttttcctttgcgatttcagagagaagaagagagagtgggcgtgagggggtggtcgac

SEQ ID NO: 325080 - DNA, 1046 bp, Cannabis indica
tttcagtaccagttttattattccgcatttaattaatcatttaattaaataatcaaactgggattattaaaatacggaatttcataaactcttatgtgtttaatttttttttagagatattcatatttaggacgttaatcaacatacttgtgagtaaatatagatcctggtaaaatattcccaacaaatgacttcagagccatggtaatgatttactttcatgaaatttgaatttaaaatgatgaattttgtttattgtgtcgatttagatgagttcatgttagtttatgtattatttgattaatgtatgtgatttgggaaaaattttccatcaaaaaaattttattttcgttctacaaataatttatttggatttcgtgtaaaaaattaagcaatattggtttttacggaactcgattctaatcaaaattgagaaagttatgtggttttaaaaactgagtgtacatggtgctcaatcgcatgcgccagggttcaaacaaggaagccacacgcgcgcggacaggggacaaatccctgtctgaagcttcgatcaccttgcaacagacgcaacctttggacacaatctgcccactagcatgctgcaagtgccatgaaatctcgcccatgacaccctgctgtcttctccatgcacgtgcgtaggcaacttgcatgatttcagcccaaaatccaatttggggggggttttcacccaatttttgacttttctaattttcaaaccctaattttaaaataaaatatttttttaatattttaaaacttaaataataattttaaattaataatattgaatttttaatagattattattaattttgatattttgaggtttaaatttagaaattgattattttcttttatttatggtctaattttaaaatttagttaatttgtttaatatttatatattatttaattataagatcagatattttaatattagctatattttaaattaaaagataacaatatcttttgatttgaaatattatattaaaattatcttatatgataaattaaataattaa

SEQ ID NO: 325081 - DNA, 763 bp, Cannabis indica
aagtaagattttttgtagtgtatgttgtcctttttagtcgtgtatcatcgtgaatctgatcatatatattgtattttaattaatttatataataaaagattaagatatgtgaaactattctatttatgagaagtttgacaataatttaaatctttaatattgctataaaatcaaatttaattatgattttccttttcttttcaattctcttattttattttgattttatgttgaaaaactaactataattaggtattaattggaaaaaattgaaatgtaagtttttatttttaaagaaggaaactttccatagtaatgcaggacactacgtgtagaaaaggaaactctgggttagattgaaaaattcaatttatcaaaattttccttgtgaatgattgagtcattgtataagttgtccaatatgagtatattgtcgataaatactcacatttggagttagatttcttatctctttcatttttttttttggtattttattcatatattctagaaagggtgtcttaatttgttttgtataggagagagtatgtttgactctacatctatttttatgtctttgctattgttttcggagttcaaagttcaaacaagtccacaaaggagaaaaataaaaaatataagctttcgagagaaagttgtgacagtcagtagtcctgtgatccgtaagggaaaataccgggttagctgtgcaatctcacaccgcctggggaaggtcaagtgggatgattcttagactatgtag

SEQ ID NO: 325082 - DNA, 888 bp, Cannabis indica
agaatattacataattgattttgtctagattcagtgaatataaaatattcatttatctagaaaatcaattatttattttatttccttaaatagaaatatatttcccaaaataaaatattcttatagacatatcttggatgggatgacatatcttaaatgagataatatatctcaaatgatatgagatactgcgaatggaatgagatatcttggatagaatgacatatctcgtatggaatgacatatcaaatctcaaatgggatgagataccacagatgggatgacttaacttggaagggatgacatatctcatataggatgacataaatcttagatgagatgacatatctcgaatgggatgacataccacaaatgagatgatataccatagatgagatgacatagctaagatgagatgacatatctcagttaggatgatatacctcggataggataacaaacttcagatgggataacatataaacaagatagatgacttgcatccaagatgaaaaatacatccaaaacagttgacttatgtccaagatggaaaacatatacaagacgggagatttaaatattctagataaggaagttacacatcttgcgtgggagagatatagaatatggatacctaagagaaaacaactgatatttgtcaaggtatgtaaagatatctcataaaaagtaattgacacgtgtccaaataagaccttgtttggttgacacctaacgataaaagaaaaagataaatagaagaggtagtaagagaggataagggtctttgtgctagggagagatctgttgggttttgtgccctgaataaaatccatttcaatctgattagttatcaatttaagagatttgaagtggtttatgttaacatgt

SEQ ID NO: 325083 - DNA, 407 bp, Cannabis indica
ttgaaactaaaaaaaaatgagaagaaagaaaaactaatgtatatgcataatattaaataaaattaatttgcttgttgtacagtctaagagcaaaatcattatcaaactagatggtaaacttgcaaatatcatatagtacatgtcaaacttattattgaggccaaagttgttccttttgtagctgtaattacatcattatagagagagaacaaaattctcatgtatacttcaaattgatggggaggtaacaaatccctaattaactaccctctcaaaatgtgaatacaaccatatttcaaatcttaaccaaaaaagggaaaacaaaaaataaataaaaaggtagtatgaattgaaaaatattgcaaacaacctgtaaagcataattatggttcaatttgtttatagtt

SEQ ID NO: 325084 - DNA, 942 bp, Cannabis indica
ccgaccgattttcacccctattaaaaatttagtttaaggtgttgttagaattttttttcttatatttataaatggtttggttagaattatactcattgttcaatgatcaatatttcatgtaatatactgctgttgatcatttaaattttttaatttatttttatttttttactatggggtgaaatttttttcaaaaattctatatttttttttcaaaaatactgtataagttttatactgtgtactgtgtcaaatttaaactgttgttctacggttgttttttagttgttccattattgtttttagttgttctgttttgtgttcaactgttgttttataaaaatacagtatttttttttaaaaaaaatcgtatgacaatatttttgtaaaaattaactcaaattctagtatttttagaagttttctatttttattcacttttaaaagaaaataaatgtgttgcaaaataatttacttaacagttttgtcccttattcctaataaaataataataaagttggtgctactactcaaatccacaaaataaaataaattattaaaatgaaatgtgaagaatattactaaagcaattcaaacgaaattggaatgtaaattacttgaggctaggtggccataaaaaagtgcgtgtgtgttagaagttctggtttcgggtaatttatgtggctttatgtaaataaaaaaacaaaattggattgtattgagtaatttatgtggctttctgtaaataaaaataagactaaaatattattatagggtgttattatttatttatttttttttatatgtgtatatatttatactagcaaaaagctacgtgcgaggcacgtatactaaattttatgctaggttttttctatgttatttgaaagtgatacgattaaaaattaaaaaaaaaaagaatattattagttattaggtgag

SEQ ID NO: 325085 - DNA, 1234 bp, Cannabis indica
ttagagaccgaaggtcaacttagggattttgcatgtatttccttttctgtcctttgtattaagttgtattgagtcttaatatcagtgtaagtggaggtttactccaacaatagatatacataattatgaagatatgagatttttttttattattttggatcttcatatgagattaagtagggtagttcatcgaactatttaaattgtctgtactctaaaaaaatatagtttaaaatttttagcggtatggtcacagtttgaatttttcttaaatcgcacggtgcgatttgcggttttaaattgtttctatgtggttcaaaccgcactacaccgcatattatatttatttaggtccatatgtgaaggcccagcccaaagcctattaattattgtattgttgaaacttgaaacttttttctatatttattttagctttatggtatttttgacaagtgttgctcaaactttgttatatttgtgatagtttaattatttggtatagtccaaactgcaaaaaaccgtcactataaaaaactactacttttagtgataactttttagtcacaatataatttttttatgactaaatgtaacttctagtcacaacaaaatattacttgtgactaaaacataatatttagttacaagttgtcactaatttagttttagtcacaacaagtattatgactaaaaatacatttagtcacaacaaattgtaatttttgtgactaatacttttagccacggaccttttagtcacaacataaaaataataatctataattagtcacaattttttcacttttagtcacaagttttgttgtgactaaaagtaagattttttgtaactgcaccgcaccattttttgtcgtgcggtttctgtggttttttagtttcgcaatacgagtacggtttaaaaattttaaaaactacatatggggaatagtttgaagaaatagtcaaaccataccacccacactgtgaatatgccaaaagaaaaggatggaattataatttattttatataatgtgggaaaacttccaaaaggtccccccacaaagcctcaatatgacattttttttcctattaaggcagtttgttttgtttgtatatatattggatggaatcttatatatatatatatatatatatatatgatgatatatgtataagacttacgatctttctacgggtgttttgttattatatatatatatatatatatatctaact

SEQ ID NO: 325086 - DNA, 622 bp, Cannabis indica
aacttaataaaataatggaatctgatgatgattattatttatattcatgattattattttaacgaatcccccaaaaaagcatctccttttataaatatatttgttattattatattgttgtttatttctcttgattgtttgcacttttactattataagtactgaagagtcactatatatctgacacataaaggagtcactatatatgaagttgaggtggcttagcaccaatagtatttaccttcatttaaagtcttattataaataatataatttaatttaataattattatgtaatatcactaattatttacatagtgtaactactattggtttcttatattaatactctaatatcattgatcaaaatcttgaaatattagagtcatatatagttagttttagagtctatttttatttcattctttaaaataggttattaaaactttaatttatttgttgtacctcatacttttacataatatcatacattagttatgtactttctatttatataatttaaatattatatatttttttaattatattattcatttaatttattttatgtgtttatatagatataaataatgtgaaagaaaaagaagaaaacaacaaaaaa

SEQ ID NO: 325087 - DNA, 751 bp, Cannabis indica
attattattattattattattattttgtaacggtctcattatggccattatttgtaaccgatgcctactacctataagtagaggtttccccctccattcaaagggggctgatctgaataaagaaacagagctagagtactcttttcaacagtggattaggcaggccaagcccgaagctcctgctgaaccactatatttttctgtgtctattttatactattcacaatactcgcgtatattatacactatattctttgagtactcgctattctaagggagtactcgcatatctattttttggtatccaagtagcccttgaatactcgcacaaaactgttgttgtcgaaatttgctcgacaacacctacaaatgacaacagaataatataaaataaagacatgtattatcatttaaatcactacccatccgactgcaatacatatttagtcacataacctactttactatgaatgaatacttaagatattcaaactcctctataacatatgtgaacatatcaattaatgacatttataatgtcataatatgcaaataaaaaaattaacaaataccaaccttcaaatgcaaaaaataaaaatataacagtaggtagcgaaaatgacggcagtgagcagcggtatcaaatcacaactggcactaattaaaaattaaaaataaatacaattatgtacacaatattatatctacctatatatatatatactagcaaaaaactacgtgcgaggcacgt

SEQ ID NO: 325088 - DNA, 1618 bp, Cannabis indica
aaataaacataaaattagaggtaaatttgattatgatgaataaagagcatttttcaacttaccccttgtttgaggttcgcacattctttgtttcatatttccaatttgactactttatacaaatctaaaacacaattaaaaattacaatagagtaaatatttttaactaatgttagtaaatacgtaatttttctctaacttatctacccgaacatatttaaacttgctttcgttttaatgctgggctggtaaaatatccacatttttgtgagatttcatagacattttcaaagatcacttatttttaaatttgagttaatttcaaattaagtagtgatttttatcagggctttttaccgcaaccaccgaaaggtagagctagttgggaaaacaattcttagtggttttcaacaacgcataactttaagaaaaaattacctcagcatatgcattttctaaattatttatggaaatacacctcaatatttaaatgttaagagtataacgaatttttaattaataatattgtatgtgtataccgagagtcaactctctcttttttctttttttttccctaaccaccgagagtcattgactttctttttcttctattttttttttttttcctaaaccctcttactcatttgtttactaatactatttgacttgctttttttattaactaggcaactaagtcacgcttcgcgcggtgttgtccaacttttgtaaattatatatatatatatatattatatttattaactgatataatctaaaatataatattttgatgtgtattataaacaaagtaataatattaaaacttaaaacataattttaaaatacatagaaagataacgattttgtgaacaaatattaaatggtagaattaataaagaaattgcatgtgtttttataataaaataaagaaaaaagataacagcttttgaatttaataaactgaacttgtgactgatgatgttgttgtttttaaaatattgtttagaccttttttcttaatagaaagaaataatttaacatacgatttatgaaagtttttacattttattttgtggtataggtggaacattttctccacaaagatgaatgtaggatgacaactgtaaaatacttcgtcataacattatatgtttttaaaaactgaaaaataaggattttatataaaaaaaatattagtgatagaatttttatctatgaaatgtataataagaagattaattttgataaattatgtgaatgtgttaatttctactttaaatgaaaaggaaagtcatgattcatatgactaattatttctataatgaatgtgtattggtctcaatattttgtggtaattaagatgataagtaccgtataaatttggttgagcgctagcttgatcgttataatcattgaaaaataaaatttaatttatgattatttggttatttcagaaattcatatattaagtagttgttaatatttttactaaataagtaaaatattataaatcatgtgtttattattttctctttatttctaaataaaaattggaataattttttattattttatatatataataattttatgagtattcaacaaaaattaataattt

SEQ ID NO: 325089 - DNA, 664 bp, Cannabis indica
ttttaaatttcttaaaaattttgtgtttaataattgaaaaataaattacagaaattaatttatagtggtttcgcttaaatagtcaacctagagattgacaaagagtatatgtggatgaccttattattatgataaaatttatggaattttttctcaaaattaacacatgttcttaaaaatagttcaatattttaacatttatttacatggcataatattaatcaatatctttcatcaagatggtggttattttttttttgctcacccaatcttgatcaccgtatcactagtatagtcatttgctcgcttatattttattcagatttccaaatcgcactatgcatatctcatgcggtgtactttttttttctagctagtcttataaactggataggtatgaatcaaatggatatggctctctgatacaatgttaaagtgagtgtatagtaagatgcataaagttccatttcaaaactaattgacaatgagaaaagtagttatgcagcttatatatggtgtcttgggtaagagaagtgatgtgcgaccaagtttttttataaggaattgaaaatatccattattgataaatcacatatagtttattcactgcaaaaaaaaactgttacttttagtgacaattttgtaatcacaacataattttttt

SEQ ID NO: 325090 - DNA, 1366 bp, Cannabis indica
atcgatctcgattgtattgtaccctcgttcttgcttaatcaataaagagaatttggtggtgttccagaactggagtagagtcatagagtacatcgatctataggacttgaactaatacatatattggtgttgattttattattttactgctttaattgtttctaatttagataactcttttcatccgtgttttgcctccgattattgtttgtgattcatctatcttgtcattgctaaatgtgtgttaatttaagttttagttgatctgattctacacactagtcttaattttccacaaatcaaagcttagtaatcgatcaaaaacacaaaattaagattatttccgctgcaaatttttaagaaacagttatcagtgacaatgacaaaattcgatggaacaagagacttcgcgttatggggagagagtttgaaaaagatcctagtgcatcaaaaggtttccaaaattcttagagatgggaagttattggctaaaaagaaactagaagagaaaatagaaatgaaagagatggtgtattacacggtcattatatatctgtcaaacaatgttcaaagaaaactcgttgcagagaagacaacaaaaagagtttgggataagttggaagaattatacttaaaactatcaattgtttgcaagattaatttgttagaaatgttatacggttttaaaaagatttcttcaatttctttaagtaataatattgacaggtttaatgaaatttttataagactgctaatataaatcatgattaatttatataaaccattacaaactacgatcatcagtttctcttcatctgatatgagataaacaaacatatattccccattagagtacaccatataatatcacccttccattatttcatcaatttaatattatatacataatattatatacagtataattttattgttttgaaaccaaaagtatatttttcatccaataatttgtttaaaataaaactcttcatcaaactttgatcttctctagctactctgcaagaactctcctatcgatttgattttccacctctctcgtgttagtatcctctattttgtattctaattaatttgaagtatattatgttgagaaatactaataaaaaccagtagtataaacaatgtctctatctatccaaggtagaaatttaccaaataatgcatcaccaagaaccatatatatacctcaacaactttcaaaatataaaaataaaatgtgagaataattgataaagcaactacattagaacaaggaaaagggtcaacttaattaacttggatcttcattgaaaacaaagacagccaccaaaatacataagaagctgatactaggcaaaatgaaagt

SEQ ID NO: 325091 - DNA, 2372 bp, Cannabis indica
ttaaatttctaactttttattttgttttcaaaaatattttatatttatattaatatttttattattatcaaacaatatcaacctaagttttttataatctacaatttttttacaagtgatgaaaatataatttaaaaatgttaaaaattattttcatcaaatgcatacaaatttatactatgaaaaaaataattaaaaatatataaaaaataaaaattttgatataacatatttttgtatatatatttgtgattataatgaattagatgaaaatattatcattttataatagaattttaataactcccagcactttagaatttataatttgccaaacactcagttcagctttttcctagttttgctacaactgttttttttacaacacagctacaactgtttttcctcacagcacagctgtgccaaactggccctaaataattaaggctaaaataacataatagagatttgtgagtctacctaacatacatgaaaaaattagggattaccttgggaaatttacatggtatactaacttttgccatttttttacaaaaatactgccaggcggtattttttacttttttactgtatttttttataagtttcatactgcagtatactttgttaagttttcactagtgttctactggtgttttacttgtgttttactgttgttttgagttatactgctttgtgttttactagtgttttataaaacatagtatttttgaaaaaaaaattcgtgtgacagtatttttgtaaaagttaactcaaattctagtattttcgtaagtttcccattacctttgatgaagacattatcgacattgggtggtgtggtcgcagtggtccgtgggttgtgtgcgtggtgtgttcgcgaggtcgaggtggtccgtgagtcgtggatcgtgtgggtgatccgattgtgtgttcctccgtgtgtgtgtttatagagagtgagagataaaaggagaaagagaaagagagagggttgttcaaatgggagaatgcagttttaagaaaaaataacatattctattaatattgaatagcataagtttagaaaaataattttagtccaataaatacataattagtcaaattttcctttactttacgaagacaaaacaaaataaaaagacataatattttttttaacatttcaatattatatttcttaaaactaatataaatcattaccataaataaataaataaaaaaataatctttattttatttataatcaatctcgctgtacatacaaagtggcttcctataataaaaatctatctaatttcattttttcttcttttaaaatctattaaaattataataataataataataattaatttggtatgtacacaattgtttctattataacaagtcttccttcacgagcttctgccagacaaggaagtgatgataaatctgcaaaagtgaaaaacatgagaaaaaaaaaaaatactggacagttaattatatcattaccataaacttatgacaaatctacacttaagtttttgtaataataacaattagatttttgatcattttccccattagtaattgtttcataccttatgatgggcttcggatgtggtacagaagaagcaaagcacttgtttgaaagtggtggtgccacaagtgttgcagaaggcttcatacaagaaaacaatatgtagtcatataactatttcactcataaattagctactgaatctaatcgaggttactggaacacctgcctcattttcactccttttcactttatttctatgttccaaatcatcttcaagctcttctaacacagcttggtgtggagcatatgaacccggcatgactttttcgatatccatcttatctgctaaagttttgggtgaagttttggttggtgggctgcttgatgatgatacttcactgtcaccattctgatatctgatgtttgctgctaggcatttcatggatgaagaagtaacagagcttatgtcaacaacttccccactagatttacatttcttatgttgttttcgccattatgccttctcttgctgccttgatttgctccatctaaaactgttttgttttcatctgacttatctggttgtgcacaaactccatcagagaagacaaaattaggtatgtttttcctttttacatggcaaacatggatcttcattccatagcatacagagatagctttaatctcaccttcaatgttagctgtcgtagacgagattcaacccaacctttccacactctcaaatcatcaccattttcagcattgatgtctatttggagataatttttatatgtttcgaaaaagggaaatctctcaaaaagtgtatcccacattgccttgttcgact

SEQ ID NO: 325092 - DNA, 1434 bp, Cannabis indica
taaatagtgtcactaaaaggctaaattatagtagtgtacgatccctttcagaatttctctctatagagcaaagtccctagttccatctaatttctccaattcaaattttgccattgatgacattcaagtttcttctagattgcagcaaaaagaatctagattttgtgttcttgatcgattaccaagctttgatttgagctaaaattaagatttatggtgcagaatcaagatgatcaaaactttaaacaatcaaataattagcaatgacaagattaacaatcaagaacaaccatcagataaaaaataggggcaaacagagtatttaaaccagaaacagtaaatgcaaaaaataaagaaatcaacaccaagatataaactggttcaaagtccgatagatcgatgtgatctatggctctactccagttctggaacaccattgtaattcttttttattgattgagcaaagaatagatacaatacaatcgagacgagattctctaatgagttctcacaaagtgtttcaactctcacactttacactcaagaattttcttcatctacaggagattcttcttaaaaaaatccaaacccaatctctctcttttctttagttttggaacctgcattgtccttttgatatttgacaaattttttattcaaagtgtcaaaacctgaaactaaagaaaaaaaataatgtaaatctgtttccaaaattgatatttaaaaagagaagagttactaaaaataatctaaataattggctaaaaatagcctaacaaccgacgtgttgacgaacgcaaaaagactattttatatagtgtagatttttattgtcttttttttttttttttttctctttctactcccttattgaatttgttaggtaaaaaataaaactactatatttgaatgtggcaacctatagattaaaagaagtaaaaagtcaactaataaaataacattaaaattaaatctactacatagggattgaaggttgccaaaagccaaggttttaacgaatcttaaagaaaataccaaattagagtttgaaaattttcaaacttgtctttatagctaaattttcctaatcctagttaggccaaccttattaaataaccttaattaagctttacctttattaacttagaaaaatagtacaaaagtgaccaaactctcgagagcattgcctaatgagcgtgcttaaaaacatatttctcatacatatatttatttggtatgctatgatacatatattatactataatactatccttttctattttagaataggatataaataaaaaaatcttaattttgttagataaaaaaatattgattttattaaaataaaaacaaatatatgtgaggatataaataaaaaatatacatttttaaaaaataaaatataaaaaaatatgtgagaataaaaataaa

SEQ ID NO: 325093 - DNA, 1517 bp, Cannabis indica
aaaatttaccaagtaaatttcctaacttattaatttctcctcactccactattgtgattacatagtacggtgtatataccaaagatagatacgctatgaattatctattatttcaatccaaataatcaaagatcctctatagatgatttacatcgagtagggacaaatttccgttctacccttcaatgtattttattcttaaaacacttagctacttgtaaatgatatttcagtaaactaatataattacaaaaatcagcgctttataatatattgcattaagcaaagcttgaaagaaatcattgtttcacttctaatggttatagaggctatagattccatatctatgactagcgctcccactcaattacactatcatgttcctaagatataagtattgggccaatcaatttggtcagctttaataaacaagttaaagaacacaaataatatatttaagccagaacctaaccatctcaaaattaagaactattgacctaagatcaactaattgatattgacttagaaagatataatggtaagtttatgatatcttttccgctatcaatatcgatctagtccaatatataccccatacatctaatactagtatactttgctaatgtcctggaaaggacattccacatatcattttgtgagtaaacttttttgttgattattatgtcagtgtaaatctaaagcactgataaatcatgagactaaagactttgaagcatataatcacaattactttccactgtgatgacatcactataattgtgaataactatatgttctagatttaatataatttatattaaatgtgaacaatgcaacataaaagaatttttgatcttttattaattagtaaatctgattttattgaaatgagttttattttaggcataaaatcccaacaggttggtcatcaacttcttgagtttggttgatccacctgcttgaaactattgttcagtgacagaacaaagtcattccagctctcgctcctcgagttattgttgtcatgtgtgttgttggttatcctaggacccagcttatcaagaatagggtctataggccttggaacaacttgttctcaaatatactaggagagagagtcataatggtggccggcaagggcctggccagcatgtaacacttcctctcctatgttgctttgttgtcttccaatgtctcctggcactaggaactggctgcttgtgccatacggtctatccgacaagattcgatcgttgtcaagcatgaaaggttttgtcatcgtggtcaaggaacttagttagaatttttgtccattgtctacatgcctgtggacccttcctgatctctctatgagcctcctttgtaaaggatctctcattaaatcctaacctcttatagcagttctctcattgaattgccttcttaggttattggcctcctaattacgatagtttaattttgccttgtgggcgcaaaggatgtaatcctagtctgttgggttatatgccctaaataaa

SEQ ID NO: 325094 - DNA, 1028 bp, Cannabis indica
atcaaggaatggcttgacactcaatttaaaatgaaagatttgggtgaagcaacttatgttcttggtattcaaattatcagaaactggaagaacggatcactttctctctcgcaagtagcttacattgataaggtgttggggagattctcaatgactaatactaaaggggcagtgacgccttctagatcttgtatctgtctatctaaggaatagtttcccacttatcctccttatgcttcaccagttggaagtctaatgtatgcaaatatttttagccttagtgattgagtgcatgccctcccatagcaggttagtcctcaatcatagtgtgtaagactttgaagaatctaaacaactgaaggagaatcaagctcagatcttgataatactctgcgacaaaaaggaataagggtgagagatctgagtggaatgagtcattatattccactgcaatcaatgtaaggtttctcaaactttatatgtgtttaagttttattgttttagaaattcatatttaggatgttaataaacatacttcttagtaaatctagatcccggtaaaattgtttccaatagttcctatcttagaaacaattgtatttcatggcacagcaagaagcaaaatttaatctctctaaccactgcaaaggctgagtatattgcagcgagtagttgttgtacccaattgttatggatgaaacaaatggtggcagattatgggttagatttgaaaactttaactattttctatgataatactagtgctatcaatatttcaaaaaaatcctatccaacagtctcgcacaaagcacatagattcgtcatcacgttattagagagcttgttgaaaataaaacacttgtcttataatatactgaaattagcaagcggatagaagatatttttacaatagctcttaactctgttcgatttatctctctaaggaaatcctaagggatttgtactgtttaatgtttgtgttcttcatggtccttaatttttgcattgacttaaggttcataatgtct

SEQ ID NO: 325095 - DNA, 1236 bp, Cannabis indica
tttagcacaagtactactttcttgtaatgtaaatttgtaatgtaaatttgcatataaaaatattttcatgcaaaatttagcatgaaaaaagtaggatatattctggaaaatgaaactccaacaaaaataaggcaataagggaaacttttatggaaaaattttgcctataacttgaatgttcgcatcttctttatcatgaactttcaatattcacactattagttagaacacattgagtatttgcatacttcggtaccaagctattatctcagagtttgaattgcttaccaattggttgtttcacagtgatcaaatgtttattcaaacgcacaaacattaaatcattgtgaaacaccgaaccattttgtttttctttggtgttagctttgttactttttgtttattttattcaatcttaaattgttatctatttgaggaaactctgccttaaattgcactcacaacacgctgaaaagatcttctatctttcagatgagagatctctctgacagccagatattcgaatctgagggtggagcatttgcagatgaatctcaaaagactgacaactttatcccaacatcgcaatcaaaagacaaggttccagcaagagtagatcaacaagacttgtggtctactggcgagataggtcacatggtccaagagttagaagcactggtagctatcgagatacacggaagtgcgtccaccatatctgctcaagggagctttattagtccaaaggttactatggatgtggaagtcaaggaaatggggtaggactttgagttgctttcttgcggggatgaaagggatgatgatgaagatgacttaaattttgctgaagacgcacctttggattagccattttcttacaaggatttagtttcgccgataaggaagtctgatttgatgacatttcaattgaagttaatcaatacttgctgtacaaaactcatgtcgatacaatgtcctcaccaacccaacaattattccaacaagcgtcgttgtggttttagtccccatcaattgatgtggtgtcacggttcctttccatcattttgttaaaatgattttgacatattatgatggttttcccttccaactcactcccaatagctatagaattatcctcatattttatgcgatgtatatagaatacatgtaaggggaatccactgtctaggatgtttgctatttctatgacatcaagaaagttagtgttgggttttatgc

SEQ ID NO: 325096 - DNA, 2081 bp, Cannabis indica
cgctgctcattttctctgtaaagttttcgagagaaatcaaatctttttttcctctctactcacaagttaaatacaacaaaaaggagagtaaattattatcagaataataggactggacctctataacatattgtgttcttagttttgcttactattgattatattctttttaaatcttattgatttcttgtcgcttttacgattcagtgtcgttggccaaaagcgaggtcaacaattatttctctaatgtctatttctaacaataggtcttattttctactatgcacacataatcttaaaataataattaaattctaaataaattgctatttgtttactaattttgtgtataaatatgcgggcattacaattatcccctcgttaaatagattttgtcctcaaaatctaacctaaataagtttagatattgagccctcatgttggaatccaaatctcaagtgggttcctccaccttgatgttcctccagagtactttgactgatgctatggtcttgttccaaggaacatatcctttctatcaaggatttgaactggtttttcttcataggacaaaatctagctgtagctctaaagctttataactcaaaacatcagttggatctgacacatatttcctcaacattgatatatgagagacattatgcactgctgacaataatggaggtaaggctagacggtaagctactctgtccaaccttctcgagaatctcaaaaggtcttgtaaacctagagctcaaatttcttttctttccgaagcacttcacccctttcattggtgaaacctgtaggaagacatgatcttctacctaaaactctatgtctttggattttggatagggattcaagccttgatcttttctatagcatcactggtcctctaaattgattctggacccaaatactttccttccccaatttcaccccagtgaatcgggtaacgatattgcctccattacaacaactcatagggagcgatccctatagtactctgataactgttattgtaagagaattctatcaacgacaagtatttattctatgaacccttaaagtgttggttttactttttacatttcacattagagtcgtgaaagtaagaataattggattttataaaatattttagattgaatctgacatgaaccataatcccaaaatctcaacatgattacataaattaaatcttaactatgtgtaaaagaatattacctcttgatgcctatcaagctatcctcgattcttttgtatatattttcgatcacctaatccaaaagcaaatatgaacttgttaaagatttcacaccacaatctttcagatcagcctcaacactcaagataatagtggacttatagaatctatatatttatataatgcttttgttaggtagatgaagtggcatgttgtatgagtttttttctattttctttgaataattggactaatagaattaatatgataattgaattttctgttatagtgtgtactcaactcatgagacactataacatgagatgagggataacaccaatctctagagaaagagagagagagatgcgtggggtagagagagagagatggtcatgcaactcgtttagggtttaggaaaattgtatcattcattttttttttgtatatgttatattgtatataatgaccctaaaaaattatttattcatattatgtatatatcatatatctattctatgtaaagtgtgcctacataacagaattcttggtttatgagaaattcatgggtgacttttaatttattattaaaaataaaatggtttattattaaaaataaaatggtttatgagaaattcacgggtcacttttatttatatataataaaataaatcccactaaatccaaaaaaaaatagggttctaaattttctttaattaccgtatttctaatcctatttgattatttatgcctcttttataaaccctatttgattaaagttaagattataagattaattcaaattattgttcatatatttttaatcaaatagggttcatatattgaattatttttgattaatgggattaatcaa

SEQ ID NO: 325097 - DNA, 1237 bp, Cannabis indica
acggtttcatgttctatttcactccttgatgggggtctttttcaaccttccctcacggtactacttcactatcggtcacccagaagtatttagccttgcaaggtggtccatggtattcatacggcattccacgtgtcccatgctactcgcgtcagagcataagctagtgatactttcggctactggactcttgtcatctagtgtgcagcacttcaccacttcgcctagcagcatgcacgacgcttgtattgctctcccacaatcccattttcgcggtttaggttgctcccatttcgctcgccactactacgagaatcacttttgctttcttttcctctggctactagatggccaggttgtctcttgcctccccatggattcagccgcagttcaaaaggttaacctattcgagaatctccagatctccgcttattttcaactccccgaagcattttgtatactagagaacatgcattagttaattaattatttgaatatgtataaacaaactactaaataccggcatatatataaaatatgtctatggtaaaaattattattttgtctttatgattagaatgtctttataactattgataatagatttaacgataataaataattgaatgtaataataaatatttaaaatgttagacataaataataatttaataaattaataaaataatatattttccatcttctctctttttctttgaccattatctcttttttttatcactgctgggtggtcatgactgtcagaatgaaagtcagacggtcacccttacccctagcttgagtaaggtggacgtctccaagaaagaaaaacgatggactaacacctttgtaaacagaacgaacaatcaccacacacctacatgctaagttagtctaaggggtagatgacactacccccaccatagacgtaaggatactttcaaaggtagatgaaaacatctacataatactatgactactaacaaagtacaagggatcgtggggggtcaccccaagatgacaatggtcaccctccacaagctgggtctcgggggtgtcgcccctaagtatgggctttcatcctcgaaggtggtcaatgaccgtgtcacacccttaggaggccctcgtcgtcattgactatttcaaatgttcaaatctcacgaaaagctcaaaaacagttatcaactcacgaaaatagtgggatattatcatagaaatcaaacttcaactacctcca

SEQ ID NO: 325098 - DNA, 790 bp, Cannabis indica
aaactagccacattggccttacaaaatcaataaaaacaaaccatttacaaaactagatatattgccttacaaaaatcaaaaaacacgtgtcattacatcaagtagtgttaaacactcttaatatccttaaataatagtcctagttcatattataatttgagttacacataataaatagttaaaaaaatattaatattaggaaaaattaattattattattataattaaatagcaagccaatttaatctggcagtaataccaattattaactttttgcacatttaaatttttttttttatagattttggatgaaaattggggaatattttcaaattcaacaatacactttaattttttcaattatttttttattagaattaattacacattactaatgtgtaaaaataaatactatataagataaatgaaatatttttcacattatcaattaattttaagcaattctaataaaaattgtctagaggctgctcattaataaaataggtcccagattgatttttcaaccaaaataagcaccgttgatgctttttaattattttatttatcttatttgtgattgattacttttaattaaatttaaaaatttggacaacattaaatgtggtcttccattgtagatcatcccctatctgaatatgccataagtgccttatatttgttttccactatagtatagaagtctccctacaaatttaagtttatatacaaacttattcatcaaaatctacaaatttccgatacgttaattgtgatgcaaagaagattttag

SEQ ID NO: 325099 - DNA, 674 bp, Cannabis indica
taacggtagtacttataaataactaaaaatataacataagtattattactgtacaaaaatttaacttaaatatttatttacaactagaagttaaacctagatatttttactgcaaattactcaatttataattgttaaatatccgttcaacttgtaattactaccctaatattacacttcataataatctatatctatatatttatttatcaatataaatatattatattaataataatatatattaacataaatatacataaaagtatacttatacagactttctttctctatttcctaaattttatatatacacacatcaagaatagccaaaaaaaaaaaaaaatattactggtgcttagtatttttttgtatcatattaatattggtgttattaagtattgggtttcataaaacttaaaaaataatttttaaataatattgctaatcaatcgtatgatatcacctattaaaaagtgctggacacactattgtccaatgacatatgctctctctcttactctctctattttttagtgtacctcatagacatcaccccatcccaattaaaaatctatatcactttctttacaacaaaaaataaggagaattgtcatactgagacattagtgaagcaatataatttttgtggagacttcaaattttgaaaaaaa

SEQ ID NO: 325100 - DNA, 1650 bp, Cannabis indica
gactatgcagagttaattaactgcaaaaccacgtaaaaaacttggtgttacttttactttattattctttcttaaatttctaataatttctgtattaatcctatcacgaaaataggcttattatcgttaacaaaaatctacgttaacatcaaggcttcaacttctgattgtttgtgggtgcattcttcgaccattacctccactaaatgttcgtcatcggacaccgccaagtcgtggaacttgttttgaaggcattctatcattctcttcatttttgtattgagcttcctctattaatcttactctatctgagtagcttccaactctttggtcactcacaacaagtttgggtcgtggtcatagtaataaccatccttgtattaccggtcttttacatagtcatcgccatcacattcttcatccctaccttcaagattctagtcatcatcgaggctatcaaacacgttctcgccgtcctcccctcagttctcagtgtgggtcgtgccttcttctctaacaccgtccgtctagaggccagaggtgagggagtctacttcctcgataacagtgtcaaatggagttttcttgctcgtgttctttcaggtattcaccttagtcgaagtgaggtagcaactaataaactttcctcaactctcaatgaaagcaccaaaatgtttaccgagattttcgaaaactgattaatttgagcttaaggaaaacgcaaaataataaataatagaaaaatcgtttttacgtggttcaggcgttaataattcctagtccatgagtcttttgtattagccgtgcatacgagtatttaagtgttgacaatgataactttgtataccttttgttctcttaaggaagaagaaagctttctaggaatttttacaaagtttttttaagtaagaaaaatgttcacccattgcacatgaaaaataagggtatttataggtacatgtgtgggtgagggcataaacccttcacccacctagggtttcgtactcagcacgttgctttagctagtgattacaattggagagctaactgttggtggctagggaacctcctaatcatgtggtccatagctacgacatcccaatttgtaggacttactacacgtgtcgcccaaaggttttcccttacaaagttggtgtataaataaactattgggcaaaaaggagttgtagagcacgtacacgcactaccaaggtttgatgcgggggacaagatcttatttggcgtcagaagatatgaaactgttgggtttagctctggattaggtattatggagttccaggaaggtttggctaaggccttcctagatcaacttatttgctatcatcctggagtgtgtgcaacttttacgtacttccagtagcaagagcattcgatgagaattccaaagtcctttctacatttctttgtagggagagcctccgggtattataattccgtaaccctagtaaggagaagacataaaataataatatgcaatccagcctagcatccttcaacgattgtcacgtacaagtcatccgagaacgtggataacagttaattaatacctgaactacgtaaaaacctccatctcctttatttatgcattttacaatttttttaactcttaaatatttagtttctaaaaat

SEQ ID NO: 325101 - DNA, 1026 bp, Cannabis indica
tccaactgaaacacacaacctgtaaagaaacaagagtcttttgctaagcaatgagctaatttgtttgcagatcgtttaacaaaacaatactcaatatatgaaaaaactaaaagcaaattacggacatcttgaacaagtaaactaaattgagaaatcatataaaaatataatttaagtattattcccacaaaaattaaacttaaatatttatttataactgaaaattaaatttaaatatttatgccgtaaattatttttttattaatattaattaattagtaaaaaattattaaattataaggattaaaaactcaaaagtttgggtatagggaaaacattgaaaacaataataacagcactgaaattgacacgtacgatcataattgtttgtgcataattggatgaacactattttgatgatttttttagttaattaaaagagatattacattacgtgactatgatttaatacttgtacaagcacagaagtgaaagaaatgatatattttaaagttgttttgaaaaaaaaaaagtaaataaaagtcaaataataatgttaatccggatagtgatagataatgtatataatattagaaaagacaacaaaacatacaaattaaattattgctcatctccaaatcactttgccttttggagatattaaattattgaaaattgttataataaatcagtattgataattaagtatggaatctaaaaataatttaaaaaaaaatcataaaacgtcatttataaaaaatatcaagcactattaatattcaataacgtaggaatggttttaatttaatgaaatgagaaattatttcatgggtactatacattatacacattagagaaaggtataggtagctctaacactcatcattttatataggctaattagaatttttgcatcatgctcttgaatttttaagatggttaaaaatgcccctgaactagggccggccctgaaacaaagtgggccataggaagaaaaaaaaaatttgggcccttatgttagaaaaa

SEQ ID NO: 325102 - DNA, 918 bp, Cannabis indica
gttaaaaaaaaaaagaatcgttaaaccaagaatttccgttaaaccaagaattgcctaaagtgacttgatgcaatgttgttgaaagatttttgtaatgatttgtttgttctaattactacaaacttttttattagaagaactaatttctagttattttaatatttgtaaagatatattttttctttaacaatctcttttatattgttttaaaataatgagattttcattttagttttttatttatttgaacagatataatatttaaaaataaataaatattaaaagggtaatatagtatactagaaatttgggttccctaaattcaaggaaagggtactaaatgtgtagaatttgtaaataaaaggtactaaataatcattattaaaaacataaggtactaagtttgttttttggtaaaacataaggtaccaaacgagtatttaccctaaaatctatcatccattatataattggatcggatttggataagcttaaaaatattggatgtggtccaatgaacaccccaatatgtatcactaactaaatataagggtaatatagttttggtcccatgtaatttaactaaataccattttagactcttgattctcataaatacttaaaaaggaccctctaaatattaaaatagtgaagaagtccccattataattttagtcaaatgtattgttttttaataattagtcaaatgtaattttcaaaagattgaaatactttaatcttatttatttgtttatttctcaatttttaatttatatattcagtttcttattctaaaagctaataaaaagatggaccataagaattcatcttataattaacatatgaaaaggtaagttttatttgcatcccataaaattataaatacatcccattattaaaaaaatataaacttaaata

SEQ ID NO: 325103 - DNA, 1666 bp, Cannabis indica
aaaacagcaaaacgtgtaattagatttaaaccaaattataattgaacactccaaacagtaggaacccaaatttcaaaacaaaaaaaaaacacaaccatctactgtcacacgagcacattaccgaaacagatgagtggttcacatggttcataatctttttgtgattggtctcataagaattcagcacacaacaagctttgtttcagcaacatgaatatgatcttaaataaaaggcataaaaaagctcattcagctttgcccatttgctaagttagactcaactcataacaatatttaatgtacaaaaatgttaacaccttaaaacaaaaaatgtttcctttcgacatagaaatgactcaagaataattttgcaggattggtattctacttgttatgatctgcactaccaacatgtaaggaaactcaaacagaacagaagaacatcaagaaatacagaacctttaatatgcaatactaaaaagcatgtcaataaatcaagctataaacaatagaaagaaaaccaaatacctcattgtgttcactgctaaatcaaatattatttgcacatctcgacttgttccctcttcaaacaaggtttccaaggtccggcaaccatattgatccttatccattgaaaaacaacaatatagttcagcagcgattttatttcatgttaaactatcacctatttaaagaagataaagaaaatagtcaatacaaattaggataaagaaaatagtcagtacaaattagaccaacaatgcattcatgaatatttttcaagattaaagccatgtggaatcatagtagactcgatcaaatcataagtttatagagattgatatcacctatttaaagaagataaagaaaatagtcaatgcaaattagaccaacaatcctagacaaaacgttcttcgacatgattgggtagagttttttcttctttcaagccaatagaattttatatcgtacactaattaatagcttattccaagatcgtttgtggcctcaattgtaggcatttctgttcttgcagtcaatattcccaatgatacaaaccacaccaacagttgtgatgaaacccgataccaattatgtcagtctctaagaattctcaaaatttggatgtgaaaccgcgaccctatgcttagttaagcatgaaccttggtatgaaggaagatgccacaaacggtggtagaaatccgattgataagtcaggttgaacgccacaaaaaatactcctagataagttcgaatagttctctcaagaactcaagaagaaaaccactaaaaattttattccaaaatattctgattttccaaagtgtttacaaggctttatatagccaacttacaaccaagaaaataagaaactaaaagaaagacaattttccaaataaaacaaagacaaaataaaggaaacaaaattaaaaaagaaagctgccaaataccttgaaaaacgtgataagctcaatttgggtttaaattgagtctactttgatgagaagcacaaatctttcttctccttcagtgttgacttcggtctcctcttgttttaaaactctgttgactaagttgttgagttcttctttgaatctcttggctcgcgccctcgtcaccgggccaactggaactttacttctatctttagccttagtgttctcat

SEQ ID NO: 325104 - DNA, 770 bp, Cannabis indica
tttttcctttttgtatttttctgtttttttccctaattttaaagcacaatattttaatataccacctaattagagatatctatactctcaatattttttgttcctaaaaatatttttacttttttgaaaaaaaaaattatatatacttttacattttaaaaaagcctctctctcactctttggcaatgaacctcgactcaaaaccctgccgtcgaactcagacccaaaacctcaatcacaagccctggtcgtcatcttctctgacggtctctctttctctaagtcttgtcgtctccaccctgaagccctgaaatctacgagagctcaaccacctcgaaactctcaaaatccacaagctcaaccactctaaaaccctctaaatccacgagcttaacctcctcgaaaccaccaaaatgtcaaatttctcaacccatcactcgtatttttgcaatgtcgctaaacatcaaaaaatatccctaaaaacattactaaacatcgataaaggtcgctaaaacacactcaagttttaatgatgattagcaatgtttagtgaacgccttgtattttttgtctcatattgtaaatacatcactacaatcattggtaaatacgcaaaacatcgttaatcatcgctaaacttcatctctaacctcagatttagtctatcattgcaaatacattgttaaatattgcaaaatatctcaaaaatctagaaaataaaaaaaaatacagaatacgagcgatgggttgagaacttcggcgatgggtgg

SEQ ID NO: 325105 - DNA, 735 bp, Cannabis indica
ttaatgatgagagttattatgactaagagacgaagataattaattgtttttttcttcttcagattcatatattaaaagtgtgttaaaatatatataatgaaaacttagataacatgagaaatcttcaatctctattttgatgccttgcaagtttattggcatcaaagatctagagttcattgattaaaagcaatggaaaaaaaaaaaactaaattcttctataagaaaaaaaatacttttagatataaaaataatatcattacgaagttaaaattgaataatggtcatttaaactcctcttttagatagtattagtgttgttgttgttgttagaattattttaccaggatcttagatttactatcaagtatgttatttaatatcctaaatatatgaacttctaaaatgatatgaaataaacacatctaaagtacaagaaatcttaaagtggttgcaacggaatatgtctcattccactcagatctctaacccttgtatcctttctatagcagagtatcaccaagatgtgagtccgaatctccttctcttgaatctggattcttcatagccttacacactatgattgagtactacttgatgtgtgtgggtactcactcttttcactatgtggcttcggtttagaagagaggaagagagacagaggtttcggctagggttcgtgaaggaggctcaaatttccactcagatctctaacccttgtatcctttctatagt

SEQ ID NO: 325106 - DNA, 1020 bp, Cannabis indica
ttttttgtaatattgtgtatttacttgtatataaataaaaattatcctatattttaaccatatatgacatttttttaacatttatttttatatgcgaaatgaccacatctgtaggtttttatttatttattttttcttttttaacataataatcaattatagaattgaactatgcaattggttttctcaaagtgatgttttgtatcttgcttttttgtgtaaaagaaaattagctttttaggctttagtgttgtattttatcatcatctttccaacaaaaattggtgttgaattgggtcggagagacataattaagtaccccatgatgatgtatagatctttcatgggatttttgttatagggtttatattcttaagaatataaatgtaaaattaaatttatgtattttagtacaaggtttatggttaagcaaatcttatgtcatttttaagtttatttatttattttttatctcaaattttgtaaatacttgagtttaagattttattaatctccactaagactcaccaaaattcttacaccaaacattttatcagtatttcaattggcttaatgaacaaaggacactatcatataatatatgttggattaaaatctttaatatgggctcatatgtatattagtgtattgctattgggaaatttacacagtttactgtattttcccattttctttcttttatactgttacactcccaaaataacttttgtactgtttttttttttttttgtaaattaacttttatactgttttttttttcggcttgccaacaattatttaattttttattttaatggatataaaagttattatttattatttttaattatttaataattattattttttgtagataatttaataattattattttgttgaaaaggttgatgggatgtgtcataaaagtgacatgttttactaattcttttatttaaataaatttaaaaatcacaccccatgtctcactcttttttttttatttaaaatagatttaaaaa

SEQ ID NO: 325107 - DNA, 754 bp, Cannabis indica
gcagccttccggcaacatgtaaaagtaatccaccgcctcaacgtctctaccaccgccgacgtcgccaccgactttggctgtttctccttccatttcgattcccattacagttcccatgaaatgctttttgcttctttgttttccaccgttgattttgtgacacgattgatagaggtttatataggagagttcgagaaatgagaagggaagcttagcggttaagaatttgtttttccttttttttttttctctaatttattttatttaaagtacatctatatccttcagacaaaaatagataaaattcttggaatataatattgtgaatattaaaattatgtatgctttaaaaaagaagcaaaaagaaagaaagatgaatctttaactttctagatttctttcccattcaatctgtatagtgtgtacactgcttttattattattttttttaacaaaatacatatttactatactcatgaaaatagttataataatttatatttactacaggtaaaatagttatagtaaaatgattaatgataaaataaattttatatttttcaaaatgataacaataagattctgagcttaatttttaactattttttaatataactaactttaagacaatttttaacacgaatagatacaaaaaaatataatcagttttgtcataacatctctaaatcagattattattaaattttattttgaacaaaaattagttcagaatcttatttgtataattttaaaa

SEQ ID NO: 325108 - DNA, 1008 bp, Cannabis indica
tacaatacttgttgtgactaaaactaaattagtgacaatatgtatccaaatactatatatattagttagaagtaactttttgttgtgactaaaaatattacatttagtcatacaaaaattatgttgtgactaaaaatttatcactaaagatagtctttttttgtagtacaagttgtcggtgtaaaagtggccatcgtcattgacgcaacagtagaacctctttagcgagctaggtcgatctctagcaaaatatttcctgccaatttcctaattcgcgggaaactttttttggcacatgtaattttgtcagcaattttttttttctgtatttaaaattatttttgtagtttaactagcgcatataactgcgccagaaatttttttttaaaaaaatataattttttgatttaaaatataaaataatttacttttaaattaaaactaaaatttcataaataataatacaataacataattccgattaggtaatatagttatactaaattcaaataaatataattaaaaaaatcactatcataatttataaaaaatagtaatatatacactaaaaatagtaaaataaaagttacactatagaaaataataatattttcactgatttgaatccacatcatttgttgctgataatacaaacctatattataaaattcaaatgtataaaaatattacattatataaaaattaaaatagtacacaatattatttattattcaagatactaattattatacaaaacattcaatcacaaaaaaaattattatacaaaacataatttaaaaaattataaaaatgatactaatatacttcaaaaatacaaacacataatataaaatatataatattaataataagatagctaatatacacacacttagagtaaagtaaatgtgtatatttatttaacttttcaatttaatttttatttatgcttattatatataatttatacttaatttaattatattaataataaaataatataatata

SEQ ID NO: 325109 - DNA, 694 bp, Cannabis indica
acatgagtcacacctcattccaataccttagtacaccttattattggcacaaattctaaaattgattacaatccttaccaatccattataccagctgtcaacatagtacaagatctttcttgttatttcattgtacaattatacacaaacacctgttgtaaattcgatggctattgtctttactcttgtattaatttgttctataaatggaacactttgtctcagaaataatttagctgagttttataattattgtcattcttaaattctttcatggtatcagagccactcacaatttctgttcatggcaacatctgaaaaaaggtgattttccaaccgctccaacaatgagcacaattgggaataatcccatggcaacaggaaacactactagtagttcctcccaactcctaaacacttaccctcaacattttagcacatttaatcaaccattttccctaaaactcaacaggaataattttgcaccctgtggaaaatctgttggaatatattttacctagacctagatttactaacaagtatgtttattaacatcctaaatatgaaatctaaaacaatgaaacttaaatacatataaagtttgagaaaccttcattgatttccacggaatataatgtctccttctactcagatctctaacccttgttcgattctgttgtagagtattatcaag

SEQ ID NO: 325110 - DNA, 922 bp, Cannabis indica
aatttccaattcaccccccctcttggaaacatatcttgggctaacattatcttcttattaacaaattggttatctttattctaatcaaagaaaaaaaacttacattaaagtatacactgactaatttgcgatataaatatttaagtttaattctcggttacaaataaatacttgagtttaattttttacggtaataatacttaaattttaattatgaaacttctgtaagtgcatggccattaaatgtcaattaaattaccacgtggcagtttttaattggtccagattatttaaaaattaatttaaatatatatcaataagaaaataataagtagataatgactttacatgtaacgaccaaacacctagagagattttagaaatataacttaattgttattaccataagaaattaaacttaaatatttatctacaatagaaaattaaatttaaatatttacgtcatactaaaagttgaaatgattctttcaattgtaattagagggatattataaattaagttttcatgatataaaaagaagtaaaaattgtgtaaatgaatattatatatatttatataattgtgaccatgcaagtagtaaatttggtctaatggtgatgaggttgtcaattgggataaaaaccaaggttttcaaaaccttggatttcttgtattgaaagaaaccattagactcaattataagcactaaataatttaatattgataaaaaaaaataataaaaaaagttagtgactgactatacataatttttcgaattgattttttttttttttgtaaaatattttgtccaattaatgtgagaaagtgatttcttttttaatattttaatattgcatccttgtattttatttgacaatcgcaattcacaaggaaattacttatctaattaaacaattaatt

SEQ ID NO: 325111 - DNA, 1735 bp, Cannabis indica
tcgaaccaaaaccatagcattggttaaaatactttggaaaaatagtaaagtggaagaagccacttgtgagctggagtctgacgtgaggactcaatatctggagctattcaggttagatttcggggacaaaatccttttaacgtgggaataattgtaatgaccgcatgatttagatatggattagtgagattataaatactaattttattattattcatattattattgacggatatatgtgaacatttatagtttccgcaaaatatcttgttcttgtgagtttagctcggtggcatggaaaatacaacgaaggatattttagtcacatgggtaaacagagcctttttagtgataaaaacatgttatgtagctcaaacgattggtgttggcggataatggtattgcaccgttttacccctaagccgtttattgagttaggtttaaaggtaatggtagtttagtaattttgccctttttggataggtgtctccacctttgtttgacagctgccacttaagtaaataaaggttaattagttaacattttatccattaatttgcaaaataaggaaatagatgaaaacacctcaatatcactcgtcttctttcttgttcagctagcaagaaccagtagcctagggttgggatttcttcaatttcagaggttattatgtggaaatttgagagcttaatctgaggtaaaaccctaagctttctctattatggatttatgatgttattggaaagtttgttaggtgtagggttggttttgatgagtttagttctgtgttggtgaattattagggttagtttctttaggtctcaattgatattctaagattgtttgcacttcttttgatgattaatttttgggttgagcaagtttgaggtcatggaactcaaacttgactcaacaatggtatgttgaattttattgtgtttcttttgctgttttggtgtggattttgttctaggatatgtatacaggtgttctttgtttgcatttagggaagatttggtcgagttatgcaatttttggggtttgctggtgtaaatcggtcgaccagttttacagggtctgtaaaaccggttaaccagtttacaagcaggaccccccaaattgcaacttttccaaatttgtgctatttttcgagcttagtttggtttcccttggtatttgggtagtagtatattgtatgtgtcattaagattaaccttagttgtgagctagggttttggatcaagttattcgagtttcttacccaaatgtgtaatgtgacttaggacctccgttcagcttgaaggttttccattcaggtcgacccgcacgcttgaatctggaacgaggtaagatagcataaagtatgtatatgcaaatgaatgtttattattatttgttacactactaacactaaaatgagttaattttaagggtgttagtacaatgtagggtattagggtagttacggtgttaccaacacgagtaccaggggatacggagtgcatgtggtacaacactcagtaattcccggaagtacaataatggccctaccaacacgagtacacagttggtactctagtacatatggtacagtggtcgtacttccattgagaacgttcttaaccatttggtgagcttggtaattgggctcaggacggtttaagcattaagtcggtatcgcattgcttatatatatgttatgcatatcttattgagtctgtcgactcatcagttt

SEQ ID NO: 325112 - DNA, 1086 bp, Cannabis indica
ggttttgagttcaggcattttctgtggagaagaatcgttacatatacattcgtttatttccagggccttctagactctccaaagatcaactaaaacctttttggttctttcagttagctttggattgttgatatatatgattgtatcaatgtgtaaatatcaatgagacttttcttgcttgtactttatctctttcctttcatcatctcagctatatatgcctaaaccctagggtacttcattttcaggtaactattcatctcgacctcaaccttgaatttatttcagcaaatacattttaatttatatatgtttctttgcttatatcaatttaagaatctaacataacatattaattcaattattccaactctcacaagtaagcttctttaaattctctctttgaacattattgctgttgtattgttgtgacaattagttttttgtattatcttttcttaatttcataatgttttgtggatgggtgagtatgagattgtatgttaaaaactatatatagcttaaatgtatgtgtaggaatcaatatgaatgtttcacattatgaatgagatgagaatgttaagctccttgtttcttaattattatgaaaattagttgtttgaaattctataggcatgcaattagataaaaccatatgatatgagacaatatttttctacaactacattgtcttgttctacaatggttaagtactgtgatgatatttcaatatttttttttctctttctcttgtctttagagcatttgaaccacacaatacatgaagtgatgagcctttttcaacttcagtatctgcatcggagttgtttttctacttcactcttcaatcttatgatgtctttggcctagtgtcgctctgctctgatgaggtcgggtgtcttctttttcgatacattctgtctttactcaaaaccgttatgttagatggaagtttgttgacagttgaaaacatggtagatccttctctactacactcttcacttgaccatttcgtctgatgcaacattcgaccacacccagcaaccttcggccactacccagcaactatcgtctgattgtataagt

SEQ ID NO: 325113 - DNA, 2059 bp, Cannabis indica
tagtgtaaaatgtattggtttaaaaaaaaaaattaagtttaataagtatagaaaatcaaatttcccttccttaatctcttgcaattcaatcaatacaacaactacttcattttctttcttacttcctttgttttctctttaagactgaacttaatatggtatcagagctttattaatcgttcaacagcgtgaactggaggagcatcaagattgaacaatgctcaagttcaaaataatcaacaagtacctttacctatatcttatcctatttcctttaatcattatttgcaacattatacagatctgttgttggtgctcttcaatatgccacaatagcaagacctgagctagcattttatagtcaacaaagtatgtcagttcatgcaatctccttcgtaagctcactggacaacagtaaaaagatttttgagatacatagttggtacattggattatggccttcacattcaaccaacaccaaattatttcttagaagcattacgcgatgttgattgggctttagatcctgatgacaggaggtataccttagggttctgcatctattttggaggaaacattgttgcttggaaatcccaaaaacaagtcaccatcaacaagtcttctactgaagcaaagttcagaagcctagccaatattatttctgaggttacttggattcaatcattacttgctgagttaataagattcaaatattttcttacatgtgtagttgtttgaatcttattttcgacactgcaaactatttgaaattttctaaaaatgtataggtggtcctaaataactacatcgtacgcaattataaaaaaatttagactatttttttttctctaaatgcggacttgggtttaccagaatacccctttaaagagtatacacaaatttctaaaaatatatatatctaaaattatatttggtaatttttttcattattacatatgtaatttttttttaacaatttgtatatttttttaaacaaatcgaataggttacactctcgaaataaatttttaaacgattgcttagcccctttatataataaaaatagttatgtgcgtgaaacaaaatatttaaatattatttttcagtacggtaaattattagaaattttgaaatttataatctttttaaataactataatatacacaattataaatactcatgtttataccaaaacaaataatacatgtatcgaatgttatatataattaccctaaaatatagagcattgctataaggcataatttttaatattactattgtgctttataaatagttagcgacatttcttaaattattaagttaaattatataaaatctgataattacaaaactattttagaacttgcgataacattttttaaaattatatatatatatctaaaattaaaaacaaaaataaattaaaaaaaggagaagctcttttgggccaaaagtctttacaatgattgtttatagcctcaagatttattatttcttacaattttttttatttaattatttatttttggtaatatcttacttttaattttttaattagctcaccttttgttgttattataatgactattatggagcactttatcccttgttcaagattgaacgattagaatttaattttcagacttttgagtattttatttcaaagtcttggaggagggataaagtgtccaaaaacattattctcaaaataaaataaaataagaagaataattgaatatatatttaattataaatatattttaaatttaattaatatatatttatagtgtgtatatgatgctcctccactatttcttttaattaaaattaatttaaagatatatgaaatatcctcctataaatgaggaaaaaattataatgtaaattttaacccattcaaaaaatataataaatgtaaatctctaatttgtaagatttattattagcttgagtttttttttgagaattaagaagtatatcgtatattattttttttaaatttttttcttaaatttacggtttgtagtttctaatgtggtttgcagagctagttgcaat

SEQ ID NO: 325114 - DNA, 542 bp, Cannabis indica
tgcttgtttacctaatcaaagctgatgttaatataagatagattttatcaataaagtcctcttgggctccttcaacggaacaagatggaagatctagaataaaatatctgtaaaccaaaatagaatagttgtaaatactaatattattgcatttagacaagtcttcactaaataaaataaagtcatctgtaagattctagtcctatgataaacagtgttagtaatagaggaatcagctttggattatacaaaaacaaaaatttactagttttaaaccctttaatgtacaatctgatgatttaaacatctagtgttattcaactattgctcaggcaaggcacccgggaaacaccagcttaacattctacatggtacatcctaagtatatctttcaaagaaacttccagttatcaatgtctactatgtaatttgttaaaagagaatagtcatttaaaacattaaccatatattttcccaaagaatccaggcacattttaaactaaaatctaagaaaattttaattgggaagtagcgaataaaat

SEQ ID NO: 325115 - DNA, 1776 bp, Cannabis indica
ataaagtttgtaaatatttttgggatcccaactattgtaaagtttaaattattacaagttttattttcattccgtttattacaaaagtttaaattctgcgctattttgattagtaatcccatttaggggattaggatttcataaataaattgggtagcgtgcctaattatttagggcgttacacttatgatatatttttcactgttaatatcgatctagtccgatgtataactaatatatctgatactagtatactttgccaacgtcctagaaaagacattccacatatttatatatgtgtaaccaaatttaattgttaattatcacgacagtgtaaatcaagtgcactgataaatcatgggactaaatattttgaagcatataatcatgattattttttactgtgttgacattactataatcatgaataaccatatgtttgggatttaacagaatttgtatattaaacatgtaatcataaaagtaacatgtgaactaaaatgatttatgatcttctattgattagtaaataagattatattaaaatgagttttatttagggcatagaaccccaacaatttttctattttaattaggtggaatatcagcaaaatcggaaagtttcgagtctgtccgatttcacccaaaggtgacatatctgagaactggtaaacaagttcactaaaacaaagaatcagactatgtgatatcaacatatcacttaggcatcaaaaactacaagttttagatgttttttcacttacccatgtcaacttgcacgttgggctggcaacctgggcgctgggtgctgaacaactttcaataaaacagccataagtccctcaatattgacgtgattcaacttgtgttttgaagctattcaaatatctatcaagtcatgtctcacacccatatcacaattctgaagattttaagtctaaaattcgtacccaagacagttgtattttttttacaaattacccgaaaatgatccgacgaacgagattcaaaatctaaaaattgacgatttttattaagagtcaatttttaccgttagatcatcatcaatggccaagatcagtctaaagtgatttttaatatttttggtattattttattaatattttaatatgacctacttccatataaaaggagaattcatctagttcattttgcttattcgactaagtccctataagatcagagcatccctctctactttctctgaccttatggggacttagtcgaataagaaaaatgataaatgtgttggggataggcacacccactagctaacataatagagctggtgtgatatgtcagaagtaaaagagacaagacaagacacgtccatgtgccaataactaataccttaattatgtctttcattatattttcttctattagtgaagtaatttgactaactaaactccccataaatgcatataaataggaccatgggtcacatgtaaagggatttttctttttctctctcattggtactatgatgggatgatcttcagtattgtgatgggatggagcgttggcttaaaccacagtttgacagcatcaagatcaatgtggatgcagctatctttgaaggacagaatcagtttgggggtgcttttgtagtaatagaccataacgatttactcactgaaggccatactaagttgcacatgggcaatattgctccgactgttgctgaagctttgagctttcgggaagctctaagttggatcaaaaaccaaccgcctagttctgtttgggtggaga

SEQ ID NO: 325116 - DNA, 1094 bp, Cannabis indica
aaaaatatttattaattagtaaatattaaattttattgtattttttattaattaaaatgaacttttctatatattttatcactatattacactacaagaaatatcacttttgccagcacatttttgtactgacaaaaattggtattgcgctggtaaaatagaatttacttgtgatgtgttggcaaaaggggatcagcaaatcaatgttggtattagaacttttgtcagcataaaatgaaaagcgctggcaaaaatgacttttcccagcgcgtaaatgtgcaggtaaaagttagattttagccactgcaaatgtacgctggtaaaactttaacctctttgccagcgcagtttgcgaaatgcgcgagtaaaagttacttttactggcacagtagcgaactgtactggtaaaagtgacatttcttgtagtgttatttatttttattctctatgtcatttatgtacaccatccatataaaatttatgtataatgcatatatataataatcaaaatattgatggtatttaaattcatttattaatttaaaaataatattcaattaatataataaaagagacatgctcatgctgtccatgactttcgacctattagcctttgtaataccctctataaacttatctctaaggtccttgctaataggcttaaacttgttttggacaaagttatttcctcttctgagagtgcttttgtttctggcagaatcatttttgataacattctcctagctcaggaaatggttcataaggcctttgatagagtgaaatggcatttttttttggaaagtctcatgtttcatttcaattttcctttacattttgtttctcttattatgaaatgtatttccacgactagcatatccttttttgttaatggagctattacaggggaaattaagcctactagaggtctcaggcagggggatcctctttccccttaccttttcattctttgtgcacaaggagggttgtcttcccttcttagggctaagcaggagagtaatatcttgaaaggtatattcatttctcgcagagctccttcactaacccatctatttttttgctgatgatagtatcat

SEQ ID NO: 325117 - DNA, 991 bp, Cannabis indica
gaaaaagggtgattttgaaatatttcatttttctttaaattttggtaaaatgaataacatagtctttatttaattacctcgaccacaaattaataataaaagctgaataaaaatattactaagtccactaaaggacaaaatacaaatggggaaaatgaccattttgcccctccacacaaaaataacataaaagggtactaagggtaatttgggaaattctaaattcccgaccaatctcgacattcccaatgtctaacaataccgccccgctaaactagaaatactaagttgtgattcttctgagccatacactgcgttccatgttgctgggcaccgaaaatgcaaaattatgaaatttcactaaatgacataaaaatgcattcagaattcaaatataacaacataaataattatttaaatatctataaataattttcataaataaaccttaaatatctgctaatttccaaattaaactaagcagtctttatagttatgccttcaaacatcattctatgtgtgaaaacaattgaaagatttgattttacaaacttgaaaaatatgcggatgtgcattgccctacaagcttcacattgcgttctctgaacctaagggaatactagtttttctcaatagggtgtcctataaagagggttctagagctatttggatttcaaaactcttggtaagaatcttttattctatttttgttgatgtttttttcattgaaaatttgcaactgatggaattcttctatctatgatagcgctcgtgcctcggactcctatgaacgaggagctaaagacaagggcattttatgcctcaatttcagacagtacactggatgtgagcaagttggtgttggaatttattttaccaggaccttagatgtactcacaagtatgttgtttaacatcctaaatatgaactttctaagacgataataaacacatataaagttaaggaaaccttacattggttgcagcggaat

SEQ ID NO: 325118 - DNA, 1955 bp, Cannabis indica
  modified_base (67)..(67): a, c, t, g, unknown or other
  modified_base (1211)..(1211): a, c, t, g, unknown or other
ttaaagcgagggtcgtccttccccttaataaatactttaaagacttctgcaactacattggagtcgngccattctaacttattctcaatgcatatagaattcttgcctacttgaagttcattttccacatccgtagggtgggaaggttcctctcccttagaaatcatgtgtttttacgccctcaaggcatgtcctacaaggaagaactgctcctatggtttttattatttgggtacttaacgataataagataatcgttagactcctaaataaaaaagagtacacgcacaatttcttttagacgaccgaactctacccaatcaacaccactagctttaggataatacattagtattttctagaacttgattatcatcatatttccatgttgaatttttatgcttggtattcattcttatttactttgtatttttatttttttaagcccgtctaaaaagaccaatcccaattgctgccactcaaaggtgtcatgagctcttggtaaatcttccttatggtttgtgaactgcgaagtttcatctccatggtaaaaacttactggcttgtgggcttctcgcaaaaaatcaattcactatggatataaagtatttatcatgggagcaaattccaatgcctgagaaagaagaagatcgtgactacatcgctcatttccatatagaaataacactaccactcgggaagccgccgagactctaaaagaggctccccgaggtaaaatttctcacttttatgaatggtctcctactgtccttaaatctgagtcaactagtttagtgaagtttagggattgcaaatataatttttatatttggaactgtgttgaccttatagcccatatgtttgatagttagtattccgagttccatgttcaaacttcatgtaatagtttgttctttgagatcgtgtgtcaatatgaaactaatgactggcaagctgacgaatgggagttatcttccttgaatatttttgacttatacgacatcataaaatctaagggctatagcgatcccactttttccttcgtacctcctcaaaaccaattcctcaccattataagacatttcttctcccattagttctgaaagtagcttaggttgaattttttgcttctttagactagataggataatgcttacgctattttcccatctcttttttctaactgttatgtctcctcttttttttttttnttttttgcagaatggatctcgacttagagagccttattatacaaaattcaaaatcaaatggtacagtactacgagaaggacctgaccaactgctactggtgcatggtgtttggtgattttcactacgagggattcttctttctttctctttcctctggtcctttggaggtggttgaggtagttctaacctcaaagcaggtacctcagctttatcaacttgtaatttcgcatcaccatcctcgttcaaatctaccacatgatcattgttgtaaaagggaccatcaaactcatcaaactggtcaaatacattgtcaaccctatcctcatttatattagtaggggcctgctcattcaaacctactgttggatttgtttctgggacaaaacttccaacaacacttcttggggggacagttggcggagtaagccccaaaatcgtatgccttttaaccttagtcacaaacagtggcagcaagttctccacacttatttttgccttcattcttaagaacattcttacttgactatctttcactaaaacttctagcggtatcatattgcctttcatgtacatgtaacacacctctattttcaattcatacacaagagggtttatatatccaactgttcatacaaaattccatgcatcttttgtaaagtagtgtcaacctcaaatattaacatcttaatttttgggttattgaatatccagttgaaaccttcaactgtccaagccccataata

SEQ ID NO: 325119 - DNA, 634 bp, Cannabis indica
tatatatgtatttatagtaatcttggttgcaagtgatttgtactttatttttatttatttttttttatgtatatatagtttccttagcttggaaaaaaagcgaagtttcacccatcaaaccaccacccaaaaaaaggtgaagtgagaacaagtacttaaggatatgattgttggtggtgtattcacatacacatacacatttatatatttatatataatcaaaattcaaaaggttttcttggtctttacttttctcaaacataaagttaataatgattttttgattttttgtgcatccaattactacttaagaaaatcatccattaatttattaagcaccttaatgatacatccatacgcttggggaagttgttgggaccatagaaagttcatttgagtattaacatttcttccttttttaaaatttatgtctttgaatttgatctttatggcgtattataatgagcttagactactatctaaaaaactttgacatgttagtgattaggtgtggtttgacggagctagatattgctagtgcaaatatcactcattacatgcctttgaactctctcatgcgtcattcctatttcattcactacaaatagaaagaagcaaaaaaaaaaaaaaaaaa

SEQ ID NO: 325120 - DNA, 708 bp, Cannabis indica
gagaaatactaattaaaagacactaatagtagtattacaaaatattatatgattattgatataattaaatattaaattttacatattttaatttaataatattatgaaaaattactaattaaaagctcttaaaaatgataaaacaataagaaattctaactaagaacttatttgacgctgaagcaagacttgcatatatgatgatggtgtagaagaatttataattggagaactattccatatattatttttttttaactttttttttttaaatttacggtttaagtttctaaaatggttgcaacgctaattgcaataggggtttatatacgattctttgttgcaatttaagttgcagcgctaattgcaatatgagtttttatgtataattttgtaaaaatgcaaaaaaaaaaactatttaaagtgtaaaaataaaaaaaaaaaaacccttttataatttccttttcatacgagtttcttgacagattatacaaatataattaacaaattaattaacattaatttacgtaaaatggtggacctttggtcccacaactagagatggttggaaaactgaggaaacaaagggtttctactttctagatagataataagaggaacactgtttgttaatttttcctttttttttttacttttatttgtatggaatttaatttttattacttatatatacttaatatttatttc

SEQ ID NO: 325121 - DNA, 1532 bp, Cannabis indica
gaagaaagatattcaacaagaaggagttttcagcactaaaaataatttccaacacttacctattggccaagaattgtgaaacttttgccaagttcaaagacttcaaagcattagctgaaaagctatttggtaaatccttaaaaacacttcaatctgatttgaggtgggagtatttggattatgatttcaaagactacctactggagcatgacattctatcccaactcacaacacctagaacaccctagttgaatggtgtttcaaagagaagaaatcgaaccttgttagatatggtcaaatttatactgagttactcttcactgtcactcaacttctagggatacgcgcttcaagcagatacttacattctaaatgtaataccctcaatgagcataaacaacactctaatggaattgtgaaatgtaacaaaacccaaattgaaacattttcgtatttggggttgtcttgctcatgttatatgacctaggacaaggaaacttgcgcctaggtctgatgtgtgtatatttatatgatattcagaggagacttgaggtgcatacttctatagtcatgaggatcaaaataatttatcttaataaatgtaatacttctagaatatgaatatatgagagatcacaaactatgcaacaaattggttattgaggaaataaaaaatgagaaaatttctaaaccgtcaactttagtaccatcagtttaacaaccaaccaagcttgccacagttcctgaaaaggaagccccgatacatcgtcatggtgggagggttgtgagatagcttattcgctacaaacatgaggcacatgttcttgtctctaacacagacaaggacaatccatcggcttacaatgaagcaatggatgaccctgaatcagataagtggaacaatggaccaagaaatagattccatgtgcaccaacaaagtctgggaatatgtaatcctacctgaaggggtaaaacatatagggtgtaaatagatttacaagaagaaatgaaatgttgaagggaagttcgagataagcgaggcttgtagccaagggctacacacaacgagaaagtgttgattatgaagaaaccttctctcttgtggtcatgattaagtcgattcacattcctttgtccataactaccacttatgattatgagatatggaagatggacgtcaagaatgatttttacatggaaatcttgatgaaactttacacatggacctacatgaaggttatgtacaagatagggaagatcgaacggtttgtaaattgtttaaatctatttatggattaaagcaaaattctagatcttgagatatcacttttaatgatacaattaaaacatgtggcttcaagaaaaatatcgatgaagcctatgtgtgtaagtacattaaaggaaatatagtgatatttcttattctttatgtggatgacattatacttattaaaaacaatgtagaaatgttgttagacgtaaaaaaatggatagccagagtcagtattcactcttggtggtggagttgtagt

SEQ ID NO: 325122 - DNA, 521 bp, Cannabis indica
attagcaaagaagttaacagaatgaatatctagaaattaagttagagttttgctgttaattcatgaatgacatggagtattttaattgggtggacagcaaaatggacaggaatcctagacagaggatccgcttccatagtcaccacgcatgtttccttgcaacaaggaaaaaaaaattagacttgaaactataattagacattcccaaaaattttaaacatacaaaaccaattaacacttgcaaaaaattgtgcatttaatttaaatagaaaattagtaaatgtatacctctaactaattagaaaaccaattaacaccttcaaaaaattgtgttaaaattttcatatctaaaatttttatcactaggtgtaatttctaccactgttctttaatctttgtcattgtatcatttcttatgaaacttttatttaatttaatcactaatacttcctacttttcctatttctaacttataattcacattacccatttaatcatttatttaatttaatttaaatgta

SEQ ID NO: 325123 - DNA, 682 bp, Cannabis indica
aaatctcgtgtcttatttacttttctattctaattgtgcaacacgtggaaagcatcgtcattcgatacgactccactgtcagttggtccaatttgaggtgaacagtttggtgctttcattgagagcgagatgtcgatttgtttgatcaaacaccatggttcacacaagaagagctccagctatgacttctgccttattgggtcttcctcaagaccctatgactgcagatcttgatgttggtattccaatcacaaatggaatctccacagacccaatggatgtggccaaccctgccatcttagcaggcaccataaacctggccactacggcttgtgaggtgcacactaccaatctaatactcttaatggccaacctctgttgctcggagaggaccctccattggtgcctcatactgaagaaatggccaacacggagcaactgccaagcaccacgattggatctggtgctcagtattatgctagagcgacagggctaagaattggcaagcagccattggaggaattcatgtagacttgggagaggatctcaggttagccaaaattagagaggtcatttgtcaagtaagccaaactgaagaaccacgctctgttggatgcaatgcattcgcacaacaaagatggaaatttctaagatggatggatgaccaagagtaaatcctttg

SEQ ID NO: 325124 - DNA, 1224 bp, Cannabis indica
ttgagtttcattttgtggttgccatgtagaatgttaaaaaaaaatattatgtaactatatatatagtatatgtattttcaatagcggttttagaattgggatcctgacttacgaggttttataaatatgataaaataagtttaaatttaaattagtcaatttccaagtacgggtgttacaacttcattctcagatatttgttgagcaatgatttagaatcctgtctcatctatagttgtgatgcaaagtgaagactcactaactgcattttgtttctttttacattgcaagtagaacaacagtgagttgtcacttattatttttagttgtggtgacccgcggtataactggtaatgcatttcgatttgaatattacatttgatttcattctttatcaattccaacaaattgtttagactgtagttggttggtattagtagtccagttattatatagttttcatattttatcttctcgttccattgctcttaatattgaaccacgaacattgttgagtctattcctgcaaaatattgtagataaatagttaaaattatgatttattaggaaattgattctttttttttgttttattataaattatatgtcttttatttgtgaaataattaagaagttaatttctatatatatgtttagttggcatgttgtaatcagtcttcactttgtttatttttaatagatatattatattatccagtttttgattacccatgtttatgtttaaaacaataagatttttaaaattacattttttgtgtaacatgtagttagtttgtaaatttttttagttttaatcaatttatttttgttcacgtctcattatcaagaaatacaaaataaaacaattcttggctcaaattcatctttaatttttatatatgttaatattaatatgatcaaattttatatatatatacatataaatttaatttttttataatgtatctttttatcattgtctctatttttatatgtatatatgtttacctatcatttttgtcaccggtattgacagggatgatcggagatttttcttttcattgatgattgaaatcttttgatggaggttgataggttcttcaggtgtctgattatgaccgtattgctgccggaagtagagctttgttcttgccaatgctgaacttgttgtattgctcctaccattgtcagaatgggtggatattatctgttggaaattatttt

SEQ ID NO: 325125 - DNA, 822 bp, Cannabis indica
ggatgggtagtgtagacgaaagacagatttttaggctctctgtgattggaccacctttatgcttgcctctgggatagaggtgggctaaaatttcaagaagtttggggacattaatcttgctctggtagcgaagctcggatggaaactcgcaaatgaggaagactctttatggtgcaagatttttaaagccaagtattgggggaatagggatcaaaccttttggacctcgaaggtgcctaagaatgcctcctttggtgctaaaggtatcatggcgacgagagacttgattaggaatgaaacttgctggcttatagcggacgggagcaaggttgacctgtggcattccccttggataccttggctagactggaatatgtctagagttgccttcaatccattgtgtgttcagaattcaattaaggtttccaccctgcttggtgaggatggggagtggatacctcgatcggttcacaggtggttcgtcccaagtgtggctagttctttgaacctggtaaggcgtttgccaagatcgcaggaagacctccttgtgtggaaagatgctacaaatgggttgttctccccgagggtagcgtataagtctattatcaagggtcgttggggtgagtctgatcagatttggaatcggatttggaagctccagattactgagcgactgaaaatgttcctttggaaactttgcagagatataattccttttggaaatcgcctccaaaggatttttggtaatgatactagatgtgtaatttgtggtgacgcggatgactcggctcaacatctgttttttaagtgtcctcttgctaa

SEQ ID NO: 325126 - DNA, 1149 bp, Cannabis indica
atatatatatatatgtattttgagagagagacccaaggggagagtggttttggataaggtaggatggacattgattgaaaaggccagtctttgctgcaaattttttgtacaattataattggattaatgcattaaaatctaaggaaattaatatgtggtgaatgctcactcttaaagaagattgttactgcattaataatgtccaagaaacacaatttaaaactaaaactaatcacaaaattaaaattagaatttaattgaaattagacaaagaaaaacttagcttgaaaatgaatgaatcatggatctttattgcttgaatagtcagtagtatacaaatgagtatgtccaagaataaaactcaacacaatgaatgattacaaagagatgtcttacattaaggaaaattacttcaagagtgatactcccattatatcccttcacacactcactcactataatattagactttttctctctaaacttgaatttgaatctaaagtatgagtcttggagattagagatcagaactcagaactcccttttaagaatagagaaacacctatttatagttgttggtgtggttccctttaagttgctattaaagtcaactgttataactaataatagtttcttcagattcatctgatgagcaaataaacctaccgacttgacaggttaaatgagtttaatcccgacataatatatataaacttagaagtttaatgtaatctctcacctaagaatgaggtggagatatatatgatctctaaaaatagattcttgcataagttttactattataaaattggctttctttttttatattattttctatcaattcctaagactgttggtgttgtgatatttttaatactcaagtgtacgtatcgtaacaactaatagattcattaagagtgaggtcgatctaatgtacaaggattgtagttaagtattttaaaattaaatctttacttctatttagttaattcaaaatttaaaaaaaaaattaaatttaagaacactaaagagacagtaaaattaaaaaacaagtaattcaaagagaaattaacaatgattaaagttagggcttcgattcaattgtatttattgattatggcctaatatgattatcttcctattaccaat

SEQ ID NO: 325127 - DNA, 886 bp, Cannabis indica
cttgcctcttcacgctctgttctgtccccttgagagcggtttgtcgtatttcccccattagggtctgtacgagtcctcgctctatgggtttggaaagaacgctggtgatttctagcaggtgacctccgttctcccagttgagtcctaagatcctcctcattatcatgagggatttctcattcatcagtttccggttgtctcccatctggctattcattttaatttttagggggtatctcattttcctagggttgttcttcccgggcattatcctgtctcctggttcatgagctgcgaggtctatctcgtggtgttctcactccaggttcaggttgattttgagcattcgtcccttgtgccaccctagccgaggctgcgtcatgctctaattcaacgtttcaacactgtgcctcttccgaacagcgtctcagggggcggttttctgtttcataagtaccttctaccatagactgggcacctccacgattgagttcttcatccctcatcccagggtactgaccactcccacactgagttctcctcaagcgtgttgtccgcgtcctaggaccaacgtcgggttgggttctccgggaacgtgtggtccgtgcactggggccaccctcaggttgagtcctcctagaactggtggtccatctggaccgtgggttggtagaccacctggagcctatgggctctttcccaggatgatgattagttttctcatgtggggtgttaacattttctagattttcagccatgaaggaggtggtttttcttcaaaagaatggagggtttttctgagctttttcacagaggctctcaatgaaagcaccaaactattaacgtagattttcatcaatcaaatttgagcctcacaatagtgatt

SEQ ID NO: 325128 - DNA, 851 bp, Cannabis indica
gtgtaacactaaatttggtgtctccttggaaatgctctaagtacaaaagtattcaaatattgtgtttttttttaagataaaagtatataaatattgttgaaaactaaaaattatttttggaaaaatgaaaaagaaaagttcaggacacatatgacctcttctctctatcacgggagagagaacataattcagttgtgagaaatatcattataatctataagactattttaaaaatgtaaatttgtactaaatttaataaaaaaaaaaataagtttgtgttatatttaatttattatttataattatatttcaatacacaaaatataatataaatacaaaaaaaaaatattattgattgtcatttattattttattgaaagtacacaaaaattaatattttttatttttcagttgtttaaataatagtaatataataaataaagaagttaagttatgtaaaattcaataaattataataattaatgatactatagtaaacaaaaaagtaaaatttattatagagtattgttatggagcaccaaagtgtctagtaccctccatgacatgaaatcttataattcgttagtaattttttatatgttcaaaaaatgttagtaattttttataattattataaaattaaataagtgggatctgatattaaattgtactaccagcgatattatattttataagaatgttagacaatatgggtactctttaacatttctttttgttatgagttaaatttgatacaataatatatcttatatcaaatttgacacacttattagaattttacttctcaaaatgtgttagaatagggaaatttgattttctatacttagaaa

SEQ ID NO: 325129 - DNA, 754 bp, Cannabis indica
gagagagagagagaagggatgagcttctcaatttttgacttttcttgattttcttctaatttcccgaaatgaaaaggatttctaattaatcctttgctgaaaaagaatttgctaggtgtcactaacctaggcagccacctatccctccattaattactaaccctttaggttaaaacttaggtatttctcaagactaggggtaaaattgtcaaattccatgatcccgcttaaccgcggttttttattttctccaatatatgatccactaagaaatttataaaaataacatacttcacatataagtcaaataatactcctagagtttaataaaatctctggaattgagaaattataactctaatatccatttctaataatggggctcacaaataattaagttcatacataattataaaagtactaataattaatgctaattgcctttgataatccatattataaaatgcggtcgttaccataatccccctgttaaaggatttcctcctccaaatctaatctgaataatttttgatattgagtcctcatatcagactctaactccaggtggcttcctccaccttgttgtttctccagagtactttgaccaaggcaatggtcttattccgaagaattttctcctttctatataggatctgaacaggctgctcttcataggttaagtcagagtgcagttcaagggcttcataactcaaggcatgagtcgggtctgaaacatatttcttcaacattgaaa

SEQ ID NO: 325130 - DNA, 690 bp, Cannabis indica
ttgggttacctggtgcaaaccggctaactggttctacaggccatgtagaaccagttaaccggatcaggggcaggtttcccgaacaatttgatttgttggtttatgttattttcaaagccttagttagttattttctcgataactagggtattgttataagaattatcaatagcagaacccttagtagtgagcttggattcccggattaggtttttggcgtgttatttacttgtttacgtaaatgtgacttagggcatccatccagcatgaggttttccattcaagtagtgagcttggattcccgaattagattggatggccttctgcacatccctagcgtacgtgcttttgtaatgcttattgtctaacgacctgtctaggtaattgcttttaaaggagaaacctttaggcagcatgtgtccagacatttacgagatatcttacattaatcaaacaccacacgatgaaaaactacctacaaaataggggtgttcatcaaaccgctcaaaccgcccgcaccacaccgcaccgcgaaaaaaatgcagtttgaaattcttcgcggtgcggtcgcggtttgaatttttcctaaacctcgcggtgcggtgcggtttgtggttttgaattgtttatatgcggttgaaaccgtaccgcttcgcacattataaaaataccaattttttatatttattt

SEQ ID NO: 325131 - DNA, 687 bp, Cannabis indica
ttctataataaccctaaaagaagaaagtatagataatgaatttcgaatagcttaaactgctatcaagcaatctgactccaactctactttccaccacgttaaaaaattcttgcttttgaatcatataaatttatttacttaagtgagatttaaatcgaacagaacttagttttataattaattaaatataatttttactcttctcttctagagggttgcttcttattctattctttataaaaaattcttcaaactatagtaattattgtaaataaaagtagctttaaatatataatattaactctaaaaaaataagactacacaatcttagattttactcttaaagtactatttatgtaagtattttttatttgtactctcaaattatatgaatgaaatgcaactaaaaggataaatttgcaataatttttatatttcaggagatttttttttttaaaaaaaaacttaaggataaaactcaagtgtcataatttagggataaatttttatttactctttgtaatttgtctagtagtaccacgtgaacttatgcctatacttagaaaaatattacattaaaattacaagagagaataggaggattacaatcaaaatatccaaaatacaaataacagtattacatcaagattacaaaaaaaaactagagaagaagaagaataacacaca

SEQ ID NO: 325132 - DNA, 1120 bp, Cannabis indica
acaaaacacagggtccaattagtaacttttgtaaaacagagggtctaaaatgatatttacccttttatatataaattattactaggcatttaaagcacttttgtccccaaacttttttactgagctcactgtagtgatcttcattgtcaacggcctagttctaacgtagctgtgaactcgttaatggacacccctttacttgaagaccctgtcgatgaaagagattttctgataacaaaggctggttgcttaggattggggattgttgccgtttcactcccaagcatgaaaaccgcatttgacattgtgggacgattttctgggtcttcttgtacacacaacagtcctacatttatacaccttaagaattcatttgcattacacgtttcacgtagcgctgcatccataaaatctaatggcctgttttctctccacaatttccatgcctacaaatacaatcaacaactccattaaaaactcagtcccgatcagagtaaaaataaggtatactgatgttttcaataacacttacataacctagaaggctcaacaatttgactgataaaaccctgtgttttttcccactaataatctcaaggatgacaactccaaaactgaacacgtccgacttgattgagaaaaacccatctaatgcatattctggagccatataaccactggacaacaccaattggttcttattcattagtatattgatcaacataattagttgaacttaaattatttaatatgaaaaaaaaaaacaaagaaacaaatattaaggtgtaggtcttagctacaacaatactcactatgttccaactactcttgccgtggttgcctcagtttgtttgcctccaaaaatccttgccaagccaaagtcggaaatttttgggttcatctcttcatctagtagaacgttacttgttttcaaatctctatggataatccttaatctcgaatcttggtgaagataaataagccctcttgcaattcctagtatgatgttaaagcgcatctcccatttcagcagcacacataatgttcgatcttcaaatgttaaaaatatgtttagaaaactatagtattatataacatttggactatgattataagaaaa

SEQ ID NO: 325133 - DNA, 984 bp, Cannabis indica
tgttggtaaatctagatcctggtaaaacatattccaacaaatacttgcaatttttggtgttttctaatttcctctaacaacataactcaatttaatacagtacaatacaatataatacgatgtaccaatcaagcccttaattacagatatacattgcaactaattaatatatattattcctcatctattttagtgggacactaccctccattgcctctctgttggtccacccaatatgtaccactaaggatcaatatgcgaactagtagcaaagcttttgattgattaattatctatcgatctatcgacaagaacatattaatttccttatatatttatgatatgtaggccttatttgactgagtctctataatttacttttagcttcctaagaatgctactaaaaaggaattctgttaaaagagtttgttggagctaaaaggtgaaattcattggttactctcaaccaactgcataattacttttagagctttaaaagcccaaaaatagattttaaagccaaaccaactaggtggtaaactcgaagacgttaattgaagaccatcatctaaattcagttaccatttgggaatcttatctttaaatcttcaatatatttatatataaataaattaaatatatgtataaaaaaaataattctttagttgattacaataaataatatagatttagttaaattaataaaataataagggtaattatcggccaaacttcctaaacttcgacgtttggcatgatcaactcccattactaaatttttgggggtaaaactctccaaacttgaattctattttggtctcaattattccgtccaatttggtctgttatatgccaaggtggactgacacggtgtacataagtatacatgtggaaaaaaatttattggttcacataatattaataattcaaatattaaaaaaataatttaaaatatttaaaaaatttaaaaaattagaaaaaaaa

SEQ ID NO: 325134 - DNA, 388 bp, Cannabis indica
aaattataaaaaaacaattaaagtaaaaatttagaaatcgaaaccgctttggagtcctaacaactccaaataggtgcaaagtggatacattgtcctgttgtccgtttaaaaattcatcctacctagtttagccctctactcaaaccattgaaacaaaaccagcacttccaaggcacaaaaatgttccacataatcctatcctagaaataaaactctatgggccatactttaccactcaaacatgtaaggaatcctagacctaacatgaactaagcatttctatctcatatacaaaataacaaatagtcaacaaagcgatagggtacttacttgttgtacgagtcaagaaagtgaggttgttgtggtagtcttgttgggttttgtgccc

SEQ ID NO: 325135 - DNA, 1278 bp, Cannabis indica
ataaattaatactacatttttcttaaaaaaataatgagttttaatataagacattcgatctccattgttggtcttacatggttattgttttcaatgggacctcgaggtgctagatttcgtccctctaatggatggttatccattgaacctttaacaccgttagatctcaaaaaataagtactttgcaatttttttgctagtggaatcatccctgtggtgactacttagaattgaaatttacaattatgaaacaatagtagaagctcataaagtaagaacaatcttgactctcgcctaccgggacaatattgggttctcattttgatcgaataaaatgtttctaaaatagtgtctattttagatgagttgactactctattcaactaatattatctttgactctcgcctaccgggacactgcatatcatctagttggaaatattggaaaataatttaaatatattttattttctacttttattaacatatcttcaatacttgttcaatattttttgaataagtgtatgaatttatattgaactaactaattgatttctttttattgatatttatagttgtcaaaatgtaatttaacgatcctcaccccaattctcttttacttaaagcatttgcaaataaactgaaaaatgcaaagatgaatcttgatcagaatatcacttcttacttatgatgaatttaaaattcttaaaagaaccatgatgggaattttgttatcagttcgttgtatccttcgtgatcaacaattggaactcgtatgacatagacaagcttgacgctaaattgtgtgcttgtgaaaagacattgtcaattgcaaggagatcattccctagcattgcaaatgatgacaaaggaggaactaaaaatattgataaagaaacctccaacaatactacatcttcaggctcagttgaagagattagggaaagtttttctacttccccagtcactcttgaacaacagattgaactaacaataagaacaattaaagaatagttaagtaagcatattattatgtgttcctactatggagagaaaagacattttaaattaaaatgtcccagacttctcaaccctatgaaacgaaggtaataattcttatgcttttgtttttgaatcatgcattttagagaatgacaaatctgtttggattgttgattatggatctgctaactagggctgtacatcggtttgggcggtttatcctatatattttctaacccaatctaaagttcgggttgctaaaatttaagtgcaacc

SEQ ID NO: 325136 - DNA, 807 bp, Cannabis indica
  modified_base (750)..(750): a, c, t, g, unknown or other
ccaatttatccttgacctttgttgccaatagtctctcttgagcaagcaatttatccagaatgtcttcattttttttcaattctgccattgcagtagctgttctgacagttgcattatttaggctagcaacatctcttttagcctttgagattttatgcttcatgttgccatatttttttttttgtcccattgttgaagagagttggtgcaaacctaaatattatgacaaaagttgtcaatagccaaacctgatagctttattccaagaattttgtatcagttgtgttgcttttggatcatcaaaccacatcttctcaaacctgaatcttgagtgtctaatgagaaatttattttggctagctaaagcagttacatctactgaaatttccctgtgatcagatgtaaagtagtccaggtgatgtgttgtaatctgctcaaaggtttcatcccatttgtcattgacaaaacaccactctagcctctcctttactgcatctacattatgccttcctgtaatccaagtgtacagatcaccttcgaaattttgttcataagggtacacctatcaagatcttttcgaaaaagatccatttgattctcattgcgcaatgcaccgccaagcttattgccatttgataaaatttcattgaaatcaccgataaccaaccatggcattaaaagagcaacatctttacaacgttccaacgagtttctaagtatgtattcggttatggatttctaggtgctccnctaaaaaggcagataagtgcaacgtaggccgacttgttacacacaatgtaacaatcg

SEQ ID NO: 325137 - DNA, 1112 bp, Cannabis indica
gctgacgacaatataatcatgaataaatatatatgttctaaacttaatagaatttatacattaaacataatcatgaaataaatcatgtgaatcatgcaacataaaatgattcatgaataaatatatatgttctggacttaataaaatttatacattaaacataattatgaaataaatcatgtgaatcatgcaacataaaatgatttctgatcttttattaattagtaaatctgattatattgaaataagttttatttggacagaaaacccaacataagtgttcctttctttctgtctaggttggttggttgtggttctgttgttctgtggaatattgttcatagatttttttagggctcacccatgacactttttcctttattgtttactagaatggacagtccaatatcgcagtgttgttgatctttttagcaaggggattctcatcagagtggttagcttgagcttgcaagcacgcgacaacctcttacatttgacgtgaaacctcctcctttttagctagtctcctctagttgtcttctatttcttgttggggtactacttcaggatctagttcgtaaaactctacctcatcgacgggttgatccccacgatgcttttttttttctatattatgaagagtgcccacttcagctgtttccccgtcccctgtgacatccacctgagtagttgcttgggggagtttgtccttgtcggcaatggcagcattgtcttggccacctcgagcaggatctcgtatagccaatctaaccactgtctttcttgttgcaactattgttgtagacaataacttgatatataattttattactacagtatattaattttcagtgttatgatgtatcaaatattgttgtatatatttaatgatctaatatatttattcgtttttgttacaatataataatatgcaatactaaaaaaaatttaaataacttcatttaattattacttttttaaaaaaaatatatgtaacaaacatatttttataatttttattaactaatttgttatatttggtctgttgtgaaagaacacagcaagaagacaacacaattcaagtaataacagaacaagaacaagtgattaaa

SEQ ID NO: 325138 - DNA, 1939 bp, Cannabis indica
atcatgattatattccactgtgctaacgatactataatcatgaacaaatatatatatatgttctgggcttaatagaatttatacattaaacataatcatgaaataaatcatatgaaccatgcaacataaaagcgatttctgattttatattaattagtaaatctgttgtattgaaatgagttttatttagggcacaaaacccaacatagtagtggtacgtagtgcatgtggtacagaggtcgtaccattgttaagaacgtttttatcatctgaagtcttgtaaataggtgcatgagcacctaaatataagtcgggatatgttttgtgcttttcttactgagtctgttgacttgcagttgttatattatgatgtgcaggtaaaggcttagcttgaactgattattagtgagtctggagcctagtgaagattgtacatatctcagcgattagacctggagtgttctgatcttcgcgataacatgggctcataatttattatgtatttatctataaaatataaaaggggatcccaaatttttgtaaacatgttgtacaatttatataattaaaaaaaattatttaaatcacgaatttcattaaatcctttgattagcaaatgttgcacagtaattaagaaagcattgtagcacgcctaaacaagtagggtgttacatttagttttgagtctttttaagagaaaagttatccctagtcttatgtgttctttacgctctaataatgttgaaactgttactcatgccctattagagtgttccagaactaaatacatttagaaagaaacatcttttacaaaaatctattataaaagcaaaaattgtgatattatagaatatttgttaataagatttcgataatctgaataaagaggagttgttattgtagtttggtattgtctagacaatttagaacaatcataatgaaaaattgttcaaaagaataggtctaacaatagtaatgttgagtggtgggtaagatcttatttgcatgattatgctttgaagtaggatagtaaattggagatcaatcatgagacgtctgcaagtaggtttaaaaatctttctgctagtaacatcccatgttgggaatttttcctccactatgtatgcttaaattaaatgtagatgttgttattgacattaagaagggaaaaataagaattggggcagttctcaaaaattgcaaaggtcaagttgttgcgggttgctcatctctaatttatagcaatataacccctatttttgtagactctattgccttgcagagagctttatcatgatgttctatggttgattttccaattaccttagtgaaatcaaattgtaagttctagttaacaactattatttctttctaaatacagagagatttatttacggtagaattttaaatttatttatgtttgtttaatattatttaattttattttatatttttagtcaattatcttgtattagtattgcttgattaatattgattaaattcataattattatcattgttagtttgtgttatatttttatagtctgtgctatattttttggctagtttgtactattttttttggatattttgtgccatattatttggctattttatcgtatgttgttggctcgtttggtaacgaatacaacctcaaagagtgttactacaaattttcatagataagttttaaatcttacttttaattatatttaataattttgaaaaatattctttctcttattttatcattatttttattatttttgttagataattgagtttgttatctttaaattttatgtatggtacatgtttaattgactagtatatttctaccttggaagattttgctctaatagttgtacataacaaattagtttctgtataatagtgacatgctatcatgctgagtgaaaaaagacttcaaagataagtt

SEQ ID NO: 325139 - DNA, 603 bp, Cannabis indica
cttttctttttcatcttttgaaaattaccatcacgtgggatatgatccgattggaaatcgcatggggtctattctgtctttttgtactttgattctacccaccaaaaatataccctacttttttttttggtggaaaccccacatttttgaccataaaaaaaaaaagatattttattttccatcaatttagtgaaaatttatgctctcagcaattttgtcaaaaattctgaaaattttaaagtttcacactggttgttacaaatacaaaagaggagaaaacattggaggaaaaaatataaatgtattttatttatttatttatttattttgtaggggtaactatttcctttatatcatagtttatttttatctgaaatctatatcttagttagtaaataaagagggactaaaatagtgtaattgtcaatttacttaaggctcaaaaaattgttttaattaaaagattataataaatattttttttgtactaaaattatatttacttatttatcacatattaaaaaaaataaaaataaaataattataataaaataaataattattaaatctcttattttttaaaaataataatttaaaaaataa

SEQ ID NO: 325140 - DNA, 1680 bp, Cannabis indica
agtagaaacaagagaaagtcgaaaacctgtggttgcttggagatactgtgagattctggacgaagagaaggctagagaataataaaatctaagtaaattctcgacaatagtttttcccaaaagcacaccatcaaagtctgaggctatataagtaaaactgttaatttttgaatagaaaaacttgaaaaaaaaaaaaaatacgcccaaaaatagagacactttagataaaatagattcatatatttttattcctcttaatcaaatgccacctaatgacacgtttaccatacattattcggaaccgaaataaattaatggagaaatctaacaaaataaatgaggaataatcgaaatcaatatttgtaatatgttgttaactaattttttttttgaaagtagaataatagtgatttatcttctttactttatcaagaaacctaatcagaatgtataaattgactaaattgttctcttgagttaaattacaatatataataattattttgtaagacatattttaaaagacaaaattatcattatatatttaacattgaaaaataaaaataaaaataaataaagtatattacctttaatgacattttttttataaaatatgtaaaatattttgaattcactttaggccaactaaatcaaggtttgcggattataaaataattttaaagaaactttagtctaaactacacacttggacaagtcgacatatgttgtttgcaaatagttcaaattcttattaacttagtcttaattgacattctaagttattttatgagtattgtttgtttcctcgaaagaccgtaaaataaataaactaattttgtaggaattttgttttgggtgaaaaatggtaacactagtaaaatgcactctgcatattgggagtgtgtttgtaagccaaacggggtcttggctttcgtgagctttggactgtggcctcaaagtaagatttattgcagttgagtagggccggccctgaaatttagtgggccataagaaaaaaaaatatttttgggccctcgttaagaaaaaaatatggtatttttcaaaagtgataaaaaaatgtgtaattttaaaatatgacaaattttttttgtgcccttgagctaagtgggccctaggcacaggcctagtccgcctatgctcaaggtcggccctgcagttaaggtgggttaataatatctacctcaaaaaacacaatgtttggtctcttgagctaaaataatatgtaacctggtattaaaaaaagtttatgggacttagggaattatttactcatagtgatctttaagaagcgtgtgtgttaaataaattgaaggcgagtaaaattcatacactttttttgaagaatgaatcttgggtgtcttagggttaatttctccaatgagatactaaaattttaaaaattaaggaatttagacataaaattactctaatggaacactaaatgctatcctatatgtatgggaatctatagactacacaaaattttctttttctttttttttaacattaaaataatatgtttatgattaaatttttatatttatatacatattatagtgtgagataatttaataaaataatataataataaataatatattttttagtgtcatttttagtgttgtggttggaattggaaaaaaattagtgttgaaatag

SEQ ID NO: 325141 - DNA, 1068 bp, Cannabis indica
aaattgaaatctcaaagcatagtgaaacttaaagccttctggtgatattagtattacccctgcacccgaaccctgctcgttcgatgtaccatccacgtataacttccaagtttccgcttctcggtgtacatgcgggatttcttccggagttataccttctacgaagaagtcggccaaggcttggcccttgatggatgttcgagggtgatacgttatgtcgaactgccccagttcgattgaccatttaatcaatcttcttgaagcatctagttttgataaaacttgtctcaaggctaattgtctagctaggtgggctagattaatcgaagagtctaatgtttggactgatgttattctctcttgtgctactgctagcatgttagcagatatgcctaactggtagtttgtaattgatgtattctttcacaaaaaatatatttttcaatgattttgagagatatagtaaaaacaattgatataaatttattaatttattttttttttctgtagattttgaccatgtttagtaaattttcaatatggtaatgattaatttttaaatatagtgacaattacaagtaaatatgatattcatcatattttgagtagatttaggactataagtgaaataatatagtgattgataataattttgaatattgtgccaaccataattgagataagttaataataacgattttgaatataataatgactatgagtaaaatacgattataacagcgattttaattttttttttctctttcaatttacatagctaaattattatttttgacttaattatattgtaacatttttattcacactctataaaattgtggtatgtagtattcaacacatttttaagaaaccatatcaaagaatcatgatttttttttttgttagacagctacaaagttttttaatttaaatatttaacgggttttgaaattgaatttttatttattttgttgactaaataaattattggtttgatgtgtttgctttttattaatcaacataagaaaacagagaattaaagttaacaacatttaatagatactaatt

SEQ ID NO: 325142 - DNA, 676 bp, Cannabis indica
aaaaattggcccactcttgtcctatcaagttcgcattgtttaacacgtgtccgaaattgaacgctcaccttaccaagaaagcatcacacgtggacaagaacgtggaaagatccagagatttcaccgttagattaagcgcgaaacctctcgaagttttattttttctgctagaaacctctcgatttttgttctgcattttcttttgtttccagacgtatcggctccctcaacaaaacccacactctgctctcatcattctcattcaattcaacacaaaaaatcaaaaacacattctaaagatcaacagcaactgtaaatattcgcaacgcaacaagttcaaaatccatttttgagtcactttaaggtacgagactcttctttatcttcttgctctgcttttatttctttctttatttccttgatctttttggttttcttattatttcttccctttcaactgaaatgagaatttccaagcagggtctgataatttttatagttgttatgttttctttcatattgaaagcaataactggctgtttggctcttgatcattcaactttctgttcaatccttttgttttattagatattaattttgataacatatcagtattctgtgaacgaaatgatcgttttttattatcgattattatttattatatatatatataaaa

SEQ ID NO: 325143 - DNA, 771 bp, Cannabis indica
catatttcatgtaattttcacctaaatatatgtacacctaatattaatctagtatggatataaaaagtagatctataattgtatataaatacttactaattttttttaagagctcaaatttcatggtaaaatatgtggtgaatattattagtcaaaaataccttcaaattatatttcattaaaatatacttaattttataaatgggttgtccaaatattctttcactctctacttaagtctagcacataatttttattaacttaatagatataatgtggacatcatctatagataaatctcaaaaaatataaaaattaaagtaaaaattaaaatatataaaataaaatagatgtataatgtagcttccttcgtatatttcaaactttcaagatatcaattgagaattcttagttctttgtcttcttctttgaatgcatcagaagttaattgaatttgcctcatattcatgacttattttgttctatctataaagtatgcaaaggtacaatgatcaatgatcatatatacaaataaaatggtagggattctcatggcaaaataatttaaaccatacatttggttatacttaattctataaatctaattttcgggggtataaaatcttgtgaattctccttttgttttactctcaactattttgttaatgaattgctcttaaacgccaaaagagaattgtctacgtgtacttaaatatacacatattatgtaatttgattgatcgacttaatttttaatatttaaataaaatt

SEQ ID NO: 325144 - DNA, 895 bp, Cannabis indica
tatatatatatatatatgttcgacacataatttaaatttttcttgggcatagatagtacacataatatatatatttatataacaggctaattaatcacataatatatacaatattaggttaactatatagtctataaaagaagtttgtatataatatataatacatgcaatataattggtatatatgtaggacagcataatatagataggattattacttaaatgttgggaaaaaatacctttcaaatcgtattcgttagggtttctttatcaaatattaaacaagactactacaattctctaattaattgatgattagaacatgtgaaaaatatttggattattatggccacttaataatttaattaatgttgcagcttatgctctaccatgcttacttccttttatttttatttcttaatggactatctttgcttttaaatatctatattaatccatccatctcataccataagtcataatttaattaatgaaagataatacaataagaaaaatgacaatgagatcaaacaaataataataataataatctatataaaaaaaaattgtcagctgtgtcctctataatggaaaaatgggaatggaattttataattacaaaaaaaatgaatccattttggaggtgtttgatacatcaaaatcatacaactttaatatataaatatatatatattatatatattactaattaggcaatatagacaacaattaacaaataaatcatttggacttattgtaattgggcccgttaatgggccctactccatgtccactcacaatcccgagttcgccgcatgggatttaggctctaataataactaactataggaatccttctataataataataataaatttaaaaaaaaaagttaaa

SEQ ID NO: 325145 - DNA, 1623 bp, Cannabis indica
agggcccaatatattttttctttaatgcccaatattgtttttaatgaacttaacttttaaaggggctaacaatttttcattagtcacttccattccaattctcaaagtccattttcaattctattaatgctttttaagctaaaaaataaaaatttattactgctatttattatttttttttaaatctttaatattctttttttttatcatttttttattctattggaatcaataataatttttataaatagttggaattttttggtgttttgtaaaatatataactgaataataatattcaaaaatatttataaattgcattttttaggggcccaaattttaaattaaaacagggcctctaaaatgtttaagacggccctgaatttacaagtatatgctcaacctgaataggaactgtataataatcgtttagaaaataaaactcgaatatgcccgtttataaacggattgacacgaaacgacccgtgtaatccgtttataaatatattttatttaaacatgtcagctaataacacgtttatgatatatccaatacggttatgaactatttatgacctattaaaatactaaaataacatcaaataggtcattaataggtcagttttgtgttaaccacgtcaatctaaacacgacccatttattaaatgagttaaatgagtcaaccaaaacacgatccgaacttatttaaagtaaatccaaactcactaattctcatgcatattttaaatcgtgttatcgtatctaacctatattttactaatcttacctggtgggaatgctctaagaagtaagcaaattatatcatatcaatttatagttgggagttaaaaccaaaaacacttatgcattgaacaatgagctattaatacaaaactccttttatatattattatatgcttataataataaatataaaagaaaagaaaaagcttattagccgcacaaatataaagaatctaattttcaaagaccaagttttgttttttatttatttaattttttatcaaaaaaaaaaaaaacggcataactaaccatatccggtgaagtaaacgtttgcacaagtggatatatttctaataatttatttagttattttttaaaataaaaacaaaagtaaaaaattgattagaataaataaaagtagataaatatataagagaccaagatgaccagataacctgaactccacaattggatatgtgatgacatatggtttcagggattcctttcttaaagactcaatttcctctgcaaccattttccatattaccccaaaaaatattcattataaaaatacatggatactaacaaataaatatatttttatattgtgagatgaatttagaccattgataacttagatagaaggaaacatttatttaaaatcaaaaggatataatattataaaaaaatcaccataaaaatttataacacaaattaaaaaaaaaatgttaattacaacttactattacaaccttttagtcaacattcacatccaaaatcacatgccgattttttttttttaattttttcatagcagtattcgttatagttacagtatcatcctgtaaatttttgaaaattaccgaatagttacagtac

SEQ ID NO: 325146 - DNA, 1330 bp, Cannabis indica
tgatttgcatattttaacaaagttgatgtctttttatttttctattaatttatagctatctttgtgttgttttacagttatttttatgttgttgtttaagttttttatagttgttttgtagttatttttatgtatttttattccacacacttttttatgggttaattgtggcacaacccccaatactgtcactttgctagcacttaatccccaaaattcaaatttttactgtaaaactctcaaaactaagaaaccgttaacaatttacagtttccatctattttaggtgttaaatgccatgttggattgtccatgtgtacatctacgtggacacgatatacacatggcacaattttattagtccacgtagaaaaatatctaaaaaatttaaacaaataatttaaaattaaaaaataaattttgtttgaagggtattaattataaatgataaaaccccaattccctttctcttccttcctcactcgacaccctctctctcttctccctacatttgtgcagtgaccactggcacgacaggactgccgtgctctgatcaaccacgccctaagaggaccacgcatcaccgtcctcaggcccagaaaaccccaagggcacacaactcgggatcatggggttaaggcctcgaagtgacggtgaagccatttgtggcttccactttttctatggatggccagagacacccttcggcgttgggccgagcttgacatgacgagagagaaagggtccaagagcgagagagggatcagagaacataagttcctcaggttttgtggcttgttgaggtcagccacggcctccgtttaacccttcaccggatgagggtggctcccaccgagaaaattgagagagaaataaagagagttcgagcgagggtgaaacccacgagaagtagagagagagatatgggggtttttggtttttttttagggctgcaaggaggtgtggtccatttggaccaccgacgccagcaagggttggtttgtggtatggctgctgcaagtagaagagaggagaaagagattagttaggttttcaaattagagttttcagatttttgttttgtacaatttcttttcttttatattttattaaattaaatttctgatgtaaaaatataatgccaattcgcattttaggatcacaaatattttttttaatatcaattagaataataaaataattttcctcattcaaaatatacttttggcaaaataattatcaaaaaccatatatatatttttttattaacaatatttttaatttcaaattattatttttttttatttttttttaaatttaaataattttt

SEQ ID NO: 325147 - DNA, 1962 bp, Cannabis indica
taaaaaatatgataaatatatttcaaaaaaaaagtgggacagtattttccctattttattaacctaaccatctgtcaatttcaatcacaaacaatcagataatacacaagttttcatccttatagcaccgcagcacataaatttcacagatcctacttctctatggatgaatatataagatattcaaactcttctattaaattatgagaaatacaatattttgaacatcagtttaagaaaatatatggatttaatatctaaaaattcttaaacaaaacaatgttatatcatagtaaaagtaccttaatcgcatacacaagctcttgaggtgcaaccttggtgttgaaaaactcatcaacttgttttatagtttctttcctatcctgtcaacaaaactaattcagcatgaattatatgctaatttaaataatactgtattttcttttataaggtgagaaaattacaaaccttagaatcatcaacaaaaggagcacaaattagaatgattttcatttgatttaaatagacctctcctttaatctgatttaaatatgccttgtttacatgaattggctgacctttacaacctgttaatcaaagccagacaacaaatgacaattagtaaaaacgacgtatttagaaaaaaaaaaaaagcttaattcaactaccctaactaagactcaagagcaaacaataacttgagcaaaggacttgtgttcatcagcatcaagagctgccacaccaaccacacccttcaagacagtagctgccttctcccatataggtgttaatgcttgacaatgtccgcaccacggggcaaagaactcaaccagaacaactttattggaattcaaaacctgcccaccatttaaatgtttcagtctctccccccaacaaaattccaaataacatactttgaattgatgtcaatctaataatcaatgacaacagatttactttctcaatctcaacaacaaattaaagatatacaaactcagatttgaagactatgcagtttattttcaaaaaaatgagtgaaaaaagtaagtgaaatctgaaaatggaataccaagtaatttaaggaacaacaaaaatgatcactgcccatttgtgaaaataaagacaaatttgattaattgatccaaaagatcaaataaatgggaaatgggtatggtgttgtaacttgtaaatataggcatatatatgatatacacacacacatatatttatacggaaattatacaaagtatattcctgaaatgaatgaagcaatattatatcatgacactggaatagaacactactattcaacaaataaataaaataaaacagaatcgaaggagagaagccacaaaattatttagagggataatgaaatctctatacaattgaaagatgaatactagtacgaatgatagacctgtagttttctattcactccttagaatcctcaaaacatgtaacaccctaactagcataggcgtgttaacgtgattttaaacatactgtgcagctcgttgctaatcaacgaggttattaaaaatcgtgattaattaaaattttcttatttaattaaaaacttaaagtattacatagataatatttcgggatcccgtttacaaaatactttacaaaagtttgctatacatattattaaaagtttgtcgcccagcgactaatcaacaaaagctcagatgtcccgaggatcgtacgctccaggcctaaccgccccgacatgtacaatcttcatctgctcgtcctcatgattcctcagctttagctttgcccttacctatacatggaaatagcattgtgagtcgacagactcagcaagaaaagcataacataaacatacaactaacccaggttataacctggcgcccatacacctgatcataaccctaatccccgtgtcccacacggtactgagtctagaacgttcataagacaatactatcgacc

SEQ ID NO: 325148 - DNA, 719 bp, Cannabis indica
tggtctgtagggtcagtcatcaatccatgaagtagccaaagggacgtactggtgtataagagccatccattccgtgggtgtaaggacctaatggaggcttgaagcggggacgttacagggaggttagagtttatagtgactcattgaaatatttgtaatctagtcattgggtgtgttcgtagttaattttggggcctataaatatctctcgtaaactcattatcgacacacacataagctctatcatagtctccctcaactcactagaagccaaaaactctcaagagtctcaacattatctctcttgtcctttatatactacaaagttgttcttccatttggtcacttatttcttcaagagtgaaagatactacactacactacaccatgccacaattattctctcaacatttttatcatctcaacatcaccatcaccctcacaccgccataatattctcaaaaacatagttgttttctcatttagtcttcctcaagttttggagagctttaactgtaggcttgggctcaaagagttcttcatagtgaaaaataagattctccttaaaggctacgatttgcttttttttaaaagataaacattggttctcaaagatcactctcacaatcaagctagtttctccacatttgaggtaaggaaattaagtagaaatttttaagttttccgtatgaaataatgttcaaaaggagtgggagtga

SEQ ID NO: 325149 - DNA, 1216 bp, Cannabis indica
aaaaatataaatgagttgtattcaatttaatttttataattattatttaaactattaaatataaatacattggatgatactaatacctaatatatatcgcttttatattaaacgtaactatctaacggaaatttgttgtttaattattttttttttgttaaaattaacggttaaagctaataccgttaaatcaatcaattaatattttttttatttaaaaaaaaaagtatcagttttaaatatctaaatttaatttaaaattatcaacaaaaaattagataattatatttttacatagattttaatttaaattaaatattaattcaattaattattatactttataacaataacaagtttattagttatattatttaaaatatattaacctatttatttattttattatttagtaaaataattaagtatattttcttataaataaatttaaaattatactaaattttatatggttaaaacaatattaaattgtattaaattttaactttttttattattatttaaaataataataagataatggtaattctttaacacatggcatattactaatacttatatatcaatactgtcgggatcgagttctggactaactttaagtatgaacatctccccactttctgctttatttggggaattatgaggcattttgaaagcttttgcccgcagcgttttaaggttggagagggttagataatcaagtcgtatggggaacggatgcgagtgagacctatacgtagaaaccacatgatcggagctaaatggcttaagctgtttaatgctgctatggatgatgattctgcagcaaaaaccacggctcgtggtgaggtctctcggtcaacgatggcaatggttgaggggaatcgtggtgtgctggggtcgagtccgatgaaagtggaggaaactttgggtcaacgtgaggcagggatatgatcatcaaaggttgttaatggggatcctataattatggaagatattttaccagctgctatgcataagtaattatctaatgatgtcaatgaggaggctagtcttttgattcttgacacgaagagtagaagaacgactttggaagatattgatggggcccatgtgaggggtgatgtggcaacatatcaagtggtaaatagttcaaagaacttgagtttggtgggtactggtgtcaaggcccgccaatcattatgaatattttatc

SEQ ID NO: 325150 - DNA, 877 bp, Cannabis indica
ttcttggatgaaataatttcccaaacatgtttctccaaggcataaaaattctaaaagtaatatctttgaaccccaaaccactatttttttgttcggcctactaatttaaaccaagaaactttgcccgacccattaaacacatcactctccttttctaatgaaaagctcgataaacttgattaatgcatttaatagttagaactgatctaatcaatgcatcaattgaataagatcaactgacaaaatctaagatctaataaaggtaaatagcattttagactccgtgttttgcaaaagttactaattgaactctctgttttgttaaatgagaaaatagactctgtatttttcaaaattttataaataggactctctgaactgatttttttgtcaaaataaaacttaataataatctgatctaaagatgttatgataaaactgattgtatttgctgtatctgttcgcgtaagaaattatcttaaagttggctatattaaaaaataaaattgttaaaaattgagataagtgtactatttttactattttggaaagggttcattttgtcatttaacaaaacagaaggtccaattaataatttttgcaaaatacataatccgaaataataattatcctctaataaataattagatttatctgttgggctcaaacataggtatgaaccgagttgtagccatgtgcatgtgcgcggcttatgtaaaaaataagtaggaattactcggatagccaaagatgataataatatatactatagaacctccatttaagaatactctattcaagaataacctctaatttgttataaaaaaatcaagtcccaatttggaccagttataaataagaataacctctaaattgt

SEQ ID NO: 325151 - DNA, 1137 bp, Cannabis indica
tattgttgattatcacatcagtataaatccagtgcactgatgaattatgagactaaactttcaagcatataatcataaatatttttttactgtgatgatatcactgtatttgtgaatgactatatgttctagatttatcagaaattgtatattaaaccataatcatgaaaataacatattaacttaaatgaattctaatcttatattaatagaaaataaaattatattgaaatgtgttttatttaaggcataaaatcccaacaaaaacaacactttctgagtgctagaagtaagacccaacgcccaagttgacattttttcaacctaggccgattccaaggatgttttttgagaacccttccaggcattttctctgttttttagtaaatattgagattcaactatgtcgagaccaaatggaacttccaggacgcaaaaattgtgacccagtgcccaagttgacatattatcaacttgggccaatttcgattagtttctcaaaaaaaaaaaaagtgtttttggcattaattctgtcattggaaaaaactaagatacaagaaaacttagggagaaaaccacaaatccgagggcctagaaactgagcccaacgcccaggttgacctggtgctaggcccaactcctaggttgacaatcaacctggtgcactggttttgatcatccaaatgccaattctgctccgagcattctctccggaatggtcaacaaaatggggtaggatacctcatcctcaagttctagaactttggaagtattaaaatgacatcccgaggaagcttcgagagccatgaagttagaaaagtcaaattaacaactttgcctttgtcatttccaacatgggaaactactcagaaatgagtagtacttttgagtctcccatttctgcagaatagcaacttctctaagaactggtgaccaacttttccagaacacatatatagactaagtgatgtcaaaatatcagttaggcatcaaaaaatacatttccaggacgttttcctactcacccaacgttcaggttgacgtcatatgtcaacttgggcgctagatgtcaacctgggtgctgggatgtcaatctggatgctgggcccagaacaaccttcagtaaaatggccataa

SEQ ID NO: 325152 - DNA, 852 bp, Cannabis indica
aacaccattaaatttttaaaatgacaaaaaactgttttctattctcacttttaaaaacacaattttaaaaactaaaaactaaaaacatagccaaactatataaaggtaaatagcggtataagtactcaaagttttaattttgtaagcggcataaacctaatgcttatttttagcggcataaatactcaatgtttgtaaaattgtaattttctttcaatttcgtcagtacagactccgtgtcgaatttattaaaagaacatttagaagtaactgatactacatgtttctatctaaacccaattatatgtgtcctgtttaagacaagtctgtactgacaaaattagagaaaaattaaagttttacaaacattaggtacatataccgctaaaaataaacattggttttatgccacttacaaacttaaagctttaaatacttataccgctatttagcctttatataatacatatacatcatattaacagcaggatgctctctattataaatgaataataaccaagtgagaaccaacatattttaattacaactgcagatatatataaatatatatcatacacataaacaacagaaattgacatcaaaacaaagctgaacttgaaactagaatttggaatctttggcattctgtcaaaaatgaaaaacaattttcctatcctttgttgttcatgtcacaagacggtagaatgtagatgatgcaacaacggcattgactttggactaaaaagtttttgtattgtactcattaaggaaagagatttatttgattatcaaaaaataagtttttctttctcttttcaattttttttggaaagaaaaactattagtgaaggg

SEQ ID NO: 325153 - DNA, 1128 bp, Cannabis indica
taaatatttttattttttttctagagcactatctatatttgtatttttcaccaaaattcttgaatcacactatattaacgccacataagtactatattaataaatactttttaaaaaataaattatatataataaaaggacgcatttgttatagttgctatagttcaagagagatcgtaccaaaaagttaaagaatacaactttacaaatttcatagttcaaaattttttaatattttaaatttactgaacacaattctattaatattatagaatttatacttcaggtgcgtaatttataataaaataatcaataataataacttagaaaaattagttaattatattattttatttatttaataaataaataaaatataataaggatttggaaaatgttatacatgctattagttattagtagattaacaatccaggtttgagcaactatataatatttatgaatcaaaaggatcatggggatgggatcatggggatgggatcatgggagagtgtaagtagggtcaacttggaatataattgactagaaagcattaaatgtggatgaaaaattggttgatgattataagatcctttggggttgaaattagatcttcattctagcttgtttgattcccatgtcacttgatcgatcatgtgttggtggagtcttatgtgtcttactcgtagtacagtaagagatggtggctttatctaactataaatatgataatcttgaagacatatataaatatatacagtgcgattaggtcatggatggaattattattcttaggatcatcatcattgctaagactatcatgcttatctatgatgaagtaaaaaacagttggaactaggaaaatgatggggcaataattgtcatatacttcatatatgtaagagagcaattaatataagacaatataatattcacatctttaccactccacttgtaaccatgtgaatgtaggggtgttcattagattacctctaatgtttttaggcctattcagatctgatctaatcatatattggatgttagattttaccatccgatccgatccaactaattgccattatacaatcgatccaacatccattggaggttagattgcatcggttctat

SEQ ID NO: 325154 - DNA, 1219 bp, Cannabis indica
ggtcggccactaagtcttatttttggctaattttcatcatttttattccataatcctaaccctaaatgaattattataaaaataataggatagtctcataatccaacaaatgactctaaacctagtttacaacttgttagacaactaaagagttcttgagacaacttcttcttcttctttcttatttcgaaatccttgagtgttcttcattaaatttttgagccttagagattgagtgcataccaacccatagcaagtctgactatgaagaatccaaacaactgaaggaggatcgggccctgatcttgataatactatgtgacagaaaggaacaagggttagagatctgagtgggagaagtcattatattctgctacaatcaatgtaagattactcaaactttatatgtgtttaaattccattgctttataaattcatatttaggttgttaataaacatacttgttagtaaatctaggtcctattaaaatataatccaacagttgatggcttagctaagcctatctctagtcaattgttctcatctttttgacacaaacttaccattggttatcccacctatgctaagtttaagggggcgtgttaggacagttagttaggttggttagttagtatgcttgttaggatggtggttaattcggttaactgtctaactaccttttgttacaagtggttaattgtacaatcctctaatcatgtgtatatataattgtaaagctcagattaatcaataagacaattttttctctctctttctttctctttgcctttcttcttctttcttcttcttcttgctctgttttgttcttttggaactatgtccaagaggttgaatacctctcacactgtgcaatcaaattccacagcaaattgacacaacttatgttgtgtgtatctaccagtaactcggttgtacaagtatgattagtaacacaaaaaagatttaatgtcgatatatcctcctaaatgttaactaaagattttaacaccttcactcaaaagtcttaagaaaaaaagttattttaggtttttgccatttaaatatgatttaaggttaactctaacgagactccatagtgtatatatggagtgggcttcttctttaaaaagatactataatgcacactaatttgaggttaatgctacagtgcacggcatatatgacgtgcactgtagatacgatattttgtatatatata

SEQ ID NO: 325155 - DNA, 961 bp, Cannabis indica
tttttcttttcttttaatatttatgaaatttgctaaagttcgatgaatgatattaaatctcagatgcgtacgactctttcaggttcgggttcgccaaatgacgcgcggtcagatgcgcgtgtgacacagtgccctcatttggctttttcgttttttttttcaatcaaagtgctctctttaaaaaataaataaaagaaaaatgtccttgtaagtgtggctttgataatagattttttcttttaattttttaatcataaaaatactttttttgtttttaaattttaaaaacaaaagacaaaaattattttttaaaattttatttttatttatttattttaggtttggatctcattctaggttgggatttagtccgagtctagggccaaggtacgagtctgaatctaggttcgtgttcgagtccggagtccaagtcccaagatctaagttagagtaaaaatctaaaatattgattaaaaaatttatttaaaaaaaatgaaagtgattttttttttaaattttaaaattttaattttcaattaaaaaattaaaaagtaaaaataattttataaaaaatatgtttacttttccaattaaaaaaactaaaaaattaattaaaaatatattaccaaatacatctttattttttatatggttttgtaaatttcttacatggtttcaatgtttttatggtctcaataaaaaatatgggaaatcaccctattttcaccagttttatatattttatctatttttatgattttttaatttttttttccatattaatattttctttttttaatttttacattaaagatattcttttttaattatatttacgataaaaattattggaaaattctataatgcaccacttaaaagagatataccgctacatctctttctgttttagtatccgaaataattttttagtcaattttttttctaatggtcatgtaaatta

SEQ ID NO: 325156 - DNA, 1018 bp, Cannabis indica
actaaagttggctagggcagtaggagccaacagtgtggaggtgtacaacgactcacaattggttataatcaggtgtcggtagaataccaaacgcgtggagaaaagatggtcgcttacatctcagctgtcagggaattgctacaagaattcaagaattacaagatcgaacggattccctgagaaagaaatgctcatgcgaattgtctagctaagttaacattggatagtgaggtagaaaagctgggggtagttcttgttgagtatctcacggagcctagcattaagccaaaagcggaagtagtgacaaatgagcaaacgccaagctggatggattctattatcaagtacataatgacaggagaactgcctcaagagaggactatgtacagaaaggtacagtaccaagctcaccaatacttgatgaatgatggtattctttaccaaagggggctcagcatgccatatttaagatgtgtgtcggatcctgaagctagatggattatacaagaagtctatgagggattttgcagagatcacactagggacccgagcctctccaaaaaaatcttaaggcaaggatatttctggcctaccatgaagaaagactgcatagactatgtccttaagtgcgatccatgccaaaaatttacaaacatcccaagagccccgccaaatgaaatgaccttaacgacaagcccgtgacccttcgcggtgtggggaataaaccttatagggtctctctcccacaagaaaaggtggggttaaatatgcaatagtggcactggattgcttcatgaaatggacaaaggtcgaacctatgaagactataacatctaagaaagctttggactttatcgtaaaaaataatgaaattaaacatataagagtttagaaaaccttacattggttgcaatggaatataatgactccttccgcgcagagtattatcaagatttgagcttggatctttttctttccttagggtttggttaccaccgtcttactcactatgattgag

SEQ ID NO: 325157 - DNA, 898 bp, Cannabis indica
attaataagggatatgggtatttaaacgctttgatacgaatcaaattttcccatttttcccccttcttaacttccccacagttcatacacttcagaaaaaattcatccccagatttcatgccactttccacaacattttcaatctcagacgtgatcgagagcaattcgcaggaatcaaaactaaaggttagttttctgcattttcgtttttgtttttggagaaattgcgctttactttctgggtttggatgtttttgaaggctttttaggaatgtatgctagtaaatatagataaggaaattacttggaagaaagccaaaagtcaatgttggaattcaatcttgaattcctacacaactcaccaaactgatcaacaacacacactgcaggtccaacttgatcttgcagcaatagatctcacaaaaccgattaccaaattgcataaaccatctcaattaaattgttagcttgtcaatgtttattcaaactatgattttgattaagaaccacattcaactaatgaattaaaaatgcaaacaatcaatctttgacataaacatgtaaatgcaataaaacagaaattaaaagatgaaataaaccagaaaagtaaagatcaaacacgaaaattaaagaaagcaataaaagttgttcaaatatggatgagagattaaggatatgaatccagttgtttcaattacctaattattaatgctatttactatttttctttctttaagtgatgacagattataaaaataacctaagctcttttcaaatcattaaggtcgtaaactatatatcatctattccatatctgatatagaataacatataagtaataatctaaatgtcgcacaagttatgtaaatactttcgtttcacatcaaaacttatgttt

SEQ ID NO: 325158 - DNA, 1097 bp, Cannabis indica
aagaagaaaaaaaattattaagttatgtaatttacaaaattttatattgtaaagtattaaattttaaatgcgatgttgactgttgttagatagatagtttgtataagattaacaatatgatatttttgttttcttaaggagatattagtttattagataactacgggcgttttctttttcaagtttcaaccaattaatattttaagtttgtaaatctagatcacctttcctatcaaataataaaaatgagtcatagtttaccacttcacctttaagtttaacataaatgtattttttttttatttgaaatatattaaattaattatatgtcaaaaggcacttctatatataaaattaaaatttgaagttgttttttttttaaaggagtaaaatcaatcttaatttaaatagatttacttatatatatttcactatttttctttatttttaatcacaataaattatttccagtctaaaaaatatcattaaccttatgtgttatatatcactaaaaaaaaatgcaactaaaaatattaattaattagtcacaaaaattataatttattatcatgagtcgtgattaaattaaattagcaaaattatgtatctaaatgtgacctttttttttgacaaataaattttcttaattaatttgacaaatgatttaattttatgacaatattattccaaaatttattgaattttaatatcattgtcaattagttaattgttcgattaattattttttgacaaagtaatatacagattaatatatttttagtatatctaatgtcttaaaaaaatcatatgataaaatgatttatctttataagttatatcatgtatttgtctgatttatcaattaattaacagatgtatatttttgtttctaaaaaaattattttacttttattccagtaaccttttattaatttataagctaattagtaatttttctccctgaattttgacatgtattaaatcgcgccctctgaattttttggccgttaaaaattctcccgaactattaagattgttaaatttacggacttttgtctaatttcattcaattttactatttcagtgattgtttatgt

SEQ ID NO: 325159 - DNA, 949 bp, Cannabis indica
aaccatgcaacattaaatgttatttctgatctatattaataagcaaatctgattatattgaaatgagttttatttagggcataaaacccaaggcatggctgcatatgagcgaaacaagaaagttaaagtcgaatgcatgtcaagggtgaataaatataagttaaaatacccaacacatgggcaggagcattctcctaaaaaaacaaggatagaggttcatcatctgaagagtcttcttattccggctccatcagaacaacctttccctttccctccactgaggtagatggtcaagcaagtctatcgggctcctcccttattctgatagaacgttcagctggtacctgagtacttgcaggagccttcctcttctttttgctcagcttcttctattcagttgcatccttctggccagatgttacgaaaattataaacaatacgcaagtgcacgtaatcaagtagtaaactcacacaggtgaggtcgaaccacagggaattggattgaataccactagactagacttatgattctatttggcaaatcaatagttttcatgattttaaacagaataaaaaatttaagaaacttaaagaaacaagtaaagattaatcaagatgagaagatagggaagagaatcatgttgttttgtttacccaattgttaatgcctaaatgttatccttttcttgatgtgaatgacagattatacaattcaacctaactcttttcaaatcttttaggttctaaatcacatgttctctaattaatctcttaattagaatcacatgcaatcatcattaagcaataatgtaagtgtcacataggttatgcaaatactctcatttcacatagaacctagattatccaattttagcattctcaattctcacttttcagattttgaattaagatcatagaacatgtaaaaggagatcaagcttacacatgg

SEQ ID NO: 325160 - DNA, 1410 bp, Cannabis indica
  modified_base (1365)..(1365): a, c, t, g, unknown or other
taaaataaaaaaaaaatatattcagaaagtcttagccaagacaatttgactggttccacgtggtactaccagtatttgacacgttgcattttcttgtgggaacggtccatttcacacttctctggaacagccgcttcccattgaccaccaactgtctctctctctattatttttatttttatttttatttttattgatgttattattaattattgaaattattgtattttccaccaattgatagtgctatgagattcttttgtatttttttttttttggcactttctctaaattcaagtgtttttttggagacagaacaagattacgtgggttcaccactcaatactcattagaaataagtgagcagtggccttaattatttattttattaaataataaaatagattttgtattttttaaaatagtataaatatgattttaaactgattttttatcaaaataaaattgaataaaaatctaatctaaatgtgtaatgacaaaactgtttatatttttttttttatctgttcatgtttggaattgttttcaagttagttatattaaaaaaaattgtcaaaaatgaagctcaatgccttgtttttaccattttggaaaatacgtaattaattttgtcatttaacaaaacagatggtccaatctataatttttgcaaaactctttttcttcttaactcttttaacttcctccatctctttctctcaaaattgttcacttcaccactttcaaattcaatttctctctacaatcgttccctccaccatgtccaatcccttggtggaaatcaactctatcatttcttctttgctttagtcattgtctatgccttgttttactccttctatggattttttgttagactaaaatataatatgaaataaaacatatatgaatgatatgaataacgcaataaactgtaaacatatcgaaaatgtatatgcaatgaaaggatcgaaatacctctagttattgatgtttgagtttcaatccctgcgatagcttcggtatgggaattcaggctttctcgctctctcaactctctttaaatggaattttgttgttttcacaaaatgagtgaagagctcggggaccgagatcctatatttataggtgagatactccatcagtatctgcgccacattaattgtcagaatattttgataattaattgggaaatcaaatcaggtaataaatatcaaaatctgaccatatatagaatatcacgtaattaattttatgaatatgaaaaattcatttatctcaaaattaattcttttattttattcctcaaataaaaaataggggctttttcatttttacacttcaaaactagtttttttttttttntttttttttttgtatttctacgaaattctacatagaaactcctat

SEQ ID NO: 325161 - DNA, 1519 bp, Cannabis indica
gtcaaggtgaggtagtggcctaacaaggtggaagagcgaggcccaacaagtgccaacaaagggttcctatattggtgccattagaagcctggtaaaaaccttattaacattcgattagatatatttagcgccatgatgtcaatgcatcagttgttgaagaaacaaagttgtttgggagatttgatgttaacacggtatcctccccctggcagaaggatcttgaggattggtgttcaatgcatttgcattttcagtcccattggtagtcgatggaggctctagaggattgggttgagtgagcgtcttgcctggttcacaagtagtcttttgttctctttctatagacaggctagcgttcgttgtttcatgcttcacagtcaatgtcttaaacatggcgtgtacctcaaccattaacttttatatttgtgtcattgtctatgccatattggtcccattgttagtcaattttggtggcatgatgcttttgcgtttgcatcttgcaattttgtatctagtaaatttgtacaattatttggtgtaaattaggacttacctccaattgtttttgcgccaattgttgatactacaaattgagaggtcaagttaataaaaatagtaactcaacaactctctcattatttctcttggttaacctctcttcttccgattggattcttcaaaggattcgggggatgtcttgctcaaattgtaacatgaattttagttaggaatgtagaaagaattaaataaggattattaagtaagggaattaaccctttttcttatgcttctttccctatttatatatacggtggttggaaaatatctacttgatgctcgtaatgaatctcttgctcaatccatataagagatactcacatagatgacattagtagggtctactcttgctcatgcagattgatgatgtcatcagagctcaactcttctaatttcctagttttgagcttgctcttgtgccctgaaaagacggatgccttcaattattcttttaaatggaatcgttgagttttactcaggcattttatttattaggggatattcatggatcgaaatatttaggcttggtgggttattttattttgacactgggggacttgacacctctctttatgagaaaaatgtgtagtagtatgactattgtagcaccctaatgattagacacgttataatgatttttaattacaatgcacacctttgctaatcaaagagttttatcaaaaattgtgacaaatttaaacttttgaataatattaaacttttgtaatcataaatatgtataagcttaaataaaagggtcgggatcccgtttttaaacttatttatataatcaaaataaactttataaacatgtcgcacaacaactacaaaataaaattcaagttgtcctgagactgaactctccaggtcgttcgtccggacataatacaaccatctctaagctctggactcattgctgctcagtcttagtctttcctttacctatacatgcaagcaataa

SEQ ID NO: 325162 - DNA, 1128 bp, Cannabis indica
aaataatatttaatttaatttttcaaaaatcacgagaggtatgtgtagaattttggtaggttgagtcctgaattttgatgccaaatatattttaaaatattatattttgtatttgaccaaaattaaggactgaacctaccaaaattccacacatacctctcgcgatttttgaaaaattaatttttttttaaaaaataagtggttctcttaggaaagccacaatataattgaatttatgtgtaattagaggtaattacacaatttgacatgtttgtctgaccatgtaattatactgtaactgtcaaatattacactgtaattacactgtgaattactaaaaactttccatatttagcattagctacttagctactaaaaaaatattattttctcatgtaattattaactattttgccaaacaagatattatgaattcatatgtaattaccatatctcatattcaaacattattttaaaatatagtgtaattattaaaatgtgtaattaccatacctagcaattacacaattacttccaaacactacaaaaaattgctacctttgtgacaattttttatcacaatataatttttttttgactaaatgtgacttttagtcacaacctaaaacatagtatttagttacaagtggtcactaatttagttttagtcacaacaagtattgtgactaaaaatatatttagtcacaacaaattataatttttgtgactagtacttttagccacgaactttttagtcacaacataagaatcatgatttataattagtcacaattttttcacttttagtcacaaattttgttgtgactaaaagtaaaagaattatttatagtgaaacacactcttaataataagtattgtacctctttcttttgtattgtgtctttttgttattgctctctctgaaatgagatgagtgatccttttaatatagaccaaaggactcaaaatacttacggtcatatttgacagttaagttagttaatcaaaaaccaattaactaaccgaatattggttgagaatttaaagaataataccataatttattatctcctctcacctcttgtaaagcccgcttagttaatttggaaattagcagttatttatgtt

SEQ ID NO: 325163 - DNA, 1169 bp, Cannabis indica
aataaatacataattaatcaaatatcccaatccatcctacttaaaaaagaaaataaaaaagtgggaaaaacttgaaaccagtttcggtattggggtatttgtttatagaaatgaaataattttggtataaaagagagaataaaacaaaaatatttgagaagggatgacgaggacgtcttctacaaaagagcgtccaagttctcttcatgtaaacattgtgggcaccaccaccacccattctctctctagatttccctcttatgttacctcttcctctctctctacgaaacaacggcgcaatcgaactctctccctcccccctctctcttcccccatttctccagttgtctctatttcataagcctccttttcttcatatttttctgttgaaacttgaatttgttttatagaaagactgagaattttgatcgaaactatcatcatttcccatttactctctctctctttcaattttgttttcttttttgttcatttcgttctaactcgggtgggtggaccttagctagtactcacttcgggtttctgtgcttgcttgccggtttacgcggcgcaagttagccgggttcttttagtttttttttctgtgggaaaaaaatctgcttcttttttcgttttttggttatgggtggtgggtttttgaagttgttgtcatagattattaaaaaaaatcattttcttttgttgggggcgtatttgaaattataattaatagtttttatggggatttggttctgggttttctctgtttcttccaatggaagatgtgggtgaggagtttaggaggactgtacttccttcttaaatggtctgatgaatttttcggactaatggctgctcaagcaagaagaagaagaagaagatggtctttgagttaaactctccatactgcatgtgggaaaagggtaagatctgaaaggccggctttgattggaatctgggacttttttttgaataaaatattttggctctgtttgcttcttcagtgttggtgatgtttagcctgcatttattttatttcaaaaagaattatattatagatttatgttttggattctaagtggaagaggaagaggtttggattggtgggttttttctgttttataaaggatttcttgcatctgggtttctatcgtattttccatttttat

SEQ ID NO: 325164 - DNA, 691 bp, Cannabis indica
atcgagtgaacctccttcggtagcagtactagataattgattgattacatgtgtatcctattcctattccattcttatcctatgatgtgaagaaaattcattgcttatttccatctgaaagaagaagaagaagaagaagaagaagctaatgtgtggttggtcctctgtattacttacttttttggtcttgtgttgagcaacaaaagaacaacctttaaaaggagggaggcttgtaattgttgagatgtgaataagcattgttctcaaagattttgtagtcttttagaatatgactcttacagtgagagatgtaaagtgagagagacccaaatgaatgtttttcttttcttttttactttttatatggaataacgggatataaataaaatcctaaaaattaataataaaacccaatactatgaattagctttcctttcatttcaagagcttgtctttttgtgtaaaatcaatccaatttgtgtaaacaaattaatagatagagagggattgatgcttgaattataagtctacctatcaattgtatattgaagccaaaatggtattctattgatgttgacaaaaagctagatgacagcttcataaagaaacatactaatttacagatttttctagcaattgacttagtcaagaagggcacaacaatgaacaaactaccatatatatatatata

SEQ ID NO: 325165 - DNA, 587 bp, Cannabis indica
agttagagttcatgactgaatttctagggctttgcttctgtacgagctgaattgttttcttttctgctgatttttttgatgatttaaattgtttttaagttggtttgggtgttaatttggtgaaagatcaagtttttagcttttaagttcaaacttaagtctttaatggcagatttggattcagagatttatatctatttttattgcttaaaatatgtttattatggcctaattaggtggtttggagagtttaacactatttggggtaaaatagagttcatggtaaagcttttagggtttcttttagggaacttgttaatcgcttcaggcagtcatgtagaaccggttcactgtttccccaaacagaaccctaagaactgattttccattttgagaatctagtttacttgttctagcaattttggaaccctagtttttcgtggtttagcaatatttagggtattgccatgctatctattgacagggtatttcgtggtttacttctagttttaattttaagtctccaaaaagtgatttagcgtatcacttatcagttttacaaatgttgtgacttaggggcctgtaaa

SEQ ID NO: 325166 - DNA, 729 bp, Cannabis indica
actttctagattgttcttgatttttcttacaaatttcttagaacattgtaaaacattctaacatattctagatttgataatgatttttaacaacttcatgcatcttattttcatatttctcaacatggtatcaaaatcaaattaaaactctaacaagtaactgattgagtcttgtaagattggttagcaaataaatagtcactatacattatgaggggatgttaaagagtctaatatatagaaactaaatatcatacataaaatgcatgaactatactcctctcatacctaattaattttgagataaaactcgatctatcttatcttatgattcttattcctgtttctcaacacaaaaagaaaaaaaaatgtatatatgagcgataaagtctacccttcaaggtcatatcgtttgaaaaaaactgacagtactaaaagtaattatcaaaaaaatatataaatgtattattataattattgtttattttctggataagaaatgtctattattgtgtacgtaaagtagtaatattttcagattccatggaaatttttgacaaaacaaggttccagatggatccatgaattatttcttaaaaagaaaaatacaatgcttcaatattaacatacagcaagaaaaatattaattttgaatttttgtctctctttttctatttttttttaactagagaatttcttcttcttccttcttcttcttaaaatatcata

SEQ ID NO: 325167 - DNA, 580 bp, Cannabis indica
atgcatgaaggagttaaatgaggttgcagtttgcattttgcgccttattatagaccctacgataactttcttagctttttattaatcgttttctttcctgtttttgcttaacagagttttattggggatatcaatctctacgtagaacatcgggaagaacaagatatttttgtaaaagttaaaacaggcttcccatacctgtgcaactgggatttgttttttttaaaattttttgggtactcaaattaaataaacttgactagaattttttgaaatataaactgatttttttatggtaaaaccttctgaatacaagtgattaaatttaagtcattcacattattttaaaattattttaaagagtaatttgaggtataaattctcaagtttaactcccggtttcaaataaatactaagtttaatttttggcgataataatacttaacttataattctggaacttttgtaggtacttggttgttaagtgttaggtaaattgtcacgtgacaatctctaattggccaaagtcattaaattttttattattttaaaaaaattagtttaaatataccaataaaaa

SEQ ID NO: 325168 - DNA, 1035 bp, Cannabis indica
acaacacaggcatactatataataatatagttctattgagcacgtaattaaattatttcatcaatttacccttctcgggtcataattaccaaaatgcccctagctcaccaacggggtctttaacatattaaaattcatataaattcacatatattgaactatataataatataattcctcaattactcataattatctagttagggctttgctgatcctttttcttaattccgggtattacactaataaagctatatttgaaaaaaatcctatttctatttagatagacttaacattttttttagttgtaataccttttatcttcatttctgattgcaaattcaaagcacaagttaaatattattattaaatgccaattgaaattacacaatatgcacatgtcatatttttatttgtctaaataatttaatcatttaaaaattataaaatttattttcaaatttagaaaataatttaaaaaattattataaataataaaaagaaaccaagaacttaaacataaagaattaaaaccctatttctcaaaaaaaaaaaaattaataaaaccctaaaattaaatagatttatctctttatttttctttcccctattcctaaccccaacatgaacaagcaaaattcaaataaataaataaataaataaaacagaaaagacaaagtaatacattcataaaaaatctagatttaaacctaaagggtcgtttagtacagtgtgatgtattatactgtatagtattaggttagattgtattatattagtactatttaatacaatattattcttgatattgaattgtattaataagttgagtaaaattataaattatttacaataaactcgacctcaatccctgttggaatatcttttaccaagacttagatttactaacaagtatgtttttaacatcctaaatatgaacttctaaaacgataagaaataaacacataaaaggtatgagaaaccttacattggttgcagcaaaattaaatgactcattccgctcggatctctaac

SEQ ID NO: 325169 - DNA, 1050 bp, Cannabis indica
aagaaatgccgttagataggcacttttaatatataaagatatatgtcaacaaacaaatgcctttcttttagatttttttttctttctaatttacattttcttttgagtacgtatagtttaactaattttcggccagggaggctagctattggtttgtgacagcagaagaagctaaaatattatctttaaagtgagaggatagattctacttaattatttttaaatcaatatatattttaccacttaatatacgtcatcaagtgggtgttcggcataatttgcaaaaatgatcattttttattatattatattatattacattattataatattgaagattttattttattacagctaaaagcattatattaattaggatagaaaaaaagttaattaaagcaagtgattttgttcattttctgatatgaaaaaattaaaggacaaaaatcaacctagttcttctctcaagctcaaatggagaagacattatgtggctcttataacatgcacattaattacatgagaaccatttactttctagtttctacagtgaaccctaacctaccacacaaaagatttttgtggcgatagttgtaaatatggtcaataacaataatgtcatgcatttcagatagatataacttaaaaatatccacgaataaaaacaatgatggcatgaatatatatttatatctttctccattcagtttgctttaataatatttgttttatttacggtataattaaatacttaaatttaatttttaattataaataaatatctaaatttaatttttagcggtaataatagttataattctgaaacttgtgtaggtacttggcgcttaagtgttaaataaattatcacgtgtcaatccctaattggtcaaagttattaaattttatttttttaaaaaaaattaatttaaatatactaataaaaaaataatacatgcataatgacttaattaatatttaacggctagatatctacagagttctaaaaatataatttatatattattaccactaaaaattaaacttaaatat

SEQ ID NO: 325170 - DNA, 1338 bp, Cannabis indica
aaattaattttttttgtcacatttttttgtaattattttattttttgtgtatatttatgaaaaaaagcccacttaaaatatgctcccatacataagtgaggtatttcaaatggacttctaattgggtgagtgcaccttatattgctgaaacacatagagaatttctaacggtgttgtcatgatcgcagatggaaaggatacgaaaggatccctagatctctcacgacaaagagttctacctaggatacgaaaatttaggaagatccctagatctcccacggcaaagagttctaccctaaggtgaatgatgctagagttacggattataataaagtgtcagatctccttatgggaattgagatatactcagaaattgatatattttttttcgttttataaagaatctgtttcggccatcctgatcaaaaagagtaaaccctctggacggggtatggataggtgaatttggacgaaggagagtaataagcatttctcgtgtaaatcaacttatcttatctaagctttattagaaagggctcctcattttgatgtagctccatccctctggaacaaactgtggaatagtaatatattggaatgccataagataatttggtggtgtatactatctaaggccctattcgcgcgattctttctaagagattccatctagaggatgtgacctgccccttgtgtgggggtggtgaggaaactttggagcacttattttgtacttgtaattgggcgttttaattgtgacggtcatccctgtgaggtatttttctcaattcggcatatatatgtatatgtatatattgttgatattagagaaatttacacaatacacataaaataatttattctttttttacattttttgggaattttttttatttatattttttacaaattttatatatatatatatattttcagattttcaactggtttattttttatttttcagagaaaaatattactttcttatagctgtaagtcaaaaaaaatatttttttaaataatagaagaataacacttcgtattgttgtataaaaaagttacgttgctttcccatagcaataatgtcaaaatagttgtttttcaaaaataacggaatatcgacactccatatttctgtaaaaaaaaccatgaaaatataaaaataaaaaacaataaacacataaaaatggaaattttttagtatttttatatatttatgagaaatgtctatggtagagaccttggttttgtccctatggtagggatacttttctagcccttgattattgatttaatggtaataaagttaaggaaacatgatagtaatagtggaatcta

SEQ ID NO: 325171 - DNA, 668 bp, Cannabis indica
aataaaaaaaaaataaaaaagagaatataataaggattttatttttttgaatggtaaatcaatactttattaactattaattttagttatgaaacgaggcaacaagtcagttgaaatattcttcaaattgaaacgacaatttgaatataatatagaggctcttataaggaatgagttaccatatttgctgatcgttttacaaaatgaatcgaaacacttcttaaagaactaattaaagttctacaatcattaaccacttgaccaaacataaaaatcataaaaatagaactacgaatggcttacatcacagagagacaatctgtttcaagtatcacatgtggccactgacgctcctttatccaactcaatacttctcatattcccattgcttcaacaacttcaggagaaactgatccttgaagcagccttgtgcaacattcaatcaaaagtcctcttgcatcatttttaagcatttttatttggtattttaaaattcacttaaattataaaaaaaactattaaattttgtcaaaaataaatacattatcatcaaatattctttaaagtagagatgttataaagacacaattaagattagagtaatttgcggcataaccttcttaagtggctaggtttttgcaactaaaccccaattctaaaattttggt

SEQ ID NO: 325172 - DNA, 1292 bp, Cannabis indica
catgttggcattagttctcgagtagtagtcatggggcagaagatgaatttggatccaaaatcggatcgagttgaacaacagtgcacaggcaccaaaaccagaggatcacgagatgagtgccaacatatcaccattgacacaccaatattacacttattattagattcaagtttcaaccatttgaatatcgttttgtagaaaacaagtactgaccacattagtcaatgaagctatataataactaaaattaatttaatacatgtcaaaattaaatggacaaatgctacaattatactatattagtgttggtttaacacaaaaattagggagtaatgacctaaattaaaacctatttttttggaataaatattatttgggaaaggttgatatgactatagaattgagattattattgaacagaggatagtaattaaaaaaaaaaagtaatctttcatagacactctgtattatcatatcactaaattaatgaagggtcttttagctaaaattagacgaagaacttaggaaattgagacatgtcacatgtacgaacaaaaagaaaatcaaaataagggtccaatacaaagttgtgaagtttaagaggtctttagattaagatgttgaagagtatgaaaagtccatgtccatgattcttgatcagttctttctggtaatgtcattataactttgctgtgtatattgtactaatgaactttgtacttatttattgagatattgcacaattcggcaatttttacggaaagtgttggccgtacgtaccaattgaaggccagttagtaagttttagcaactttaaattagtcgtcctatgactctatttatatggatctttcagttttattatatatatatttttgaaattagttttattatatattttataaacaaaaaagtgtaattattgaaagtagctagaattctcacacttttgtgtaaagtttttttttttctttacatgacgttcgtatccattcccatgcaagttgtatctcgagcaccacaacgaaaccctatctgtcttcttatttttttgaagctttcttttggtcaaatttgagatgagtaaataaacctccaaatttgaactttggttccataataataaataaataaataaacctccaaataaggtccacactccacaccacacgtatattgtataaaattttgggcaacaataatttaaaacaaaatataagtgtgaaaagcagtttcaaacctaaaaacaaaataataaaaaaaaacttaaaataaaagatatacaataacat

SEQ ID NO: 325173 - DNA, 881 bp, Cannabis indica
aacttaccaacttgattgattgtaactcatttcagcaaaagagatatacaatagcatatggatatagcttgtttactactccacagtcgagagtaaagtggtgtaaagaggtttgggcaaggctgaacacaccaaaacatagtgtcattctttggttagcaatgattactcgactgaaaactaaagagaggttgaaaaggtatggcatcttatcaaatgatcactgcagcttatgtggttctaatttggaaaatgagcagcacttattttttgaatgtgatttatcctcttactgcttggatgaaatcaagcaatggcttgactggaaggctcgaaccaggtccctccctaagctggttcggtggattggcagggcaaggctctcgaactttaaaaaaatggtgttgtctgctgccattgcagcagtagtttaccatgtttggcttgctagaagtggaatcatttggaatggaaacaaggtgaataaatgtcaaatggttgaagacatcaaaggaagcttaagaacccgaattagtatggtgattccaaagaaaatacaaagtatagatagagattggttttttgctttatattgatttgtaaagtgttggaatgatgtgaaaaagaattatagaaattgtataaattgtgaagcccttgtatattagcttgtaaatatgttttgagcaatacaaatatacgtacacattgatcaaataaaaaagatacacttacatataaagaaacttagagattgaaatatattatctatataaaacaaagttttttaatggcattatttcatatatgtaatgatttttcccatagttgtaagtttttttttttttttaagaaaattgccatatttagtgcattaagtt

SEQ ID NO: 325174 - DNA, 691 bp, Cannabis indica
agtcaataatcttccaataaaaaaaatcaaacaaagacataacaataacaaaaataaaaaacaaaaatattaggattacaaaatactcacaaaaatactaaacaacataccaaaaataaaactaaacaactgactatatttatatcattagatcatatcatattatggattgtccaagtattgatatgatatccctaccaacttttgtacgagtattgctaatttaggttttttcctatattttttatcaaaaaaaattaaataaataaataacaatctttttgatgttagatttttttttttgtcaaagtatttatttatttttttaaaagaatagccttagaagaatcacctaaaaagtagaaaactaaatttggtaagaatgaataaaaaaaggagatagaaattttttgaagaaaagtaaaaaagttaattccttctatgatgtttggtaaataaggagaaaaacttttcttatatgaaattactattttgttatatgattttaattctaataattataagtgatgataatttagtaatttacacatatttttgttcactattcttttttctctttcattttttgggtgtaataaatttaggagtgttcatctaatctaatttgctattattttgcttatagtgcatccaattcacactaagtcggattttatattttagatccaat

SEQ ID NO: 325175 - DNA, 1256 bp, Cannabis indica
aaaataatttccaacacgaaccagaccatttgttcacatgggtgctcgggccttgaaatcgagctcccgagattctgttttacatacttccaatgtttccaaggcttttgaacttgaggatgaggtctctcccctgtttttgaccatttagattcaatggttacattggatttgacatttgagcaattgaaggtagcgtcccaggtttattatcaacttgggtgctgggcccaacaccacgttaacatgggcactgggccctatttctagggactcgggtttgtagttttctcgctaagtgtacctaaatcttagttatttttaatgacggtgaagatgcccgaaacattttttgctgaactggattggaaatagcctaggttgacaaaatgccaacctgggcgcagggcctagtccaagtgtcaacctaggcgctgggtccttcttctagccctttggaagttccgtttggtccccaaaatagttagtcctcaatattttctgaagacgaagatgatgctcaaaagaattctggaaaaactccatttttatggcctaggttggcaaattgtccacctaggtgcaaggccaactccaagtgtcaacctgagcgctgggccctttttttatgcccaagaactatttttgttcctccgaaaggatttatttcacggttttgatgaaaatggatttaatgcaaaactaggatcttcgattggatgcttggaaggcgcccaaattgacagattgtcaaccagggtgttgggtgctcaggggccctggggccctgggtgctcacaaataaaatttctccgaaattgattctgatgcctcaaacatgcccgcggtatgtcaagtcaatgtcccaatgcatgttttggccactttgcactaaaacggtctccaaaagaaaaacacttgttgaggatgtcaacttgggcgccaggtggaaacccttagtgcccatgttggttttcgggttgtaggttcgtgtaattttagcttccggacattgtattaggttgctccatgccttgatggtacatgataatgaaagacaataggtttgattcaagttattaaagtttgaacttccaccctggagattccaaagtcaacctaggcgtagggctaaggtcccctccaaagttgactactatgactcgggtctactcaactccgtgatgtcatccttcatgcgacgtgtcaaataatgatgtccacgtcaccagaaaaaaaatttgggttaacatcta

SEQ ID NO: 325176 - DNA, 749 bp, Cannabis indica
caaggtgtttgtatttttgatgaagtataatattattattggtgcaatttaatatcagatctcacttatttaattttaataaatattataaaaaaattactaatcagttataaagcgatatttcatgatgtgtgcttcatagtgatgctcgacataaaacaaataaaaagcgagctgtagcgacaagagatactacctttctcgctgaataaaggaataaaaaagttacatttcgtaactaccctatgaacgattagcattaaaaagtttaggaatccaacgaacagtgaaacgagaattggcatccaacaaaccaaatgaaaaatagattagtctattctattcccctaactaattatgtctcaattcaaattgttgacaaaagttgtgttaaatatctaataatagggaataaatgatgacatttgaattgataaaaaggtaggtgtccccaaccccatggaatgataaaaaattaccatgttaaattaaatttattggaattttcataaataaataattaaaaacaaaaacccaactcatgcatgagatgagatgatggtatgctaataatgctaatgcagccaagattataccacttttacagctgacaaagctcataaaaggcaaatatatatatttatatgtagtataggttggtaacaaagagaaatacaatataatactagaattagaatattccactactacataaattcataaaaaatataaggattatttcataaata

SEQ ID NO: 325177 - DNA, 1041 bp, Cannabis indica
tgtttagctaattttcaacaacaccaaaaatctaagattatttcattaaataacaataatattttgtaaagttggagaataagtaataaaaaaaaaactgttaaactaagaatctattagatagatattattaatatataaaaataaagagagagcattttaggtgtgagtattacttttgtccttgatgtaagggtgtttctattttcaacactaagaaaaattatatcccaattttgtgtaaataacagtgagtactataattatagtggacattctgcttatttttaagaattataaataatttttagtattaaaaataaagtttaacatagtcaattatatggtataaaatagatagcgtgcaactaactattttaatatcttatttttgacaccttaaattattcataatttcttaaaaacagtagtgacatttatattttaggcattgaaataaattataatctaattttcttttatataagagtacattatagtcataatagatatttcaattttttttgaaaatttttttagtactttatgatgtcaaaaaacaaatttaaacattcggttgcatgcatacttatttttttttcacccgaatatttaaatattatttttgacaataaaaattattctaatttttaacaaaatagatagctagaatgtttgtcataattaacaacaatatacataaatatatttatatgaaaatttgaattataattttgctaaaaattaaaaaattccttccaataaggacaaaaataatgtccctatatcatagaaatttggtatatacattagctaaagtttggacaaacgatttaatcttatttaatgttactttacattcacaaacatatctattagctaatgtttgaataaacgatgtaatcttacttaatgtaactttacaatttaccgtttacattaaatataaattaacaaccaactttttctatttcaaaaaaaaaaatcaaaaaaattcttcaatgaccttaattaatacaaaagtgtaatacaataattaat

SEQ ID NO: 325178 - DNA, 754 bp, Cannabis indica
taatttcataattaaacgtgattaactgctaatttccaaattaaacaaagcggtctttacatgtagtgtgccttagcattagggcgttacagctaaaaccctatccagccttttcctgacattttttgtgcctcttctcgtattgtaccatgtacacttcaccccctggaaacccaagtcgacccctccagtatcaagtagaaagtttcgaagcagatccccttcacggctagataatctatttccccccatcttcgctgattcttccaaaatgatattatgatctcccagaacaacacacggctccgaacactcagccaccttcactgtaaaccatctccagaattcttccttcttttctgcataaggaggtcaatatatggggaaaagatgccaccgacaaaacccgcgcgtttccggaattatcccatgaaaccccgtatcaaaaacttcatgaacatatatcataacatcatgtctccaagctaagcagaaactgccacaaataaccaccgatggaatcccaataacatttgcaaatcctaaacgattcattgtagctgtcatagcctccattccaacctttgtttcagagagaaacaccaactatgtatttgtctcatggattaaacctcgaagagttctctccgtcgtgggcctactaatcccacgaaaattccaagaaaggcacctcatgacgaaggtggtgttggaaattattttaccaggattatagatctactcacaagtatgt

SEQ ID NO: 325179 - DNA, 800 bp, Cannabis indica
ctaggggtgggagtagaattgacagtaaagaaggtgaagtaggaggcttgagtataatacgtgtccatttttggagagtggtgatactgaaagtcggtgaagcaaggtaattaagaaggtgaagactaaatgacacacaggaggtttgatgtttgaaagagaaacttaaaaagacaattaagggtaatgaaaaattaaaaaactgagggtatataagagaatcaagcaggacgtgattaagagacttataatatataatatatatatattcaattgttattatatgtgcacaattaaaagggtacgtaaaaatgaaacaaaagaggagtagtgatgagtgatgagaaaaaaggggttatcttttgctttatttaattgttttgttttgttttttttttttctatcttttatgtacatatacacctttgcgatatcttgatgacttgttctgtggtgaggtttcttttaccacgtaatggctcttaagaatctaaattaatgtatgtgtgaaaatatatgtaatatccttctttaacaaaaaaaaaaaaaaaagaaaatatatgtaatatatttctatttcacacatgaactcatgtatctcattttttaaaaacccccaaatttggttaaaagagaaataattttaagttacatcacttacctaattatattggtcttcaccatctataaatatataatatgaatattattggatggttaccaagtaaatttaactataaatattaattttaaaaatattaaactattaaattttgtgaataataaaaagaaaatttgaa

SEQ ID NO: 325180 - DNA, 1218 bp, Cannabis indica
aattcataatatcttgtttgacaaaatagtagtaattacaagggaaaataatattttttagtggctaatatttaatatagaaattttttagtaattacacaatgtaattacattcaattctcatggggggccatgagaattggagagtgtaattggaacccctcaattacttccaattacacagttacagtgtaattatatggtcagacaaacatgtcaaattgtgtaattacctccaattacacacaaatccaattacattgtggctttccaaacgcaccctaattgtagaaattagaattaattgtaattacttagtttcctatttctttcctagtttcctatttaatctctctatgtttgtatataaatactttatattctattgaataatacacaattctattcaccattctcttatggtacggagcaaattttggattgggattcgaaattcaaaattagggttcatcacaaattggagtttgcaataagggtttgattttcttcattttttaaggtcatttttcggaaaccctatttggagtgatcttttgttctcaccgcccattcagaaagtttgcctagccgcagatctgccaaacccaaattaatccggtcatcgaaatcctcacgcgtgtagctcatgcaccgcccattgttgttgtcacgcaccccacgtgccggtgcgtgtggccgcgtccgacaatttttcttgcagtggttggtttctgaggcggctcctctctggactattcgcatctgtttcatgctcataaaatccggttttgtatttctctattcttcgtgtttgagtacgccttatatgcttagctgatttgtgcttgtgaagatttggggtctcctattttggttgtgaaattttgagtgctagctcagtatctctttttgttcccaacttattgtctcattttgcttgcccctttatcgaatttgttggttgatttgttgtttgagttagtttcgtggaacaaacataacatttgtaatggcttctggaagaccagttcttgtttctgcagttgaatatgtcaaattcaatattaggagtctcttaggtattcatcttcttctatcactactaatgctgatttaggcaaatcaaattcttgtcttctttcctcatcttcacaaatctttatgtgggttgaaacaaagtcctcgtgtttagtttggtaaatttagtcagactgttga

SEQ ID NO: 325181 - DNA, 1233 bp, Cannabis indica
ggtcagctagttgtctgaaaaataaaaaataaattccaagtttaaagaccgcttggtcggtcacattgtctttaagaaaaggccttatggccgaacagataaaaaaagatagaaaaagaaagcattcaaatagctggagtcccaggctctttatacgggtcgactgggtcagttggcgctggaggatcatttttctgagcgaggggcacttcaacattttgatcagttggagaggtggaagtggtcgcctcagattccccgtaggccacctgagcagcgcagtattcgagaaacatgtctttggtatcgcccaagtattcaaaatatgcctagggattggccttccaaaagtcataaaaaaaatctcgagaccagatgtctctagggcattcactttccctccaagcctctccacttcacatatctactttttggcctctaacttatacttctcaacctcagctctaagttcttcctccttggctttcttctcttcttccaacctacggaaaagagtccggagagtctccctttcttcttgaaggctggtcacttctttagataaggaggcaatgtcggcttcgagctgttcggtggagggcatgactggtagatcctgagtcagtttggccacctttttcttagcagcaagaagcttcttattaacctctcccagctctatcgggacaaccccaagctgaacctgggcctcctcgtcatccttcctggctaagtccacttccccccgaatagtgttggaaatgacggcattcttagacgcaaccgatttagctcgggaataagcataagccatcttcagactggtctgtacaaagaaagaatattaacacttgaactaagtgaagaaggaaaaaatgaaactatcagaaaggacttacccttgaaagctccttcaggactcctcccatcaccaacttcaatgaaaggtcattgtctgccccagccagctgctcgttcacctcaggattcaaccgagtcacatagtgagtgagcattttttttttgcctcttttggtctctaggtgcagtatgggtggtggagaaggggccttgatgtgctcggatccacttctgagcagctcagatccgcaactcgcctactctggcctgtctgagctacctgctcgagaatccttggacttagttattttttgggtacaggagagtctacaataggtttttccctcagagaggtcaatgaccacttcagct

SEQ ID NO: 325182 - DNA, 1388 bp, Cannabis indica
ataaaatagattacattgaaatggagttttatttagggcataaacccaacagacagaagagctacgctaatccaaattgtaaagatattgaattccaggttggggattttatcttcctgcgggtgtcctcaatgaagggaattcagaggtttgggaaaaggaaaagttgactcctagatttatttgcccatttagattcttgaaagggtaggttaggtagcctatcgactagctttacccctgctttatctggggttcacaacgtgtttcacatcttgatgcttcgaaagtatgtgtttgatacgactcatatcctaagctataaagatatcgagctctagatagatttgtcgtacgaagaacaaccatttcagattctggacagaaaagaaaaagtattgcggaacaagactcttccgctagttaaagtgttgtggaggaacaacaaggttgaaaaggtgacttgggagttagagtcgcagatgtgggagcagtatcttgagctattcaggtaaatttcaaggataaaatttctataaggagggaatagttgtaatattttgaaaaatattataatatttaattatattgataaagaagtaagattatgatcttacttaagctaattgtgtgataattagtttaaatttaataaatgattaaatagagcgtaatttattaattacagagattaaatcgaattatgtgggtattgcaaatatcatttttgaaataacttatttttgagttcggcggccctaggaactcgatggagtggtaagaaatgtcacaacaattaagttgcgttatattatatttataccagactaggttgaaatgttaagaagtaggttatgtcgagaaagttgaaaatgaccatagtgcccttaagttatgtttttagcttggtgtgtgtgaaatgagtaaaatagtcatttcataggttaaaatattattttgtcttatttagattattagagctgaaaacttaggtatgatgtttagtttatttttcttaagttaataatttagaaaaggtaagaaagaaatagaagaaacctaaattaagaaacctctcaagctttctctttctcctcttttcggccctagaagaaaacgagggggaattcaagttctttcatctcaatttcagctcagttttgctataaaactgctctagttgctatccaaattcttgaggtaagtttcttactagggctgtacatcggtcggtttgggcagtttatcctatatattttctaacccaatctaaagttcgggttgctaaaatttaagtgcaacctgcccaattttaaaaaaaaattataaaccaaccaacagtttgggcggttggtcgggttaacccgcccaaaccggccaaacatttt

SEQ ID NO: 325183 - DNA, 664 bp, Cannabis indica
catgattaattccaaatccaatgctgaatgggaactgagaagccatagccataggattaggattggtttgcttgatgatctcatgatcatcggccagctgcaattccagtactgtacttactagtagtagtagtagtagtgggattattgttgttattagagagattattatctttgagaagagatcttgttgggcttggacttggtgtccatctgggcaccaccactgtaggaggagacttattattatgatcatccatacctgctaataactctattgattaattgtgttctgatcataatttaagagtagagtaagaggtgggtactgcatataagacaaaagaaattatatttctgcatatatatatatatatattatattatattgtatgatgattgatatattccagctattaattatttgtatccacttgtatagattgatatagagagatttccttagagaattgctatgcatagcgtgtacatatataatagaagatatattataggtggtgttctaaaagaaatctttatattttatataatataattaaatataaccatgattgccatattttattattgttataaaataatatagaataatataaaataagtaaaaaaaaagaagaagaagatgaagagagaaagagaaact

SEQ ID NO: 325184 - DNA, 655 bp, Cannabis indica
atgatgttaaagtgaaaggggatgttaataatcatttaagtatggataattataggattattggtttgtgtcctaatccggaaggtgatgagttcatttttctaggcagtagtagtagaactgcttctcgatttgctctttaccattataagattggaagaattggatttcaacaacatcaccacaagatatttccatatgattttgatttcaagtttcgttacaaattaccctatgtttttgctccaattcatcttcccatccctaccaaaattcctatgcttccatctgtttaattaggtttagtttgtgtcttatcttgaacatttgtattcatttatcatatataagaataactatattagcactgttatataatcaacctatcttcatattatttgattgagctactcatttgagatttttttattaattgtttaaagtggtattagttttgttaaattaatctctgttgccttgatctgccctgccttgaaaaaacacagaaattacttaattttagtgaagattttgagtttagaaacgaaaaagataactcttactcaagatttataatcaggggctccaaccttgccatccttcggaggcgtttggttgggaggaataaaaatataggaataggaatggaatggaa

SEQ ID NO: 325185 - DNA, 815 bp, Cannabis indica
ctagtgaaatataactatacctcaaacttaaactaatattccatattttttaatttccgtctttcgttcattatataccatagcacattaaaataatatactacaatcttaaactaatatactacctttcagttatttcaaaatatatatatatactacctttcagtttttttaatatattattgcacataaaaacgatatactattgtgcaaaataactataccaaacacttaattattcaaggttataattgtaattttatcatcaaatttttaactaaaaggacattttgttaattttttttaaaaaagtgacatttattaacttaattgttatatttagggccattttgcatcttggccataaaaaataccacataatgtcaactaaatgggctttggattgctgaaatatcaatttttttatatgagaaatgttaaaaggcacagcttaacactttactacgtatgaatattgttccaactaaatattgagtctcatgtaatttaatgtaaaaaaaaattaagtgagtatcgttaactaatcgcaagcttattggcccacatcatgaaaataccaattatctcattccagtatagtctttttgacaaaaaaaatttaatactatactaattaaaaactcgttaaaaaaccttaattaatagtgtttgaacaaaataaataataataataataatatacatcctgtatggatgtgtatattaatatctatagatgtcatatatatttcttacaataaaataattattctttttattatatataaaatatatactatattattacaactctg

SEQ ID NO: 325186 - DNA, 1740 bp, Cannabis indica
ggagttttacctctgatcaacaatccatccccaacaccttcttcttgcagttctaactttctcttcaattcctttgacattaatgtgttctgaacttcctctaatgccaatgaatccttgccatacatcatggtatccaaaaaatcctcataattctatgtgggaagagactgtcagtgcgtgatttgaggaacaacttctaagaggcatttaatgcccatattccaaagagactttcagtcaaagttacatcagatcaacttcaacagtcaggacacgtgtcacccattcggacgagcttccaagccgaatgaggtctacgtgcgaccaagaaggtcccacgcagacttggaaggcaaatattatcctattttttgtactatgacatgccatctagctggatgacacatgtcttacattcctcaacctgggaggatattttgactcctagtagcccacaaggattgatatgaaagtctaaattatgtgtatatagtaggaagtctggacagggtcatcaaaggacatccgacaagctcgattgtgtgatcaaatcggatgcactggccatgaaatgcgtgttggagattttagcagtgatcaatgacacctttaggcttgcatgacatgaagtaacccctacttttgtgggattaattcatacctttaaagaataaaggcaatcagcctaggcttgcccaattcctctattgtaattatagaaacatattaatttcttattttattttttatagtttaagggaaaccattcctatgtaatgagcccctataaaatggtggtctcacctcactattgagggatacgaattgtatcagagaaaacactcaagagagaaatagtgatctaagagagaattattcaaagatccattataaaagctttagagagataatactttgttctttgtctcataagtcaatacaacccaaaggagagtaggcttttaccactatcacgggccgagcctctagaaattccaatatttttttatttacactctttactttttattatttattttatctaatcgctttaattcaggcttactgtcgttggatagaagcgaggccaatagtaaatttatgtagaaaaaaacttttagaaatgtgtcgaaatcaagtttttaaagaaacttggcgcataaaggtctttgataattttaagaaacaaagtcactactatattgcttgttcctgaagattctaaatgtaaattaaacttagctattaataagatttgttcaaagttattgactttcttaagtttattatgaatgtggaataacaatctaaaataatctaatatgtgttaataatcacattaattatattagaatgaagtcatctaaaataaaataaaaatttattggtggtaatgaagtgtgatttatttttcttacttatatagtaaaaatctgtacattttagatgaagttattagagtaaattttgaaaatttctactagtattgtagaatttatgaacagtgaagtaataaaattacataatttttaatatatagttttgaggttaaaatgaatcatatttttacaaatgtgtaaacatgcttatatatgaaatcttattaaacaagaattgtttgtgggctaaactgttcatttaataatattagatttagatgtagatgatgatagatttaaacaatttataaaaaacttaaggtttaatatttctatcttaatgaaatgtgtgaaacat

SEQ ID NO: 325187 - DNA, 1623 bp, Cannabis indica
cactaacagacaaattgggatcaacaaacccatacatcacaattcgatgaaatctgaaacattttagacatatcataatgtaaagtttcaacctttgaggatgaaagatcagtctcatcaaacctaatttcaacattattatttcttcgactaaataagccataggaaacggcaatgccaatgaatagaaggtgaataagctcccagaacttggtgataacagattcgctaataaagtcaggagcttgagaagggaacaatggtagaagaatgatgagtatggcaactaaaagagctttgaaaagtaagtgagtacatgatttacctcctcctcctcctctttcaactcctctttgtcgtcgtccgcgttgttgatgttgttgtctcatggtgtttggatgaagagatgggtttagatctgagtatgggaaatggggttgtggttgtggttgaggttcctccattgatgaggaaagtgaggttgttctgttagagctttggagtttgtgtaagaataaagacaaaggagtggaagactttgaagacaagtaaaaaaccaaagtgaagtgaaatgaaaaagataaaacacccattcaaaaaaaaaaaaagataaaacaaagtaatttattactattatatattgtcaataataattattggatttttttttttggtgaacaagaagtttccatttaccattaaaaatacattcttacataaattattttaaataggtataatttaatgcggaaatatttaagtttaagtgttgtttataaataaatatttaaatttaatttttaacagtaataatacatgaattatatttttagaacttttgagaggtgcatattttttctgtggagatgaccctcatggggatccgtccctaatgggatgggaattcccatttaaatggggaacgagacaaggataagtatcatttttgtggttatcaatgctcgagtgtggttatctcgagtgtggttatcaatgctctcaatgggaaggattcttgctgggcgcttgaaaactatatctcatcttgttctaagtcttctcccctctttgttctaagtcttctcccctctttattagttgtaattttgctttttattagtagaacctgtaatttttgccgctcattatgtggctagatgggcgtttactcatcaggtatttgggtctatcccggtttcggttgtacctaacaatattttgtgtaacgaccgagaggtctaatttatttgaatctatgatatagacgcattttctcaaaaaaaaagtatcatttttgtcctcgaatgttaaacggggcgaggacggagatgacactcctgttcgacaaggatccgtttaatattttaattatttttattaacattttatattttttaatatatgtttgtatttttttttagtatattagtgtctttttataattttttaagtagtattttgtataataattagtatattaaaaaataaataatgtgtaatatatgccttctattttttaatgtgtaataatgtcattttagagacggatcgcatcttagttgttttaagctattcttagttcggtatctatgccttctatttttggtttatttgttcaagatt

SEQ ID NO: 325188 - DNA, 638 bp, Cannabis indica
agaattcagttatataggcacacactttatatagaatagatatataatatttcattaaggtgtcttcctcatttgacgttttctaatcaaattttctatatttttcatttgctagatatttttattttttaatgaaagggtgacgagttgaaacttctttattttactttataggataaattgtccttctccacagcaattgcgtcgtctatttctaaaaatatatacacataggaatttggattatttttttggggtggggtgacatctctattttcgtttgtttcaggaaaaaaaaaaaaagggggttaaaacaaagaattaggtgcttcaaaattgatcatgaaattcctcaaacaataaatgggcttaaaggccatattttatttagctcttgtgttgggataagttgaggaatattttttttatccattaataaaaatatcctcatattttatttcattaaaatttatccatttttgcttaatatatcattaccagcacaggatttacattaatttaaagagtataatagagacatcatctataaaaatgagtaatgaaagtaaaaattaaaacaaaataaagtggaatgcaatgggaaatttgattttctatacttaaaaaccttaaaattt

SEQ ID NO: 325189 - DNA, 1059 bp, Cannabis indica
gtaccgcatttattatttattattatttcttatttataagtcagaattttttataaatataattttaaaaaaataagttaaaaattgatatacggtgacactgtgactaagtaaaccttttgccaccttcctcacacttcaccatatcaaaactctaaatttatttaaaataattaaatatataattatgatatagtaacccatcatggtcgggatatattttccctgtccctcctggtgtgactatataggtcagcatttttttttttaaaaaataatatatgggtattaatttttagtacccttcatattattagtgacccacattacaggagactaatactaaaaatttagagtaattgtgtgtgtcactaaaagtcattcctaactctttagtgacccacaccacaaactaatgtcactaaatgactaaattgtagtagtgttttatcgcactgaggaaaggtttcgttcgtttgttttttactattatattttttaaaacaaaattaaatatatatattaactgataatgtttattaataataataaaattgcattaataataataattaatttatcgtttcttaactactaaaaaatatttaattttaggatatttggtcaactctgagtactccaaaatagggatgtacattggtcgatttggttaggttatagtatatttttattgacccaatataagtattgggttgcaaataattaaacgtaactcgcccaattaacaaattagaaaaagttcaactcgtccaatgatttcgtcggtttggtcaggttaacccgtccaaaccatttttcactttttttttcataattattattgttagtttctagtattcaaataattagattaaaaaaataaaaatatattatttatatttcaagctaaaaaatgttataatttatattaattttaaaaactttattataagatgccctaaatataactcagcaaacataaaataattaaataaaataataaaaaaattaataatatggtatagattttaaactttaacttcaatatctaaatacaat

SEQ ID NO: 325190 - DNA, 1158 bp, Cannabis indica
ttttttgccctctaaattttgatatgtaacaaattatgttttttaaatttttttgacttttaaaaattttccttaaattattgaaattatcaaatttaagaacttttatccaatttcattcaattttactaatttaatgattatttatgtactaaatcatactccttagactttaatatccaccaaatcatgccccttgaattttgatatgtctcaaatcatgtcccctgaactttcatccatattagacttttcttactaaaatcagacaaaagttcttatatctaacaatctcaatagtttataagagatttttaacaaccaaaaaaattttttttttttaataaaaactgaaaagtctctttaaaaaaaatctatatttgcaaattagatttgggagatgaaagtagaaaaaaaaatataggattaaacaatatggagaataaaaaaaaaatcatgtatggtatacaaattttgttaaatcaagtttttttataaaaaatttctttcatgctaaatatgaaaaaaaaatatagtttttttctttctatttcccacaaaaatttaaattcgaaaaacatctttaaaaaaaataaattatttgttaggcaagttcaaattaaatataatttggtaaatcatttccatactccattaaccaattattctaatctccattgtatactatgaataaattgatttataattttttaaaatagataatatagtacttaaattatgtgtgttaggtaatttattttatttaaagtttaaaatttatagtgtttaatttaaaatttagtttttataattactgatttaaattatatctcgatattgaaacttaccattatagaatttaagttatgatatatccgatttttgaaaaatcaaaaaaatcaactttaaaattagatcaaaaagcaaatgacaaaacggagactaaactcaactggagtcccaaatagcacaaaaaaaaggtcaaaatgtgaccactaccatgagaaagtatcagtggtcgcatacttttagggttctactcttgattttctcattcaactcttttgaagggacatttcacttcaaaaaccctagctcgaggaagagttccaacaagaccactactacaatctaagcctttagcttcccttttttcaa

SEQ ID NO: 325191 - DNA, 1044 bp, Cannabis indica
gactacttttttattactgaaaagtctttgccatcaaatagaccaagcaatatgaaaattttggtggacgggaggtggacaaaaagactgttatttggctcttcgggattgaaattcaatgtgtgccttttgataagggtacgcttaattttaagaaatttgagaatgtcaaccttgctcttattactaagcttgggtggaaacttgcagcaggggatgactcgttagggtgcaagttatttaaggctaaatattgggggcgggaagaacaatccttttggtccgttgggttgcccttaaacgcttctttcagaataagaggtattatggcaacaagagagttgattaggaacgagtcttgttttcttattgctaatgggagaaaggcgaatttgtggcattccccttgaatcccttggcttgattagagacaattcagagcagcctttaatcaattattgtgcctaattcgatcaaggtttcctctttgatgtgcgagggaggagagtggaactcttacttagcaaacagttggtttgttcctagtgtggtcagctcgttgagtttaatcaaaaggattccaagtctatggaggacctgctagtttggaaagatgccacaaatggatcttattcccctagggaggcttatcgttcaattattgaatttcgtggtagcagaactaatcggtattggattcaaatttggaagcttaagatcactgagaagttgaaattattcttgtggaaactttgtagagatttccttccatttggtattcggctccaaaggatttttgggaatccccttaactatattttgtaggggtgtgcagaaagtcatccaattcaattacaaccgaccgatctcatcccaacagatcttatagaatcgaatatccaatcataattagattagatcagttgtaaattttaaaaatccaatcggatcagatcggttgttggatgggacatccgatccaatagataaccgaaccaatccaactatcatccaatgatcattcaattatatttatatattttt

SEQ ID NO: 325192 - DNA, 1189 bp, Cannabis indica
tttgttaagttgttttagagttgtttaaattttattttattgttatacagtatttttatataattttaaaactttaaacacaatatttttataaaattagtgcaataaaaatgtaaaaaatcttgtagctttttttttaatttttttcttaattttattatatttttataagttgccctcatatataatcccgtatatatataatagtgacttttagctttattacctaatccaatatgtatatagacacagtagtagtagtagtgataccactaataaggcaacagtacagaccgttagatcagtttccaacggctcagattgaaaacaaaaagaagaatgtagttaacaagccaagccctatattattcataattaggcaacgagaaaacgtaaacaaaaagaaaagtagtgtttttattatttataattatttgatatagttatggcttggcttgcaagtttggtttctaactgctatttatagaataaaatgatatttacacaatccagtaacctaacccaactttgtgtgatattgactccaaatctaccatataattaattaattggcaattagtacccacacaaattaattgaactgttgagatttaaactcgtggaaaatgcctcttactaattggtctaaatcaaatcaactaatttgttgtaataatattattattctaacaagatttagtataaacatgattcattgctgattattttaatatctgataagtagtaagttagctatgtatatatggtgtaaataaagagtaaattttcccttcatcaataagtttttaataataacaaacactgaagaaagtaaatcttctttgatagatatgatctctaatttatcatgtaaataccttcttgaaataaattttgtaagatattggtaattaattaagaatctttgatatgcttaaatcaaaataaaaccttaattctataaggctgcgtttggaaagctacaatgtaattggatttgtgtgtaattggaggtaattaaacaatttgtcatgtttgtctgaccatgtaattacactgtaactgtgtaattgaaagtaattgaggggttccaattacactctccaattctcatggccccccatgagaattgaatgtaattacactgtgtaattactaaaaactttccatattaaacattagctactaa

SEQ ID NO: 325193 - DNA, 714 bp, Cannabis indica
aataagggtattatggtaattagacaaagcttaaccatggtcaaactattcgactttcacaatatatcccgctcttcggttaaggcagattagattacaaatttaacggttcctataaaattagtacaagtttttgaaagtgagaataaatcactttctctcatattacccctaatagagtagaaaatacaccaaacataataataatacattatattctcttatatttttcatagtccaataacgatatgacccttgtcattttataataactctgcaaatattcaatttcagacacatcctccttcaccaacttttcccacttagaaaaaaaaaaaaaaaactaaaattacattaagcaatgaccaatcccgtttattaaaaaaaatagattttagagatgtattttaaaaaaattattgtatgcagttatggatttaagatttttgatttgtgtggacttaattgttataaaaatatttatatttattttacataataattataattattttgtggggtttttttttactattttattgtataattatgtaattaaatagaagataattaatttttaaacactaattttttttattggaggctattgtatgatgtaatataaaattatgatctaaaatataaaaaagttaaattttgatgatgtattttaaaaagggctatttttaaaaatatgggaaaaattattaagat

SEQ ID NO: 325194 - DNA, 793 bp, Cannabis indica
tttttttttttttatgttttatatttgtactaaaatgtttacattttagttcttagagtgtggaagagaaaatgagaaaagaattctctgtattgaatcgatcaatgaatgtacagagtatgagctatctatacaagctcaagaataaagagttacaatcggtaacagttttgtaactaactagcacaacaatcaattaacgtaacaacccttaaaagtcttgaaatattatgtatgctttacaatccgattttgtccttaaaagtcttgaaatgatttagaaatacggccttagtcgatatgttagcaagttactcgttagaggatacatagtttttttttttttggaagaactcatatgagttcattgaagttaaaaattgggcatcacaatcggggatccctccctaatagaatggctaactaaataaccaccattagttctagccttcttggcaataaagtcaacagtagaattgtctagtctaggaatatagtaaaagtgacaaaaactaaaactataacaaacgttgagaaccgagagagccagaggtctgatttcccaaaccggtggacaacacctgatgctcagctggtggtgagggccttagaggatacatgagttgttttgatcaattttcttccacattttcacgaatcaagtagcagtcaatctcaatatgttttgttctcttgtgaaaaagcattgtctattgtatgatgggctcttttgttgtcacagtacatcattactggacccatgttgtaacgccctaatgctaaggcacgctac

SEQ ID NO: 325195 - DNA, 811 bp, Cannabis indica
ggcataaaacccaacagtctttatgatgttattgttggttatttcactgatatatttacctcatttagctctaattactatgatgttgtgaatggtattgggccgactgttactagactccaaaatgaagctcttttacagcaagttacatctgaggagatcagaaaagaattattccaaatgcatccttaaaatcaccggggcctgatgggatgacccctggttttatcaaaatattgggatgtggttggtatggatgttatttctcaagtggttgatttcttttattcttgttctctccctgctgatttgaatcaaaccaacattgttcttattcctaagaagaaacatgttagtactatgagtgacttaaggcctatttcgttgtgaaatgtgctatacaaagttatttcaaaagtgcttgggaatcggctcaaagtgatcttgccttgtgttatttctgagaatcaatctgctttcattcctgggctccttttttttgataatattatgattgcatttgaggttatgcattatctcaaacgcaagtgtaaaggaaagttgggttacatggccctcaagcttgacttaagcaaatcttatgatctcgttgaatgggattttttgaaagctatgatgctccagatgggctttcatcctcgtgggttgatcccatgatggcaacggtgatgcatgtggaatacaaggtagttcatggtgggtaggtgttaggttatatttagcctatgttcgggtctgaaaagtaagaatttctcgtttattggtgtcttttggagcagttttacgcttg

SEQ ID NO: 325196 - DNA, 1316 bp, Cannabis indica
tttgaaagtatttgtgtcaatcatgttttaaagtctttttttcttttgtaagtgttgtaaaaacctattttttttatatgagtttattatggtttgttgttgagttagtacaaataagggcttcttgattctttgatctttttgcttctttgtgtttttctgtgctaacgtttcttgaaggaattccatggatgtgttgtgaagtttcaaagcaagactgaaagctgaaagctgggggacataactgaagggagtttagtgaagactcgataagctggatcagaagggagttgagatgtagaaagtgttgaaggaatttaaaccattgaagcaagaggatcttgaactagaaattgtaaatctcaacttgatatagtggatgttacttaccttggttctcgggtaacccaagcactattcccttggaatttgtttttggtacaaaggaagcttgtaatttcgtgatgttcatttctgttttagatttcaagattaatcaaagaaagattataagtaaaattgatctaggtaaagataagtcaaatacatcactttcaagtgtgcttcatatcattttgagagatatgatccccatttatgattttaaaagttttcactaataatatatttgtgtttactttcaaaagaaatgtgtattattgcttttgaaaatgtattgtggttaggaatgtaaagtactaacggaacaataacaccaagaaagctcactccaaaccccattgctatgcccaatcggaaccaatattcatcatcttccctttctccatcttccttacttccatttgaatgcgttgtgtcatgatcttcaatacactttttgagcggtggtccacacaatttgttgcctacaaagctagaagcatccatgctttgaagttgtgtgcctattggaatttgtcctgacaagttgttgtatgacaagttcaagtgactcaagaatgataaacttgacaaacttgtaggaatgtgacccaacaaatgattctttgagagatcaagagattccaaccatgtcatattatcaatttttttggaatgctcccactcaaatagtttcttgacaaattcaacgattgtaatccttgaagacttgtaagttcttctgggatttcacctgataatttgttccttgagaggtctatgtcacacaataaagataagatggtcttgaattgtctttcccttcctttaataacaagatttgaattctcaatagccaattgattataaacaccgaagtaagaaaataagagcatgtttggtattgttttcaaaaaattgtttttaaaaattga

SEQ ID NO: 325197 - DNA, 862 bp, Cannabis indica
tacaggtatagtcaagagtaatccatatacttcaaaagtcatatccctataattgggactaattaatttcaactacttacatcaccgcctgattttgtgtatatattattattttcaaatctcaaacaccatatgttcaatcatagtcattatttatgtcatgatggatacatttcaatggttttttttttccttaagaagtttgtgaaattccgtgttaaattgtaaaaacgaagggttgaaaagaaaaccaacgaaacaaaaattttctttatgggaactacaccttaatctaggggctagtatatagtacatcactaatgtatatcaatatcagtatttcttttccttataattaatatataatgataaaattttgattttcttatttttgagagatttttataaaataaaaaataatttgtggtataaatacttaagtttaattttcagttacaaataaatatcgaagaaattgcattgtatacccactttatttattttgatttttacttccatttctatattttttttaaaatatatctacttttatataatgtccctattatacccattagattaatgtaaatcatgtgctacacttaaagtagaggacaagggtaattagggatgacaattgtacctacgggtacccgctcctaattagggggtgttcatccgatccaatccgtacttttttggtcaaacaatatccaatccgcactaagtgcggatttcatattttggatccaatccgatccgcatataagagtttaaatccaatcccatccaattcgcaatagtgcggattggatcagttattttggctcggttatttttttaataataaattatttaatat

SEQ ID NO: 325198 - DNA, 536 bp, Cannabis indica
ggaaggacacaattgagaagaaaagagaattcaaagtttatttattaattaagagaccttgaaaggtctaattaataaatatatttaaatagtaattttatttgataattaattataattattaaatagatagaattagtatttaaataactagagtagaaaaatgacattactgaagaaagacaagtttgtttcattaaggaagcaaaacaatgatataattctaactcatgggctctcttaaagggttcgacattaaagtccactttaagccattggatctttcatctcggcccatttagctctaaccctaaacctaatgagtccctataaatagaatattaagagttttgattcagatgatgactctagactctctcttgtctattaaatcaaatgaaaaagttggttaacctattattttccattcatatttttcaaaattctttgagttttcttcaccaaaattttgtggtccttggtttgagaatatgcccactcatgtcaaagaaatacctagcatagtgaggaagact

SEQ ID NO: 325199 - DNA, 744 bp, Cannabis indica
taataataataataattgatgtatggaataatagtattgtttcttcttttcttttttggtagtgtggccatatgattctaaaccatcctctatttatagataattctttcatttttttcatgaatattttaatgagtagcatatttggctcgttttacacattgctagtgataaaagtaggcagtagtacaataataattaatgttacattatgtttagttttagctatattaagttagttaaataaaccatcttaattgcattataattatatgtgtaaatcaataaattatctaaaaaatgaatacttactacagaaaaaaaaaaaatctaattttaagtataacaaaattagtgactaactatatataattattcaaacgttgtaactaaaatgttcttgattaaatttattagtcacaaaaattaaaatttattgtgactaaatttatttttaattataatacttgtacctaaaattaaattagttttttacaaattaaattaatgaatatagtgataattaatgtaaccctttatttcgagcatatcataacattagtacattaattaatatatactaagggatataattttgtcccgtgattatacttttacggaatgcattttgtgatgtacggcagccgtcagatgagagagttatttgatctgacggctgagattgatctaggagtaattagggttaaaaaataaaaatgtactctgacactcatttaatgtacc

SEQ ID NO: 325200 - DNA, 1403 bp, Cannabis indica
ttcctcccaaccaaatgcctcctcaaaattatcagaccactaaatataaaatttaatagtcgataaaaatgggatggccagaggataacattaaggaagacaaaaggtaaataaataaaaaaaaaaaggggagtccaaatacataacgtttaaaaatttataaattttaatataaaattactatattttttttctctgtaaaatttaggtaggggctgtatcaagatgaaagtacgcctgtaattatcattcaagtggatgcctatatacaccagcaacgaaccttttatagaaaaaaaaaatatatatgaaagtatggtgtaattatgtaactatatatgtatttattttggaatgtatacttgtattgttttctataacaaatacaaagaatatccaataatctaaacgacaaagggcattttggcttcacgtgccttggataacgagttgtggattgcactactagctagcttcttctcccaattgtgtacttaggtgcaaatggtcaataattacgtacagagccacctatattaattaactaaaaatagttgaagattatataattacacacatacggatggtataataataagatccgccttttgattttagacttttatattttattattgcttaatttgtatttttgcttcctgaattttaaaatttatcaaatatgtcctttaaatttttaaaatcctaaaaaatactcactgaactattgaaataattggatttaaagactattttctaattttaataaaaaaatctaacataaatagaagtttagaggccataatttagtacatgtaagagttcgaggagcatgatatggtagatatcaaagtctggagatcatattttagtatataaacaatcactgaaatagtaaaattgaatgaaataaattgaatgaaattagacaaaagtccttaaatttaataatcttaatagtttagaggatatttttaacgatcttaaaggttcagaaaacataatttgatacatgccaaagttcagaggacaaaaatctcaattagtctttatcatttatagagtactctcactcaaaaatccaatgtagagccacctttactgacttcctcttaattttttttaattaaaattgtatattaaatgagaaacgctacaaaaatattatatattttttaatttaatatttattaaaaaaatatctagaccacataaggtaggtggtacaactaatgtattttaacaatgcacgagccttaaaaaccaatttaaccaaagccattatataatcttcgatatcatatatcaccaaaaccatccaacatcatcaacgtaactctctctcatatgcatatatataattgccaataatattattagaggttgttaggtttttactgttt

SEQ ID NO: 325201 - DNA, 2172 bp, Cannabis indica
atgattttaagcttgcaatgttggctagacaaggatggcggttgttatgctctccttcctctcttgcaagccgtctatataaggccaagtactacccccaaattgattttcttaatgtagagctaggcaacaatcatagctttttttggcgaagtatctggagtgctcaaaggcttgttaaactcggtgctaggagaacaattggaacaggggaatcaaacagcattttgaaacatccttggcttcctgatcccacgaacccatatgtcacttctcctgagatcggtcatgctaatcaaatggtaagttccatcctagagatttattctaaagcctgggatactcctctagtcaatgatatgtttaataaacaagatgctctgctgattataggtattcctttgagttcttctacagccgaagactattggtcttggactggggaaagatctggtgagttttgagttagaagtgcttatgacatgcttcagaaccaaaaactagagcagaatggtacaaacaattcagggttatggcataagttatgggaccttaaatacctcctaaggtgaagaactgtatgtggagagtcgtgacaaacaccctgcccacttgccttcaacttacaactaaacacatcgacatatctcccatttgccctgtttgccatctctgtgcagaaactgtcactcacattttgttcaactgcattcttgcaaccggttgtctggacaaagctaagttgttttttttcgtttgatgaattagcaattatttgtcattggcttgactatttgttcaacaattatgatgatgatgtttcttgtcgtgctatcatggtttgttgggctttatggaaagtgcggaatacactggtttggaacagcaaagcttcttctataacgcaggttctcgtatcagcatggattacacttgaccattggcgtaaagctcaagataagaatagtttattatcattgtctctccaacaaaatgataataaaattgagcaatggactaaacacgatttaaatacagtcaagatcaatgttgatgcatggagccttttttgagaaagaaaatatttacggttttggtgtggttgctcgtgattcatctgggcatcttgttggtctcacatccaaataccaagtcggttcctatgcggctgaggtgatcgaagcacttagtgttaaagaggctcttagttggctaaaaggcaaaggatggagtaaagtcaaggtggagactgatagtatggtttgagtacaagcaatctttagtaagcaacaaatgacttctatttttgggttgattattgatgattataaatttttattatcatctctacaaaatgttagtcttcgttttattagacgatcagctaatcgagtcgctcactttgtggttaggtggtcttgatttttcttttattgtagtattcacgggaatattgtccctgataatctttaaatactcttgtatgatgaatgttaaatttcaataaaattgataaatttatgttaaaaaaaaaatgaacggttaaaaagatacaataaaaatacactactcatggttccgactatatcaaagaaaacactagcaaattaggagacatatgccagcccattgaaaaaagaatctacagactatctcgcatatttaaagctttcatattctttattattatttttttaaactgatattctttattattattattattattattattattattattattattattatttttgaagctgatattctttattatttggccgttattaattttattctatgaatgcgaaacaaagaatattggtcgcgtaattattctgaataactttcactatttaaataataataaaaaaaatacgaatttctttccaaaaagaaattaataccaattgatatgagcctgctcagtgctcacgtaatacaaattcgttgatgaatttaacatgtgaacaaattccattctccaataataattaattttttggtgctcttacgggggacaatcatccaaaaatatgttttatattaagtattatattatgagttcggaaggaaataaatgaataaaaataaatagtatttaatttagagagatttgaataataaatttaaattaaatttttatgtccagtaaaaacatattggaaa

SEQ ID NO: 325202 - DNA, 867 bp, Cannabis indica
atacttgtgagtagatctaagttcctgataaaatatatttccaacaaggtaccctttcaatttctcactcatccaatcgcctgatgcctcttgggacgtacagaagcatcttcttcttatgaaaggtgccccttcaaggcatcccataaataccttcaacaaccattccattttttcactattcttccccgccaagccaaaactcttgagttttaagtcttctcctgttgtgtgagacttcatcaccattacagttagacacagtgtccttcatcgtggatgttgcaccaaaactgtcaacccccacattctcttgcaattggtaagttttctttttggttgattcattgtagaattttgaggggattgtgaggatgccttggcttctagaacactggttccacgcccatcgtcgaaggttctgggatcatgccacgcactgacctgttttgttattgtatcgacctctggcaggtacagtaagtctgccatggaaggagcgggtccttctgaagctgcgagcggcagttcagccaggaaaaggtagaagcttgtggtatctgcccccgggatgggagcctttccccaatgtcgcgatcctcaattgaggttgggccagccccgatcttcttaccccttggccctatcaagggtcccttcaatggggttcactttccccatgaaagtgactcctttcaaacctctcaatatgcagaaggagagggaggcgaatagggccttgaagagacgcttggaggtcgaaaggctacaagtttgcaggatttaaacctctcaatatggcggttgtgctgtcaactgttgggttttgtgccctaaataaaacccatttcaatataatcagactta

SEQ ID NO: 325203 - DNA, 624 bp, Cannabis indica
ataataatgtgtaaatatttcttgagattgttgatcgtactatatttccattcaattatatgcccttttaatagtaagcatatttttgaagatagtatcaacaattgaattatttttattaaatcttgaagaattcaaatatatatataaatacactctggagttctcttgttacgcggctggaaaattaaaacgccaaattacacttaaaaataaatttataaagcaatttagagtaattttaaagtgctacatcattgttttttatacatattaataattaataattacctttgcaataatatcatccttcatgactaaacattggttgaacactcaaaaaagtatgtgtcatataccacattaaaaagcatattaatatttatctcaaaacaacttaattaataggatatatatagtcctcctcttctaactgcatgatgcaaaggaatttcaacatgacgacctaaaaatggttgagaaattagattaggaaaaccaaaaaattacacaaaaaattgaataccgacagttataaggcaacggaaaattagaaagagtaaataataatgtagcttaggataaaataaggccctttttcatttttacactttaaaacagttt

SEQ ID NO: 325204 - DNA, 1596 bp, Cannabis indica
accacatatagttttacataaaaatattacataaaatacaattcaatacaatacaatacaatacaatacgacctaatacggcgttccaaacgagcccctaaggttcaaaagtggcccaacaactccagccgaaacttatcagtttggtagtatgggctttgcagatgtgctacaatctaaaaaactgaatgagaaattataatgactcaaaattattgaaatatctttattttaaaacttgttcagaaatgattcgcacactatttattatttaaattattttttttcaaacaattctttttatgtttttttacgtttttaatgttcaatcaatttagccaaaaagttggcttgatgacacgaatattgtttttaacacgtggcacgagggaaaaactatgggccttgcatcctaggataggtcagtgttgtttgcacattgggggcacccaaataagcaccaaaatctagcgaggatgtcacaatgaccacaaaatgataaaccacgaagctgaggatgtcacttggacatcctgcaactcaacctaagcccaatacaagtacttgggcaccaaggttgacagggcgtgcgctgtcttgtatcagtttcggttctcaacaatttcctattgcaatctgcttagccattgctctaggataatgagagatatgctcaagccaagtttttgaccttagaggtaagtttggacaaaaccttacctagagacaccaagtgcacattaggcacacatgttgacatatagtcaacttgggctacatgacgactagggtttaggtttgcaggaacttctttggatcacaattcctcaaatccaacaaggaacaacgccatgacatgatttttcatcaaagacgtcccgaataagcccatatcaatctatgggcacccatgttgacattgcaacttgggcatcgatttttcttaccaagtaacgccagtgtgattagacaaaactaaaattcggtgagcgcttttcatcaaaaagaagattggacatcaacgagacaattttcggagaccttttcccccacctgggcgcctaatgcagactctcaggccactatgggcgcccaagttgatgtatctcgaccaagggcactttgttacacctaatttcgaagaagtcttctgagcatttttcttatttttgtcaacaatgaagatacaagtgctttcttgaagcaaacaaagccatttgaggcccaaatgaaaagctgggcgcctatcacaccaagagcaggtgccctgggtgccctggtacgcagtccatgtgacttgtggttgtcaatctgattgtgattccgtcttaagaattattccttttttttctcccaaaacgagatatgagacttggaatcaaaagaaaaaatcattttagtggtggttcagcccctaggcaccaccatgcatgtaataccctagagttatgaaatggattagcaaaatcctaattagataattatgaataagtgaggaattatattattatatggttcaatatatgtgaattgaattgatttataatatgctaagaccccgttggtgagctaggggcattttagtaattatgaccc

SEQ ID NO: 325205 - DNA, 1774 bp, Cannabis indica
ttttttagttaaaattaattattagttagaattcatattaggaaaaataaaaagctactgatatttttattttttgatttggagttatttattttgatcattccaatactgatagtatttgttggtaaaacaatagtactataaaataaagttataccaatgtaacatgtaaaatatatataaaaaaaaataattacattgagatagtataggttcaaattatcaaaaaaatatatgtatttttgattgatagggtgaatataattaaggggaagccgtctatatacaaagtatatatatatatatatatatatatatattagttatgcacatttttctttttgtactataattcttacattcttaatcataatatacacatcatgtataatattattagaattaataattatttgaacaaatggtaaatttattcatggacatatattatatatatttataatcataataatagaatgaaaaaaattatgtattaaataaaatttttgagaattaggatgccaattgatgccattaggaagtaatgatattaggcaacttttatttcatgcaaagttataaagtttgagtggtatttctaattatattttagagttgagagttatgaccgagcatatattaatatcctttataaacaaaatttgtaaataatttatatataaatctacacgtatttatacaataaatttctcataaattactttataatggatatacacatgttacacataataaaattgtacatagtcttgcataatttattaatggtaattcacaatattttttttttaaaaaaaaacatgataactcacaatattattttgtgttgaattgcttaatgataagccaccaataattaagaggcgtttaaaatcgttatcttctcaattgattaaatcttaaaatccaatatagcactccataactataattattgaaaaaaaaaaaaaaagaatagataagaatagctactggagaaaattttgaaatacatattgttatgtttttcaaaataatttatatatatatatctatttctattctatataaagtgtgcttatataactgaattcttggtttatgagaaattcatggtgactttttatttttatttaataaaataataaaatagtatttatatataataaaataataataaaacaaataccattaatatttgaactaatattttctttttataaaacacgagggcaaaaataaagttaaacaaccgatttgatacggagggtaacaaaaacacgaatgcactacaacgtggaatgccacaaatatcattaatttttgccaaaaccacgagtggagagggagacaaaggtatcaatctcgaaatcctggttggtagctaagaacctcctataatattttctagatagatagctctgtgaaatgtgtttcattaaccatcttaaaaaaaagaaaaaaatcttatgcagaataaaaaaaaacaattgaaatttgaaagaaacatatagaaaaggtgagaagagggaaactgaaaaaagctttgataatttggattgagggctttaaagaacaaaataattgaaggaaacatatagaaaaagagaatagagaggaagagaggtgtggtctccggttgatgacagctttttcaaggaatttgcctttcctatttttcacaaaactttgtatatatatctatttgcatattttcttttagaattgattataaataaccattggaattaattttcatatatccattagcata

SEQ ID NO: 325206 - DNA, 907 bp, Cannabis indica
tctcacttccattctgatataggtcaattccatttcaataggcgggtatttttacaccctttagcttccctttttataaaagttgtgaaaaaaacaacctttaaaaggttgttttgtataactgcacgctcagctctttatgtgtttcttggttatggggaagggaaaaagggctatcattgttttgattgagttttcaaaaattgtatgtatctcgtcatgttgttttgagcatatagcgttcttcactattacttgcactcctcataatttgacaagattagatcttattcacgttgatcattctcaaagtttgagtctgaatcatccactactcttacagttcattttcctcttcattactctcgcatgcatcatgttaaaagatctcaagaattagatactaatactttgcaacctaaaatttctcgtccattagatacttgtacttcgcaacctaaaatcgctccccccccctcctacagttgttcaagatcctcctgagattgtagaccctccttctcgctatccttagcacattcgtaagtctactcgcgaaccaaattttacatactcttcttattttgcttcttttacttttttagcatctattcattgtctttttgagcttctgtgctataaagtattgaccctctttggcaacgtgctatgaattaggaactctttcctttgcaaaagactcatacttgggatttggtacttttacctcctggtaaacattctattggctctcattgggtgtataaaataaagaccaagtctcataggtctatttaacaatacaaggctcaattagtggctaagagtttttaataacaatatggtatggactttgaggagactttttctcctgttgcaaaaatgactgttgtttgtactcttatcg

SEQ ID NO: 325207 - DNA, 803 bp, Cannabis indica
ggattgtggagaagaatgtacctgtgtggagtcattggagtgaaatgctagaaaatcttcttcatcaaaaaccacatttttggctatatatactttgccatctttgttctcacacaaatagcccttatgatttatagagtagccaactagcatgcacttttaagatcttaagggcagtttgtgattattatatggccttaggtgtggataacaagcacaaccaaaaggctaaggcatagtgtaataaaataggcattcaaatggggacatgtcaccaagaactctagtaggcattctgttaatgagataaacagcatgctgaaatgcaagccaccaatagtgtaatggtaagcctgcatgtgccagcaatgtaagatcagtgtgagattatgtagaagaagaaacaagtgtgagatcatgaatcaaattttttcataatgcattatttttatattttaatcatataaagttgatgccatcattgtagttcctattgatatcctcatatttttaaacttaacactcaatttatcgttctgttagttaatcaataaagtgccacatataaatatagtattggccaaactaataattctcttaagaaaaataattttaaaaacaaaattaattaaaataaatccatattattaaaaaaaacattatatacgcattaaatgaaataaaaattaatttttccatcttcttccactcatattatctttacagattaacaacaaactttttttttttgtaaggagattaacaataaactttgattcttgattcaaatgctattttttcaa

SEQ ID NO: 325208 - DNA, 1305 bp, Cannabis indica
gaaaccatatgatgtgtggtcaaaagttgctgcatcaattgagattttgagtacactctcaataggcttaacccaagaaattgccattaataacctgccaccaaagaaccaaaagaagaaaaaaaatagagcactactgaaacttgaaaacaggggctagcaaatcactaaaaaccaatacgaactttgcatgtcaaaagacaagacaccgtgacttacaatttatacttttactgaattttactcttaattgaagatcaaagcaacacaaacagactaataaaccaaaatcaaatctgaagcaaacccatatccagaccctttttcttcaacatcaaatttcatagatagcaccagaagaaggagagaactccacagaaaatcgaagacaaatactaatctcagtaccctaatgaatcagttctaacacacctaaaaaccctagaatctctgcatcttcaaatatgaggtttgacgacgttcatgacgctcttaatcagaatttgggcagtgagtgaagtaagtatatatagtacctgaagtaattgtgttaagcagccaatgattgaaatggaattcctactctcctccgctctccgatcagaatgaggttgatgatatttctagggtttacagagagaatgtgcgctcgcaccgcttataattaaacatcagattcaattgcaatgtttataggattacgacttttcttgagcagctggtgggccccaaaaggaataaaaatttgaaaccccaaaccctaaagagagagaatcgcagtcataatgctacttttgttattgttggttctatgattagtctagatatttattactactacaaaataggtcattcccgtcgatctacaaagaccgttgttaaatttcagtgggtatttttttcgtttctttttaaccgaagcacgaaaattgaaggaagaagttatcccgtcgattcacaattgtcatttaaaccatctatatatataaaggatgagtatgaggcagtgttgtggcggtctaaaatccctccaaaactatttatttttctccttaattctcccaatttttaatattttattaaagcataaacttacaaattaatattttactattattttaataaattttctataaaaatatttatcttaaattaattatttttttaaaaaaatacataataataaattaaataattattcaattatttatatacatgtattcataactatatatatgtgtaaagtttttttatacttagcagaatataagaaaaatattttttatagaaaaatttattatgaat

SEQ ID NO: 325209 - DNA, 759 bp, Cannabis indica
ttgtggaagactgtaaagaaactgaagattgatagcagtgttcttgttctagtaaggatccaagtttaatgatttgtgacattcttcgacagaaagaagtaagaattagatcacaaaatagaaggagacatattcctatatgacctttgtaagtattctatacttaatatatgaaattaatatttatacaaattgatctctataagcatgttttcccaacagtttcaatctaatagttccaattccaatcattttacaagacttgttatcaccaagatcaacagttccatattccctaagtttgaactcctcgaaccaagacctgattggtgtcatatgaaatgaacacccagaattcaagatccattcaaaatctaaattttcagaggtaacaactaagaattcttgtattagtgtcgtagataacggtggctgccctacaattaacggaagttcaatgatgccttggctgacgacactattaccagtgaatccacataagctcaccatgcaaggttttaactttgcatcttctaatcctatttttattagtgtatccttataaaggatatttactgagcttccattatcaactaacactctatttatcctcttgttagcgagctgaactgtcatgacgagtggatcgtgtatcctcatttgagaatataattggaggttcatatgtccttacttttttcagtggtttttgagcaaacatcgattgctcgttctttatttcattgacatatcttttct

SEQ ID NO: 325210 - DNA, 1112 bp, Cannabis indica
  modified_base (203)..(203): a, c, t, g, unknown or other
cgctacaatgtgggtccgcctatgctagtatgaaacttttatacaatgcaaaaaatagtgatcattattttgatgaaaaagaaaatagaaatatatgtataaagcaaatcctctacaaatcactagtgacctcctttaattaactaagtaaaatatataagaaagaaaatacatgtcattgccaatatatattagaaaaaaanaaaaaaaaaaaaaacctttttattaaataaagcttatacataggcaacttgggttgaactcagaccaaccaatgggatcaaacttcaccaaatctctacttgtcaatttttgattatttatttgtttatgaaaagatctcattttgattagctcaactatattacaaacttcctattttattaaagttaaatcaaaatattttcttgcttgccaacttttttttttttttttttttcaccaaagtgataagaatttatgatatagatataatagtaattaaggtaagtatttttaagaaaatttagacaataaaattataatgctaccaaacattatccttaactcattaaaattttctctttatttatattcgctacaaaagataaatttacagaaacttttactcgtaaacttataaatatttaaaattattttgatcaaaattgaatttagatattatttacgaaaaaaataagacaatatttttgcctcatttgttttcttttcgataataatgacttatcaaatgctaattaattattagctaaattctaatttgggccatctatattaaaaaatcggaaaagaaccctctaataattaaaatattaaaaaatgattctttttttttatagttctacacaagattcaaattgaatttagctaaaatagggagggccttttgttagaatttgaggataagatgaatgaggttccatccccaaactaattggcaatggttatcttggacaactcgatcataagcgaccctttttggctcactatccctgcacaagtggctctttttgctctacttttcggatcggtatttttagatttttggtggcctcttttttttcggctctactgcaatcggtttattttttggggttgaatagtcgctagag

SEQ ID NO: 325211 - DNA, 609 bp, Cannabis indica
tatatatatatagatagatatacctttggtttgcatcaaacaaaagatagagatgtcttcagccatagctacctgaaatatactccaaaaaaatattaagaataagatcatcaaatcatgtagtaaatccaagcaatctcaactccatcaacataataaaagtaccaaaaattgtttaaaaattattcctagcaaacatatatatacaatgtatagatatttttggaattttaaaaaatttgcagcttttattccgacacaaaattaatacaatagtacaaaatgtggtcaaagagtaaaaaagacaagtcctttagtgattagggttttctttctttgaacaacaaatcactcttacccagaaagaattaaaacaaccttgattttaaaaccaaacccacaaactttcttgccaaacacaccaaatcccaactaagattaacccacaaaaactcaaactttctcgattttaaaagaagaatacaaacacatgcacacaaatactatatataaaataacctatacaaaactaaactgacttatgcagatatcatttcttcgtacaatcaaaatagatatatacatatatatatatatattaaagatata

SEQ ID NO: 325212 - DNA, 748 bp, Cannabis indica
tatatgtcaaagttcaggggaaaaaaattaataattaacctttttattattaacaaaaattatttaaagcataaaaatatgttgaagcaaaaatactatgttacataaaaatatgatatataatctaatttaatgtaatacaatataatatgatctaatacggtgttccaaataaatcgttagaatcttagtaaataattttttttagcaatgaatattattttagtttctaataattgagtgtacgtatccatatcgacaaagaattaatcctatttacgaaatgacatcctaaaaaataagtggaaaaataaatgtggagctagctagagcacatattaaagataatattttttttgtatgaaaaagaaagaaagataatatttttatttatgcattattatctttttaaattatgtattattacttgaataattcacataagttaataattttaagcggcaaaacgtgtttcttatggtaatggttgttggactttttttaaaaaaaataatatttcatacatatttaaaaatgacgaaaagtttattatgttttgtattttattttttatgagttattttttttagtaatttagggtgaaatctgcttatgttttaattttagaataattacataagacactattttttgtaaaatatttacatttttacgttcaaaaaatgttttttttacatttttacggtttttcaaaaaataacacgaaaacaacataaaatcaacaaga

SEQ ID NO: 325213 - DNA, 1122 bp, Cannabis indica
gtgtcacggtcggtgtcattcaacgacaaaaaacattacaacaattttgttcatttgcggcaaaattattaacgggagatttccgccgctaataactattattagcggtggaattggggtttattagcgactgagtggtctgccgctaattaaggtaattgttgtagtgaaatatattaacatgatttttatagagtgctgcaacacttccttatattgtcgcgacacttgaagcccaattttggacattgaggatttaagggttccaatgcctcaacattggatcccaatgttgaggccctcctctaaaccatgctaaacacgaacttactatcaaattttagcattttagtgccctgatgttgatttctaatgttgaggtgctacttcacgctttccaattatttagtagctacaatcacaccagatcttttgaatttctttattggattattttcttggtgttttagcaagaaaacttcattaaattaatccattttgcacattattttctcaaatttgctctattattctccaatattaaacctaaaaaatattaacaatcaaaagcgtaaaattacaaaaaatacaattaaaaactaattaaaataccttaaaaacttacttaaaaatcgtactaattaagtcctaacaacagttatcaacatgtccagaatccaaattacatgtttgtttgttgtggaacatagtcacctcaaacatgtcgctcaatcctcatttacaatttgaatccttacaagttacgtaaaatacatcggtgccagactttcttatgaccatgaactcaaaattcattttcaatgcaaaccttcccactatatttttcaattcaatcttgtttctgtacaacttgccaacgtgtatttctcctgaaggtgtaccactaagagaagttgtataaatattattttcctatatgtcttcccttgtccacacaagaggtttgaatttcgtacgaactttaaaatctgatggtacagtactacaaggaggacttgaccgtctggtactagtgcttggtgtttggtgattttcactacgagtaaagtcttctttcatgctatgtactctggttccttggaggtagttctaaccttcaaa

SEQ ID NO: 325214 - DNA, 821 bp, Cannabis indica
cgtcacgtaccggccttctcctttgtgaacgtgttgatacatgcctctgttgggattttgacgtgccccttccatcagttcgagaaggacattgacgatgtctcggtggcaacccacctatcctaggttgagtcccaggatctctctcattaccacgagagatttcctattccctagtctggggtttccttctactcgcattcctgtgagaggactctggtaaatcacagtttccattcccctaggttgtaaatccctggggtctgcgtggcacttcttaacgaggtgcctggtcatctggttggtcatcttcaggtgcatctccagtttccccaggttactcctcctgagtgttttagggttgctcttgagccgtctcctgcctcctggttcgtgagccgcgaggtctgcctcatggtctcctcactccaggatcaggatggttctgtgtgttgttttcctgtgccaccctggctgtggctgcctcccattctaactcaatgttttgttggttttgcctcctccaaacatctttggagttgatgattttctaattcgaccaacagtacatatctggtggggtcataggccccctcactcacaagagaaccaccagcatttgtcttgggtttttcattcctagtatttgggtttttggtcaccatcacgttggcttcttctcgaacgtgttaaccgtgcagatcgtgtcgttcatgaattggggggcctccgtgagcccgctggcttttttctagggcgatgagtagtctcttcaggatgagagttgttgttttcccaattatcagccatggagaaaaaaa

SEQ ID NO: 325215 - DNA, 1128 bp, Cannabis indica
aaacttttttagcctctaaactaagtggctccaggcaccgacttagcccgtttatgcctagaaatggcataaaaatggattcttttatattccactatctagttcatataatatcctattttcttctagtttggcttcacatgttaagtcaaaatggcaagaaatataacaattagattaaggttctggatttgggtttatatatgaaactttcaaacaattttgtcattggttaggggttaaaagcaaaattaattagtataagttaattagcatctatacatgggttgattattatcaacaaattactatattaacttgatatatgtatatacttattcatcatattcatagccataaaaaaatataaaaaatctagtacatacagacgtaaaatttataagcacactacctttttgtttttcctcttttcatttttttggtagttacattattaataagaattaataacaatataactaattataattagtattaagtaattaagtttgtataagagaagcatataagagaatattccaagtgtcgggtactccggcgagacaccaatgactgcagtccatgtcacggtggccgccgtggccgtagaaggaggggtgaccgtcctttcttagctgtgacagggctgtgacgttaagcaaagtgacaggcattgaaatggagcgaaccactctctcaactaccaattctgctgggtgtgggcctggtttgtagctcaacccacttagtgcttttgcttgtccactacagctcctcccactcatgtctccccattccgttgcactgttttacgtacattaaaaagctcaaacatacaattacatgcattatatacaaacaaaagcattttcatttttgttttaaatagaaggggaaagaaaaaattagaatatataatacccactttgaattatactaataattataatatgctagtacaaaaaattttacttttagtcacaacaaaacttgtgacttaaagtgaaaaaattgtgactaattataaatcatgattcttatgttgtgactaaaaggtccctggataaaagtattagtcacaaaaattacaatttgttgtgattaaatgtatttttagtcacaatactt

SEQ ID NO: 325216 - DNA, 590 bp, Cannabis indica
gtcatgtgtgtatagattattacatataatctattattatatgaataaaaacacaaaaaaacaaaataacttaaccaaaaccaaaaaaggtcactcatctttatatatatgttatagatagatataaattatagatatattgtaaggacaaatcctttaactaataaaatataacactattcatcacaaatgttgtccgatggtaaatacattttgtaattggcttcggtgaatgccttcagttttgatttgtatataatgtgaaacgaataatttcaagtggggtatctcttgagtggcaatattaatttcgttcttttcacaatcacaaataaaagcaaagattagtgtatggcaaatgacattcgcaactttttcctaaagccgcattagtatctgcattagagattcttgaatttctagccatgaaattcttaagttgctttattgagtggaatttgttttgttttcaattatatatttataaatatataggtacacttttaatagatattatttatgaatgaataatattaaaaaaaaaattaaatttttatgattaatttatctatttaattagaaaaaatttc

SEQ ID NO: 325217 - DNA, 1304 bp, Cannabis indica
gtaggaatattccagagttgataatatggttacagtaacgtgtttacagagaatacctcttcggttctgaggttaaaagctgaaggaaatgagaagaactcaagggtcagaattgaattcctcgccttgtgtgccttcaggtgtatttataggccgatccctttgcatgggccatcttcggtggatcttcacaagggtgaaccctcaccgttggattggtaggtggcatattttccacttggcctttaccgatgttagattgtactggctatactggcagtgctttggacgcgtgtcactctagggccattctcatttggattaccttggtccctagttattggatcgtattgcacaatacataaggacacgcatgctttgcatggtagtgtggcgtgggggacaacttctgacatcgtaccaaaaatagctctagcattgggtctgtagcctatcactcttaggcagagcctccgtgggttaaaggtgtatcccaggccaacattccttagtcaaagatccatgttccttgtgggagcgtaggttcccgacttctagagtcgagtgagtctctagctcatgggcatcttccatggggctcgcatttggtaagacatcccatgcagaaatctgttcagcgatattagggctcttactttcccagaccacggaatgaggcactggggcagccttaacgatttcttgactttttcttgattaatttgcacatgttatggtggccaaaatgtggataacatttacctcccaatcttccaggacatgccatgtaaagacctcttaactttaatttggaaattaacagataattagggtttaattatgaaacttgcatattagttatgaattatcttttcatggagatttatttgaattcaaaatgcattttatatgtcatatatagaattttatatttttgcatgttttgtgcccgacaatattggaacgtagcgtttggctattagaatcacatcttagtatttttagtatagcggggcaatatagttagacattgagaatgtcgggaatagtcaggatttcagaattgaccaaaatacccctaagtgattttatgaccttttagttatgggaagggaaaaatggtcatttttcttaaatgactttttgtcttttagtggtttgtagttaagtttaatattttgtatttattttacattaggttgatattacttaaaataaacctttttattttattcattttacaaaaattagaaaattcttgaaaaagaaaaaaaactctctctctttcaaactctctctctctc

SEQ ID NO: 325218 - DNA, 765 bp, Cannabis indica
aaacaagataaaaaaaataatatataaataacaaaaattaataacaaaataacaagaacacaacataaaaatacattagattgtattttatataaataaaatataaaaaactgtaaattgttaaaaaattctgtacatactatattttgtaattttaaattttttttgcaattattcttattattattagcattgttatttgatatattttatgttttgtttggtacaccatattaaatagtattgtatgatataatattatattaaattgtgtttcatatcatatatattttttatataattctgtaataattttttatttatatataaaaatattgtatatttatatgctcatacaaattaatattaaacataatactatataaaaaataggatatatataatatacaattctataatacagtgtaccaaacagactttttaagtgttcaacttcacgttgatgtagcacttttataattaggtagaaatttattaaattaaaatatttaaaatttgatattaaaatacactattaataacacaatttattttaatggtgtttggcatttttttttgttggggtgttactatatttgactctctctacttttaattaaatcactattattaatattaaatatcttattttattaataagttaataacttaaatatctttatcaaatattaagaaataatatttttttaattatataaacttctaaaaaaaatatttaatactatatacatatcatatcatggt

SEQ ID NO: 325219 - DNA, 1059 bp, Cannabis indica
tacatattatattgcaaacccatttttaatgttttccacaaagtttgccacaaaagaaaggataattaattaaaattgtctttggacaatataaagtcaaatgtttgaagaatcttttcttcagataagaaaatcaaagtagcagttgtaaatgagatcaacttataaaacaacgcaaagctacatgcgaagctaaatattcaacgactcgcaatattcaggtatgtattataaatgaggcacaaaaattcctttaaaaaataatacttaacctaaaatatgaatataatgcctaactattcatatgtgcaataaaaaaaatatacaaaataattcctaaagtgaattattcgaagtatttttaagtttgctctaaattctttttcatataatatctggtagattgtaaactactcgtgtatagtaaggcagactataactgctcgcgaatcgaaaaacatacgcagaatataactgctcacaaacatacatagtagattaataactacttaaatgtatcaaaggaaaagcgagaacaatggaaatgcttcctagatatatcttaacttggatcaaaatataaatatttagattgtgaattaaaatacaaataaacaaacatattaagtttaaacataagatacgagatatttaaagtaaaggtaaatacataaagagcaaagttggccatccaacaatgcaaaattattttacaaaaataatgcaactaagggcaactattgtctcggccagaatgccatttttctaaatattaaaaaaaaacaaagtaaaaactaatttacatggtgggagacttggatggctcttcttttcctcggagtccactgcctcttcttttttggtttgctcgcagtaaaccaaaacctcttcagcaccttcacctaagaagctcaagtccatgtcgggatttgccagacaggctctttagatggatcgcttgcaacaatgttgctcctttccttagaattagcctcgactacctcaagctttgtaatatccgctaactccgaaaggctatttttgaaattttatttagct

SEQ ID NO: 325220 - DNA, 1268 bp, Cannabis indica
gtaaaaatcagcaatattgtaaatatttttcttatataaatttgagcttgtagtttgtagaattcagttgagtacatatcttcattttattacctttctcattcatttttaaagcaataatacaaagcccaaatccattgtaaaataatgggctttctatagtaaagcccactttagttaggggtaaattgaaaaatacctcttttatttatcaattaactaaatctacctctaatttatatttaattgaaatatatctttttatataaactgtacccaaaatatcctaacataagcgaatcacatgaaaagtatattgaagtgtcaggggcgaaattgataaagtgtttagaagatatgtaaaaatgatagactttaaaaaagagggtaaaattaaaaaaaaaatatatatatatataataaaaaaaagaactataaaaaggtatcaagtctaatttccgaaattaatcaatttctagcccaatattgtcaagagacttttaagttttaagctcaatccgcattattttgctcatagtacatccgatatgtactaagtgtagatttcatactttggatccaatctaatccacacaatagctctcatgcaaaagtacgaattggatcgattattttagattgattacttttcaatattaaattatttaatatttataaaaaatatatatttttttcacataactatattgttattttatgtctctaacaacaaattataataaataaaataataaattcaaaggaagaaaaaaattgtatgtataaaaaatatttaattttattttaaattatatgtagaaaaaaattatatataagaataaaatatatatttaatttattaagttttgaaatatatgtgtattgtatgtattagatttttaaattactatatttttacattaaaattttaattgtatacataatttttttaaaaaaaaaatcataaatatgtgtgcattggattggatcggttacttcactcacttggtcattctaaaatacaagggcttcaattttttttcttttgctctatgagaaaatcagatatgatgcttaattatgctctctacaatagagagtagagactttacaattatagttattatgttataataaaatttttcatattttcttatttacttcatttgatacttgatattcctcctttttagatatgttggtgggacaacacacaattcagagatattttttatatatataaaaattttattgtctaactttttggg

SEQ ID NO: 325221 - DNA, 618 bp, Cannabis indica
atgtttactttccaatgtgttggcaacacaataaacaggatcaggtatgtgaaaagggtttcagatgaatttataaatcaaatagacaatcaattgataagatgaaccaaaacatacttctgtttctttgttgatgttgaataagctggattacattgaaatggagttttatttagggcataaaacccaacaagattctggtctgggtctcaggtttcaggcctcgcgagggtttaggagcaggtcaggtccagatcaagtctaggtcccggtccaagttcgggttccaggtctcaggtcccagtcctactcaaggtctcggtccaggttctggttatggtttgggttcggttctcgtcacagttctagctccaattttgggtctgggttttgttttgggtccgggtatgggtctaggttgaggttggggtctgagtcttagtctgagtttgggtacgggtttttcggatcccagtctcggccaagtctgagtttgagtccaagttcaggtcctaggtcagggtcctaggttagggtctgtgtaatacccgaaattaagaaatggattagcaaaaccctaactagataattatgtataattgaggaattatattatta

SEQ ID NO: 325222 - DNA, 1178 bp, Cannabis indica
ttttcaacctaccaaatctagtttttattctctagacaactagtagatgagagacgttccttctatagtgatttcgcctctttcattgtgcttcactattcggcctatagtgatagagtgtcatgcccacatatagtaagtcaagtactcaatcatagtgggtaagatggtgataaccaaacccaaagagagaaagagatccaggctcagatcttgataatactctgcgacagtatggaacaaggattagagatctgagcagaaggagtcattatattccgtgcaatcaatgtaacgttttctaaaatcttatgtgtttaatttcattgttttagagatattcatatttaggatgttgattcaacatacttgttagtaaatctagatcctggtaaaatattcctaacataaccatcacaagaccagagatttcctttagtgtgaataaattgtgtcagttcatgcacaatcctctacagagtcactacttggcagtcaaaagaattttaagatatgtctatggagcatagcatcatgggtttcacctaaaacaatatgcatcacttgatctcaaagccttctatgatgcaaattgggccgcagatagtgatgacagaaggagtatttctagttttgctgtaagcttaaatatgatcacttggcaaagcaagaagcaacatacagtgttaaggtcgagcactaaagctgagtataggagtctagcaagtgtggttgctgaaatctcctggctgcaatccttgttctctaaattgcatctcaatctgcctcgaacaccagtgatctggttcgataacttgagcaatataatgctcactcaaaaccatattttacacgctcaaaccaagcatattgagttagatctctactttgttagagaaaaggttcaacagggcctcattgaagtgaagcacattccttcctttaattagctagcagatgggcttactaaggctatttcaagtagtcgatctgctattttcagaaccaatctcacaattgatgatgcttcaattatgagattgagggagaatgttaagacaattaaagttagttagcattagctgtctttagtgtttgttgctcaagttagttagattcatttgagagcttgagtgagctgttagtttgttactgtaactaactctctctctctctct

SEQ ID NO: 325223 - DNA, 1534 bp, Cannabis indica
taatgaataaaagtgttgagtaatgcttgttggtacttcattgatattaatcatttgtagctcacagacctgacgatgttctcaagcacagaacaaatcttgtagagttggtttaggtaactatgattatttctttagtgagttaaacactaccaactcacgaatctttgaataaatggatgagtactcacacatgtaacaactcaatgagacccatgatcaagaaagcacaacaagatttggtgtggcaagtgaccaatgaaggtatttcttcgatcactcggggacaaataagacatattttacgggacctatgcatgttacatgagcatgcatagaaaataatggtacacgagatccatgtatgtcacatacactttggtatatggaagccagattctaccctggtatacgttgccaggggttgtagtatcatttaagaattttgcacacctcagttagtatttctatggtttaatgaaatgttaatgttatccttagtaactgagtttcttaatcctaaagtgctagtgcgagctctgtaagttcattaagttgaacaactacacatacaaactatttgtacgtcagagttaagcactgttatgatataagtgcttggggtcacacaagaatataacgacctctgttataaatctaaagtgctagtgcaagtgttctttcttggatcataaaaataaaaaagaaaagaaaagtatcatcaattacagaaacctctctggaagcaggacgctgcatccagaagagattttcttattaattctgggattgggacgttgccccagttgtggtattctttcagtggctaaactcctcctaattatgggacgttgtacttagcacggattagggtttaatccaatctatcttttctctttttcctcccttggagttttttttataaacctttaacaaggttcaatgagttgaaatcattaaactaggctcttcaaataacctatgatttggcccctatacagaagatttagcatgtttttccgcactactctttgacagttattcatctcacttatgaccataaagtgaacttattgttgagcaccaagcacacaagcagtacccactacacctcaatagtagtctatctcactcacaatagacagcttcaatatacaaacatcaaagtttttcaccccagttactatgggatcaatgttagggggcaagagcagccaagctcagacaatgtcaacaaaatttcaaacatcatggtgataaggtgatggttaatatgttgggctttatgccctaaataaaactctatttcaatgtaatctctatcatttaaatgtcaataaagagacagaagtattttcatcacttatttaatgtgtcatttggttcatgttatcatttatatgtttatttgatttataaattcatccaaactcttatcacatttatgttcttgcttattgtgtcgtcaacacagtggaaagaaatcaagattgtgtgattaaatatatattcctagatttatcagtacactagg

SEQ ID NO: 325224 - DNA, 1404 bp, Cannabis indica
attaatattcaatagcaatatattctttgatatatatgccatattgccatgtgctaggtagatgaagaatttattgtattgctctcctttttcttctatcccattcaatttgaaacctcatcaaaacaaaaccatatgccacatgaaaatatatcatatctttatcttatatagattaaagtccttaagtggggctgtttttaatttataatactcaaaaagaattataatctgatattttttttttaacattatcccagagagtaaattttttattccaaaaatatagtctatttaagaataatttataatttattataaaaaaaataaatcataatttctaatttactattacggtgaactaaacatcacctaaagttttgagtaattacatagtgtaattatatcaggactggtcctaaggtatatggagcctaaagcgaaattaaattttgggcccctatgtatagtttaactattatgaaaataatagttctagtgcttagtgtaatggtaagattagaaattgatcccattatctcttaaattaaagtaaaaccttttatcactataccaaacaatttttattatatttttttcttatttaatattttatctatatactaatattttttttcacaatttcgaggctctgagtgttcaggggcctgaagcgcacgcttagcccgcctagcgtcaggctcgcccctgaattatacctaatttacatggaagtatgtgagaattgaagagtgtaattgtgacatttttattaccgctaattacactattatagtgtaattacatagtcaaataaatatataaagttatataattacttttaattacactcaattttaattctcttgtaactttccaaacatgagatttaatatatattggtccatgaaatgaaggtcatcatttttattagtaattaaattttgtgtatgataagttctattattgtacaaagtactagtagtgctatggaagccaaaaagtaaattcgaagcaacaaaataggggtctaaatgctcaactagatttagaatagatcgaagttattattatagtatttttattttattttatgagaattattagtaataataccacttgctattaattaggtaggttaacgttataatcatattaatcaccactacttcaagtcaagcccttataatatatatttccaatatttccaaagagtaatttgcggcataaatacctaagtttatcattcgggtgcaatttaatacctaagttaaaattttggcggcataaataccttccgttacactttcagacattctgtaggtaccttgctgttatcttgcacactggacaacaggtggcatgccacatatttaaaataatgccacatcatattataaaatt

SEQ ID NO: 325225 - DNA, 1330 bp, Cannabis indica
ccaaacatgctctaagctttttgaacaaaagtgcttagaccttgtttaaattattgaccatctcccttcattcacttgatgttcttcctttcatactcttcttttagggattatttcacaaatacacaaaaacaacaaaaaaattacaaaaatacgatttcacagaattttaaatatttttacgattttttataattttatttacagaaaatacggtctttttatgatgaactcttgttaatttcttgttgattttttgttatctgtatgttattttttgttattattttgatgttatttttagggatattggcggctaaaccaccctaaattttaggcttgtaacagttaactacaaaaactgaaattttggcggcataactatctaaactctggttccattttgctctgtacccctccatctaaaaatcacaattaagtgcaacggtggactgtccacgtgtacacacttgtacacgtggcaaatttttagtggtccacgtaattttaattttaaaaaataattataaataatttaaaaataaaaaaaaaaatataaaaaataataaaaaaaaaaagaatactatttttttttacttttttttacttttttttcttcttttgttctttttctttttctttttcttttcttcttttctctttcttcttcgaacagaaccccctaaccttccctgccattcttcttcttcttcttctaccattttaaaattgggacgaaagatagactcatcaaatacctgcttaacttaaaaaaaattctaattcaaacagtgggcgcaaaaacatgttttttcaaagtatcatcaaccacaatgaaattcactatcaaaggtgcacaacaccaactaatgtaaactaaaaaacataaagcagttaccaattgactgaggatgatacaatgtcgtcgttatccaacgcaagacccgtgacctgcaactgatggctctttagagtgtggaccttctccccagttctcaagtcccaaacttggaccagcgtgtccaggcctccagacacaattgcaccattcagaaattcttcagcatcaggcaaaatccatgccaatagacccacaaagctcgtatgcccgagaagaattttagatgtcgggaatcgtctctcgtcggaggggtccaaagaccagaacctcacagttcgatcccgagacgaagtggcaatacctgcattgctgcaaacgcaaatccctcgaacctaaaaacaaattctcaccaatcaagtaacttaacaagaaagaagaagaagaagaatggcagaagaagggttaagggggttctgtcgacaagaaaga

SEQ ID NO: 325226 - DNA, 1317 bp, Cannabis indica
tatttaaataccgagtctaaatatcagtcataataatttttttttgtcgtccctttttctatggattctgtccctatttatatgtgtataggttggcagttattttttattgggattggttcatttataattgatgatgatatgtggacatgtcccacgtttcttttatttgcacatgggataatatctaataactacccaactgctccctgtgtatgtgggtcaatggatcgtaagacccttgatgtcttgttttgtacatttttattactatgtttttcccgaggcggacatactgtctcattaaataaatgaattaatagttattattcttatctcgcatatgcctatgtagtcagcgagtttgaatatttcagttaactttaattaattggaatgagttatctaaattacattattaaatacagtttaattactatattcattgagctaattagcttctgattacatagccgaattttgggtataacagttgtagcgtttctttttttttattatgaaccagtagtactttcattactccacaaacaattgatacatcctaatagcaccttcaatggaaaggcctattataatctcactacacaaaaaatccaaattagtggcatttttttcaaaaatgtcacaataataatattttaataacatttgttaaaaatgtaactatagtaagaataagtgatattttaattagtgacatttcttttaaatgtaactattgatatattttagtgacatttaatcaaaagtgtcactaatttgtgaatatataattttagtagtattttaaaaatgtcacaagaaaaaattaatagtaacatttgtaaaaacgacacaaaatattaaatttagtgacattttgaaatgtcatttaaataagtaattttattgacatttaaaaagtgttactagtgaaaatttttattggcatttataatttattttcaagttatgtataatatattttaaggcttagttattgattttgtagattaaaaataactaaataaatattagcattaaaccataataattttttctcagtaaacaaaattgaactccataaataataataatatctaagcttcttcatccatgtcatttgcatctaataatattgatgtatcaataattatagctggcatatcttttctaattaaacttatattttcattctcagtatcagaaggtgtcccacaaacttcactttgcaaataagactccacattcttgttttttaattgtgcgctcatattataataatctctaggatttatttttaaagctacatgccat

SEQ ID NO: 325227 - DNA, 674 bp, Cannabis indica
ttatcatttaataaaataaaagagtccatcaataagtttgttaaaaatagaactcaaaatgatatttactcaatttaatatatatttttttgagaaaaaagaataattccaataaaaatagcacgaagctaaagagatcctgatatcaatataagcataaactatctaaagtaaattgggcggaagaattggcaaccaaactcaataaatttctaataaaagagcaaatttaactagagaataaataaaagtattactagctcgattataatgagaaatagaaatatgagaaagacttccaagcgtgaagaatatcaattattcctctcgtttaaaaaaagttcaccaaacgtaaacaaccagagaatatattagtttactttaaaatgttggtttattttatagatgtccttggtgttgagttattgctttaattcaacacattaataaaatttttaatttgcattaatctttttaattaattagtacttttttgagtaaatactattttggaccctatgttttgtaaaaattatcgattggactttctaatttgttaaatgacaaaataaacattgtattttctaaaatggtaaaaataggaacctgagcttaatttttgacaacttttttttttgatacaaccaacttaaagacaattcctaatacgaaca

SEQ ID NO: 325228 - DNA, 1664 bp, Cannabis indica
gggcataaaacccaacatgaaattcttcataagagacatggaactctgaagagtgttcttgaacacctaaaatctagtagcaaaagtgttcagacccaactgggaaggcccctataaagttatagagataactagtaaaggagcctacaagctgggaaggcacaacgagaacatggggtttgttctcctataaagatactagaatagagagcaccttgcaaatactagtagtaaccaacttacaaaatgttacttttcagtagtagttctaccaactcatcattagagtgaaaaagagctagtacccataacctttttggcgtggttgcccaccgttcttcaatgatggcctttgctatgcaagtcaagtaggggtagccatttgatatctacaagcaaatattttttatgtaagcatgttcatttaatttatgtatgttgcacaacaacaaagactaattaatgaataaaaaataatttttatgttcaaatatgttgtgtctaaacaacttgctaacaagattactttttaaattttttccttttgtgttccacatgcgtacaatagtaagcaccctaagaaaattcctaggcaagttctatgaaacttggtgaatttcaagtgaccaagagactgtaagtctgcgagctcacttgtggggcacctacaccgtacaatgcatcgaactagcacagagaacttatggagagaaattttaacacttagtataagctactaaatctgcctctaagttaggcccagggatacttcagcttcgcataaagaaaagtatatttggatacttacatgtcaaggcaataagaagatagccagaattaaagactgcctggtcgatcataaaacccatagtaaaaaagttttaaggctaaagaatagtaatgttcaaaaaaaggaacatgaaagtcctgaggttggaaataagttgtgttcaaaagtaaaagactcataggccatacagattatgaaataaaatgtatatattgataaaaccataaagctaaaatactaataagctaaaactacatgtgtgaaggtgcaggtggggctgaatcagaagctgcagagtctagattatgaagtgtgggccagccatagcctctgtaggctggccggccacctggtcaaagccaagtctgcaacctcctcagcgggtgggctggccatctcctcatcagagtgcccgaaggatgatccttctagctagatggtggtttggcctacatccaacctgctctcaaaaagggctttcccttgggccaatgtgctctccaagaaagaaacatcgtgttgggttttatgccctaactaaaactccatttcaatgtaatcaattttattaaaacatcaataaagaaacattagtttttttcattcatttctgtatgttttggttcatgttatcaattgcttgtctatttgatttataaattcatctgaaacccttttcacatacttgatccttattattgagttgtcaacacattggaaagtaaacatgactatgtgaataaagtttcctagatttatcaaacacagggttttactgatatgataatctacaacagaatttacttgcatttggagaaatgctatcttctttcccgagcattgtttaaagtaaagctcaggttgggtgcatgga

SEQ ID NO: 325229 - DNA, 827 bp, Cannabis indica
aaacaaagttgaccacctatgccagcgcaagtcaacaactgcgccggcataggtggacatttgccggcgcaagtactaaatagcgctggcaaaagtgggcattcttgtagtgtacccttcctgttggcagtccaagttctggtaacttcggcatcccaatagctgtccctgccgttactattgcacgacacacacatcaatacctttgcaggagaaggatgatggcccgcacaaagcagacaatgtggaaagtcaacacatttgaccctcacgtggctcagctcgccacgttgccaagtgccaagtaggatctgcccgccatggaggaggaagaccatgagggggacattgaggtccaggaaatggaggagcagaatgacgtttgtcctggtagcccttccaaggctgaggaggaaggagtggcttaacctccaaattttagagggtataacgaggccggggagcgagtgtccgcggagggtgacgtcttggtcgagggggaggactatgccaccgaggagcttactgaagcagttccccacaagaggcaaagtgctttaggtgccagattggtgagccctccgtccaaaataagtgaggcacgtatgagggccttagataaggctgggtacttgggcagactggagtgttacgtgtcctcttcaaaataccgagcaactaacccagagaaagggttttgtgcttgctcggttgctcacactaagacaggggcgatggtacctttgcacctgtgcttcaaaagggttgcggattacttttgcctttgtctgacccagtgtatgttgggaattattttaccaggatct

SEQ ID NO: 325230 - DNA, 1508 bp, Cannabis indica
aaaatatataattttttttttcactaataataaagtaaaaatatgtataaaagagaatttattttgattgtgacaggcatggtattaggcaacttcaaagtgggtgggccgatgggcctggatatgtgacccaatgcccaatacaaactgggcagagctttgtgtataatttcacagttgtggatcaaagaggcagctttttctggcatgcccacatatcatggctaagagctactctctatggtcccataatcattctcccaaagaaaagtggcccttcttacccatttcctaaaccctacaaacaagttccactcatctttggtaataaatcttcacactaaaatagtttcccataattaattagatagtgaattttctaacaaaaactatacaattcatgatattttttcaggagaatggtggaatgctgatacagaagcagttattgactatgctttgattaatggtggaggcccaaatgtgtcagatgcctataccataaatgggcttccaggcccattgtataatagctcaactgaaggtaagtgatgttatgtataaattatctttataatagtgatttttttgatgaaactaactaaaaatgtactatataagatttattttaaatttttttttacataatattattcattatttttaaatattttagtagtttatttaagtgttaaggtttgtttttatgtgtagatatatgtatgtattaatattatatatttgaaaatgaattaaaaaattgaagaaaattaaatttagtaatgtattttagaaaagtttatgtatagtgtaatataaaatttttgagttattttttttttggtgtatatcttttcaaaaactattaggagtgttctaaaaagctaaaatagtttgactcactttttttgattaacaatttatatttgtgtagatacattcaagttgaaggtgaagccaggaaaaacctatcttctccgtttgataaatgctgcacttaataatgagctatttttcactatagcaaaccacacaatgaaagtggtcgatgttgatggtgtttatgtcaaaccttttgaaactgatgctgttatcatagcctcaggacaatccacaaatgttattctcaatacaaaatctgagtacccaaatgccacattcctcatgattattaggccattttcaccaggtcacccttttgacaataccacatctgcaggaatcttagaatatgaatttcctaacccaaaccttacaatcccatggcacaaacttcaactcatgaatccatcagtcttgcatgaccaaaatgacacttcattcgcaacaaaatttagcaacaaacttcgtagtttagccaattcacagttcccaactaatgtacctaaaaaaattgataaacattttctcttcacagttgggcttggaactagtccatgccaacataacaaaacatgtcaaggcccaaatggggcaaaatttgcttcatcagtgaacaatatttcttt

SEQ ID NO: 325231 - DNA, 953 bp, Cannabis indica
tttttaattttttttttaattgagaatcaaaattttgaaaattttaatcttttttaatttgaaattttagactccgatcccaacctagaccttagaacccaattctggaccctaacccagacctcaacctcgactcgaaccctgacatggacctagacccgaaccagacctggacctcagaccacggatctcagacctgacatggactcagacccaacctcacccaaatcgaaccccgaacccggaccccgcccccggccccgaactcaaacctcaccccagacttggacctgcacccggacctagaccccagccccaacatcaaacctcaccctagacaccgaccttgcccaagccctggacccgacctcgactccggacccgactgaaataaaatcaataaatgaaaataaaatttatagaacaaacttttgtttttgtttttaaaattgaaaaacaaaagtagtagttatagaacacatatttgtttttcaaaaaataaaattttaaaaacaaaaattttacttttatttttgtgattaaaaaatttaaaaacaaaagaattacaaaacttcacctaatgtttgtaatgattaaaatgaaaaaagaaaagtttgaaacctctttatataaattttttacttgggtgctccatcattagttatggtaaggtaacacttgttatcatatttaaaatgagtaaatatcattttagacgctgtgtttgtaaaagttaccaattgaatcctctattttgataaatgataaaatagatcttatatttttcaaaatgataaaaataagaccctgagctcaatttttgacatctttttttaaatataaccaacttgaagataatttttaacatgaataggtacaaaaatataactaattttaccataatagcgcaatgcacagacgtgatatcccaataccacctctaagatgtgtta

SEQ ID NO: 325232 - DNA, 747 bp, Cannabis indica
acacctaatataacattgagtattgtattttttgtacatataatatatgaatttgggaaattttgtagttcaatgttttttatggtaagtgtaaaattttagagaaacttaaataatttataatgtggaaaataaaatttgagacatacaggggtcatactaaaataattcctttgagggtctactgttgacttatcttataaaattgtgtattaatatattactcgtgtttatatatttataataataatatatgaaaatggtgatgatgatatgatgatcaggctggaactgtgaaacaatacccacaagtgatgaaagtggcatcgttttacagcaccattggaacactccaatctgctttactttcagccttaatcttcgaaagagatctaaatgcttggaaactagatcttaacaccacccaactccttcttattgttttaacagtaagtactaattaagttctcattaatttattgattattaaaccaccaacaaattattattattattattgtttgacgttgaccaaccacatttataattaataaaagaatatgcattgacttattaatattatatttataggcaagctttatgggtgttattcgaagttgtgttcatctatggtgcatgaaaatgaaaggtccattatatgttcctatgttcaagccatttggtgttgtttttgccactatttttggtactagcctccctgcaagtactcttcgttacggaaggtac

SEQ ID NO: 325233 - DNA, 541 bp, Cannabis indica
tctttgtttgttaattcacatttagagtaatggtgagtctgagtactagagaatacagcgtacaattgagatctcagaccatagaattgttttctaaattgagatctcagaccatataattgttataaataatacttattcttgcttcttaggtttggttgtgctgttttcatctgatttttattattgattttcaaaatttcatacattgaggaggaatttcatggttggtattcttgcttctcaggtttggttgtgttgtgtggcttaactgtttggtttgtattttaatttctgatgaaattgtatgtatattatgatcatagtttgaacaaattgttgatcacatttcaaatgtaaattcatacttggaaattataactaaatgagttgttccattctaactagatctctatctagtgttattgctgctctacataatataagatgcttgaattgaatcccttatattagtaaatgaccgtagtaaaggtgtagaaagctttagtgcatgtttcacatcataactaaaaactgtttt

SEQ ID NO: 325234 - DNA, 535 bp, Cannabis indica
acaactaaaattattcaataaaattttaatttcgatatcctctcatattcatgtgcaccttatttttatctgagaaaactatctttcactactacaaaatagcttttcctaacagttaataaggaggtcaattatataaaccattgtaaaggataagcaaagatttttcccaacggtttataaccgaaacaaaaaaaaactgttgaaaaaaccaaagtccacggtagagaactgctggcaatactaaatgaaattttgtaaataaaaacagtgaatgccaacagtttatatactactgttgggaatactaagtatacccaacgatttataactgttgggaatactaagtatacccaacgatttataactgttgggaatattaagtatacccaacgtttctaaaccgttaggtatccttagtatgcccaacagttataaaatattaggaaataatctttttagtataccatggtttcatatttaaaaaaaaaaaattgcttagtataaaaaatttgtatttaataaaagaaaatac

SEQ ID NO: 325235 - DNA, 1255 bp, Cannabis indica
atacgagggaatcgcttaatgccttacattcaagaaaactcagctccacctcagtatctgactgatgctgatcgtcgaactgaatcaatcaatcctgcctattctgcctgggaagttcaagattctttactggtttcctggttgttgtcatccatgtctgaaagccttcttactcgtatggtagggtgcaacacctcgagtcagatctggatcactttgcagagatacttcactcttcaagtctctgcaaagatactcgaatttcgcactaagcttcaaaacctgaagaaaggatctctcagtttaaatgactacttactcagagtcaaacaaactgttgatttacttgcttcagttggagaagtccttagcactcgtgatcatgttgctgcgatcttcaaaggactccccagcgagtatgataccttcgttatctccaccaacacacggcttgaaagttactctgtagctgagatagaagcattacttcttgcttctgaatccagaattgagaaaagtgacaaagaagtagatttcaatgtcaatatagcttacacagatcctgaatttcctgaggcaaactacacaaattcaaatcgaaacttcaggagctcctatcctagatccagtggctctcagcctttctataatggatacaattctggatcttactttcctccatacaactcaggtcaatctcgaggttctccatctcgatttggcaactcaagtctcagcactcaatcaccaccacctggattcaacaatcagagaggaggtttctctgggaatagaggaggaagaattcccaatagcaacaataatcgacttcagtgtcagatatgtttcaaaactgggcatactgctctagattgcttctacaggtttgacaaggcctacatcaccaattcatctcaaagcaactctggacaccaagcacagatgcaggcacatttggccagttcaaactcgggttgggactcgaattggtatccagactctggtgccaccaaccattgcaccccagactctcaaaacatcatgacacccactgaaaacattggttctgaccaattgtttgttggtgatggcacaggtttgtcaattctcaaaactggtcattctctgatgtcatctaaatactctactcatcctcttttacttaataatctcttgcatgtgcctgccataaccaaaaatttgctaagtgtgtctcagtttgccaaagacaatgatgtctatttccaatttcatg

SEQ ID NO: 325236 - DNA, 1989 bp, Cannabis indica
tacatggttgtaaagttgcaaatagtgcacctcgaatttcacacatgttatttgcagatgacagttacctatactgtaaggcaacaatagaagaaacaacaagaatccaggaagtattgagtacttttgaagaagcatcaggacagaaggttaatttctccaaatcttctattttcttcagtactaatacaaccatgataatgcgtaacaacatcagtcaaaggctcggcatgaccattgcgggagctaatagtctttatttgggtcttccaagtactatttctcgcaataagacggctgttttggttacttgaaagaaagagttcgcaaaagaattgaagggtgggaaactaaatacctttcacgcgctggaaaagagatcttaatcaaaacggtggcccaaactctcccgagttatgctatgagtgtgttcttattaccacttgacattacccgagagatggagcgaacaatgacaaaattctggtggcaatcttcaaacaagtctgggaaaggaatccactggctctcatgggacagattgtgcaaacacaagaagaaaggaggaatgggattcagacatcttagagatttcaacttgtcactacttgggaagcaaggctggcggcttatctcacaatcggattcacttgtagcaaaggtcttcaaggctagatactatcctactagttcttatttggaagcatctctagggaacaatcctagctatgtttggcgtagtgtttgggaggcacaacaacttgttaggaaaggccttcgttggtgtgtagggaatggagcaagtataaatatcctcaatgaaccttggctgccttgtgttgagaacccttatgtctcttcttctcatcctactttatctcatgcgagagtgaataacctcatgaatatagatggcacaggttgggatttggaaatattggaagacctatttgaagaaagagacaggaagctaattgagaaaattcctttgcaaccttcggttcatgaagacactttgacttgggcttttgaagcttcaggcctatattcagtcaaaagtgcttacaaagtactccaacaagctaatggtagatgggacaatgatgatgatactgcttctcgtttttggaatactatgtggcaacttaaaattccacccaaagtgaaaaacattctgtggcgagcagggaagaattgtcttccaacactttgtatgctacaaacaaaaagagtcaatgtgcactctctctgcccgatctgtagaatggaagaagaaacggtaatccatgctttggtcacatgctctcatgttaaacaggtatgggatcgtgttggaattggaacaactattcctcatgataatacctctttcttagaatggtgctttggagttttttctggtgtagatgcaagcaagaaatgtttagtggcaacactctgttgggcgatctggagcgctagaaatgagtttgtttggcaaaaaaagatggtgaacgctgaaggaattgtagtattggcaaaaggttaccttgatcaatggacaagtgctcaaaatactctcattgagtcatcatggtctggttttcagacgggtgatggggttgagcaatggtccgctccaagtgaaaatagtatcaaggtcaatgttgatgctgctcttttcgaagggggaaccaactatggcttaggaatggtagctcgtgaccatcacggtttccttgttgagggccgaatggacttctactcaggggctgctacaccagaagttgctgaagcaattggagtccgcgaggctctaagctggattaaaaggaaaagatggcaacgcgtgactattgaaacagattgtttaatggttgttcaagcaatacgaagctcaacaaaaatgatatccttgtttggacaagtcattgatgaatgtaaacaactctccttcgagttaaaacatgttcctatttattttgttaaacgatcagctaatgtggtagc

SEQ ID NO: 325237 - DNA, 1225 bp, Cannabis indica
ttaaataaaaataaaaagtcacccatgaaattctcataaactaaaaatttcagttatatagacacactttatatagaatagatatatatatttatatatatatatatttatatgacgattatgacttatatatgatgatgtgttttctcatatatatgtacagcaaagaatgtgagactgaggcattttaattggcagttgatgagatactagtgctacaaattaaccattaagctgtccattcatatataatagattatataatattggataaatagcaagtactgaaagttttatttttgtaagcggtataaatcaatgtttatttttagcggcatatgtatctaatgtttgtaaaactgtaatttttctctaattttgtcagtacagattctgatattgtcttaaacaagacacatataaggcttaaattcttaatcattaggtctaaataaaaatatgtagtatcattgagtatttatgccactaaatatatataaacatatgccgcttataaacataaaattttaaatatttatacctctatttaccctataatattatatataagtacatttatatacatgaagaaatgcccgtgaaagaatctcatatatgtaaagaaaacaactaagaatttctcatatgagagagagagagagagagagagagagagagagagtattcaccaagaacattctctgtataagaactctcataaataacaaagactcgtggactacgactcattaatgcctgaaccacgtacaaaccacttgcattaattattccatagctctcctcgttatattatttaattggttgccaaaaacctcggtctaacattttagtgttttacattgagagctgtcggaagcgttattaagaagacaacagtcaaagagtcagagtaacaatggtggaaactcataacaacacacgtcagccccgtcctcctcaggatgctcgaaacccagaaggcgaagaagtggcctcacgagtaaatgtgggctctgaggaacgcatgaggcaaacgatgaggaatataaaggaaactttgaagggtacgacacctattacgaggtagttatactgaactgctggtcctgaggcaaaaggcggctgatcatgaagccgaacttgccgcccaaaaatacattgtagggtattacggtaatttaatccgatttacagtgtagatcatctatatagaggatcattgatc

SEQ ID NO: 325238 - DNA, 1228 bp, Cannabis indica
ggttgtccaccgcttcttagtaaaactacaatccaaagaggtgggagggagataagcattattagctagctaaacggtaagcagtttttacagagaataaactagagggatgcagattccaaattaaaaaaatctttcttgcccaaacctccaagaggaacctagagaatgtgagagaaacaacattatcaaaatagttatgaaagtacttcggataatatcaagagttatgaaagttaggagtaggagaaccttttttaatcacacttatggaagataggcttgtgcattgtaagtacaaatttgtactaagttatgaatgttaggcttgtatattgaaagtattgttagaaatattttttatatagacactttatgtaatattactcatgtaattgtcttaataatttgaatttatcttttattaattctaattttatattattacttttaatagtgaactttcagttgataatgtatatatttttatatggatatatgatattagtttatcttttatatatggacaaaacaatattagtttatttgttgatttttttattatttgaaaatttttaccgtgaaaatttttctgtgtacacctaagttccattatagaaccgacgtaaaaaacacttgttacgtcggttaaagattgacgcacagcttgttgcgtcatttcaaaattgacgcaaaatgctttatttttttttttgtgttttgcgtcgattataaaatgacaaaaatagttttttgtgtcattttaaaaccgacgcaaataaattactatttacgtcttcggcttatacatcggttttttaaaccgtcacaaaatttttattagtcacttgaaaaccaaccaaaataccccttttgtagtagtggttcctcaaatttcgaatgatatttccaaatttgaggattgggggaggagtgaaatgacatgatttcaaagtctttctacatttagctgaggcttccatgaagtaagagaaatccctatgaatttcttcttccctctgaaactattgtaaggaggagaccggagccaaagcatttgtctcatcttcgtcatccacccctacttcggactccaaaaagttaattaggtcaactccgattagttctatcattgactttgtcttcttcactgggtccaattgttgggttttatgccctaaataaaactccatttcaatgtaatctattttattcaacatcaataaag

SEQ ID NO: 325239 - DNA, 553 bp, Cannabis indica
atgctatggaggggcgagggatgagaagaagctccaaaaatttctatttgatagtaaaggtagcaatagctaccatgtatttatttggggacaccaagttgtggtggaagacgaagtatgaagacattcaaagtggcaagtgcactattgaaacatgggatgaccttaagaaagaattgaatgcccgattccttccaaaaaatctcgcttacttggctcgacgccagctgagagagttatagcaagttagaaaaatctgataatatgtaaagaagttctctagattgatgctcaccattaacgacatgaacgaagtcgacagacttgtctttttccttgaaggactcaagacattagctaaataagagctatagaggcagcttgtgtcagacctagccaccgctcaagctccaaccaagcggttgactgattacacctcaaggaattcacaggcaaagaagatgaatccccaaaccaactcaaataatgtgaggagtaagaagtcagggaagcagtggcaaggtaaaagtgggggaggggacaagaggactcc

SEQ ID NO: 325240 - DNA, 872 bp, Cannabis indica
tcacgggactattgactgtcatagtaccacctctaggtggtgccaccaatggtactcaatagcaatgctcttatcgaaatgagcattggtataagacaccaaggtgtcaaggacactattaggtggcgccctataaatagttagcgattttctataattttaattaaagtaaaataagttacaacactatctacatggttaaccaacaacatcacttgaattgggaacaaataccaaaatatatatatatatatatacacacacatatttacaaagtggtataggggttatttatttagaaaatttacttagtttaaaatcgtttatttatttatttttatttttcattttatggattttattttttataggtttgcatttatattttttccaaaaaataatgttttcacattgttttcttgtaggaacaacgtgaaaataataaaaaaatataacctttcatgcatatttttgaaaaaataatttaaaattcataaaaatatataaaataaagtaaatttgtaaactttttgttatttttgagtatctataaaaatatccaaatttatataaaacccctaatagtaagtttatcaatccaaggtaaaaaggtcaactatatctaagtgattattgtgtgtttttcaacacgtacttcttcttcctaaaattcaaattgaggaacgagttaaaaaaaaataaagtggtgacatttgaggaatggaaatggtgtggatcgaggatagtctttaaattaacatttctatcttcaatcaatcatgtttaagttacatataattactcttaccactacaactggcttcaaaatgtatcccatatttttgagttaatttcacaaatgtacaaaaata

SEQ ID NO: 325241 - DNA, 1452 bp, Cannabis indica
aaatttagtcgtaataattaatacaatacattgcttaatctaaacatagtgttatttattatttaatacaatacaacccttatacggcgtaccaaacgagcccttggtatctcctattgtatgccatgtaagctttttattgttttgtttttcttggtttagtgagtgccaactggtctcagctgggttgattcttcttcaataggttatataatatttgatttttttttttttttttaacttactctcatatttgatagaatcgttttcttgattcttgctctgctagggcaaaacatttctattgtgttttgtcttttttggtttatatgcagatggaaattcaataaattttttaagagattggagaaagagttcgcatctgcaaaatttgaggagagttcagagtgaactgctgaaggttctttagctggttggatgcaaggcgaccttgtgttctttgatctaagtgtgtttagatctcttatcttgagtttgttcaagtgttaggtaacatcgtgtaaaagtcatttcagattacataaattggtttgttaaatcaaaactagtgtttgtaattgatttgattttatagtggatgttactttacacggttggaatgcatttccaatgcagaaagaagcttgtaaattttggtgttcatttgatttagttttctgtttcaattcacaataattagcatttaagatcaattacttagttatcgaagaaattagaattttcaaaatgtaaattataaataaataaacaaataaaaataccattatatattcagaattagagagtttgtgttgccaaaaaattaaaattggaaaattaatttgtcaaaaaaaataaaatttgaaaactaatttgtgaaaataataaaaatttaaaatctagaaaccaacctatacaaaaacataaaccaatagagataaactaattattttcaaccagcagatgagttataatgatgttattactatatatttctactgagatgagtaatttattataagtgcatcaatagagccaatgatcaaaactgaaactgaattggtctgaatcatgatgatatctgatgatcccctctttccaataaaaacattgatataaatatatatgtatatataaaaaaaaaaaaaaatatatatttatatatatgatcagttactatctcatatccaactcattactaatatattcattgttattggactgtataatatatatttttaaacatattatcttgcatgattttttttataaaattattattagacttaatacttaattatatcaataataatattgacaggtaaaacaaatatataagacctatgataaaatttaaattaaggcccctatataaatattttaaaggtaaatagtggcataagtacccaaagttttgagtttgtaagcggcataaattcaatgatttttatt

SEQ ID NO: 325242 - DNA, 751 bp, Cannabis indica
atagaatattttaaaaatataaaaatatatcgttaaatttaatgatgttagtaggtttagttttataaatattaatattatttattttaaattgatttaagtatatataaatattaatattattaattttaagttaattaaatttatattaattttaaattaatttaaatatatataaatattaatatattatatgcaatattattttttatcgttatttttaatattgggcagtatatttacttttaatattttaaaattttatatttatttttttttgaaatttttaaaactttaaatattccccatttgctgccttatcctcatgcccctctcctgtttgctctagagtcgtgaaagagtttgctatcacagtctgtttaggaggcatcttctctttaactttctagccattgactactggttgaaactcctctattttctctttccagcaacaacaacatctgctggtttttttggctcttttttgatcacccactcttgttgctttccttccttcttcctacaatcagctgtcttatgccccattcctttgtaattttcgcaaagaattaatttccattcataaaagactttgacaggtacattagttccatattcattctcaaaataaatggtatgaggaaatttctggtgtatagaaatttcagctagtaccctgggataattaagcctataccgttcctttgtcattgcatccaccattattggtgttggatatttattttac

SEQ ID NO: 325243 - DNA, 610 bp, Cannabis indica
ttaatttttttctttttattattatagatgaaaatgaacatttaaaaaggttcaaaaatattatttaggatcatgagtttgctttgaactttttgtatcagaagcatgtaataatagccatgaacatataacatttttgagtgagtacaagctctttggttagttagtggtctctattatagctttttacattttttttgttcactacttgaagacaagacaccaactttttattctttatttgaaattcaagtatggcctggggaaaggttttatttatgaaatgaacattttggggataagtaccttttgatgaatactggtggagttgacaatactttcattcttttctattatacataatgtcttgagtgtataatatcgaaagtagtagaactaaactgagcttgtacaaatgaatgcatgtttggtggtctaagagcatcaccaaggaggcatcaaatttggtgatgcagtagaattagtcctccaacgtagctgcaaatattagactaaattgctgtgtgtgctacagtgcacggcatatatgccgtgcactgttcacacggcatatttttttttttttttttttttatttatatgttatatt

SEQ ID NO: 325244 - DNA, 1319 bp, Cannabis indica
ataaataaatacagatacgatgtgatgtttggatatcgcatagccaaataaaaataattaaagaagtgtttggcccatatatatttattttgaattgcaatgtgcagttgaaattaaattcatcgaccactctctagccataactaatttatatataataaataattgaaaaaaagtactatataaacacactatatagaaacaaataatataaacattagcttaaatttagtacaaggtagaaaattaagaaagcaataaattagtggcaacttcatcaatggccggaaatgtaatggaagatgagaaaaatgtgtacactggctctggcagaagagttcaacctttctccacagaaaggtaccacaaacttatattatatgttatatatatactaaagtagccaataatatatatgtatttatttacattttattatatgatgatcttctaacagaggagaagagtcatggattaatgttgatgaggaaagtaagaagcagtccaactctaccacccttagtggtctattgggtttaaacgagttagtctccttggaggtcagttctagttttgtttttttaaaatataataaaatggttatggtgattaatttaagctaccatcttattcgccttgtgtcttaaatcataacaaggacgttttttttaaagaattgcattattcggaccctttttcttctttattttgttagacatgagggaacaagtgagggaattgttccataacaattgaaaagtaagttttttgttaaaaatcaagaagaaattagtccattaaagaaaaagggagtagaaagtggaaaatcttattaacattatattatttattgatacatttagcacgattttttttttaaaaaaaaattgcattttatgatgaaggtaattaattacaaatatacaataactgagttttttttaatagatattcacaaacatataaaagtttttttacaaacttatggaaatttatgtagttaactctatgtagacctacatatttattctggtaaattgttgaaaataaaattcaaataattatttatcacgtaaaaaaattgtacgtgcaataaaatatttaaatattatttttagcattgtaaactacttataatttttctaaaaatttacaggcaatcttaactataacatgcacgattattaaaaatattggactaaaaaagaatttttacaccacatactgaaatttctaactttcttttttatcgtggggcggaattttttcaaaaatatcgtgtaagttttatactgtgtactgtgttaagttttcacgat

SEQ ID NO: 325245 - DNA, 1194 bp, Cannabis indica
cttatgacattggtagactctttatccctctactgcttaggaggtactttaggaagtacctttttgcttggtgggattgttttggtcttgaccctttgaaaatttcttcagccaactaaagctgctgaaagcattgatggttttctatgctattctcgaattacttaatgatcacagagctttgatatttttcggcagtattggcctttttatctaagaaggctggtttcacactctatagacttcagatggtaatttcgtggtcaggataacactaaaatttctaggagttcaagagaagccttaaaagttctaaactttttatacgactctattttaaaagttttcaagatggaatccaagtgagtacttccattttagggattttagctgaaaactcttcttctttcaaactgagtgtatttatttaagctttgagagggattcaagaggttttcattttcaaaggaattttgtggaaagtgtattttatactaagcaaataaccaatcaaacaaaaaaaaagtaaacaaaacaaaaaaaggcaacacacaatacgttacaatacgttatttgggggcatagtaagctaggcatgataccacctaagtgagctgagaagtgtggatgtctccaccttcctgatcacttgtttaaaacatagcttttggcctaaaaaaatgtaaagcgtaaagtgtaaacataaaatacttttgttctcattgcatgatggctaaagccatcgattcaaaagttaattacatagactatttacaaaaaaaatactccaaattgtgtcagtacctggtgtccattgcctatttgtaatatcagtgctaatgatctgcattccaggccttggggacccttgatccgtctatttttttgacctaaaaaggaccttgtcccactttctccagtatctcgtaggggccttcccagttcgggccaagcaccccactcccagttcctgggaagttgtgaatagtcttcgcagaacaagatcaccaacgtcgaaggtatgacttttcacctttgagttgaagtgtccggcaatctttcctttgtaatatcccggaaaataaaataaaatttaaatagacatatttattaaatatgtaattatagtaagattatgatcttacttagggtaactactaagaatttattgaatgatatatatagcgtaattta

SEQ ID NO: 325246 - DNA, 1680 bp, Cannabis indica
gtctttaaatatataaaataattattaattaataacaaaataaagaatttaagataaaagtcaatccaattcaatgtgacattaatataaataaagagttaataaaattaattaaccaaaattagctcaatattaaatacataaaacctaagatttggaataccataaaagtataacttatttaagacaaaatgaaatgtcaaaaaactgccataaaaataataaaataaaacctgatttaaataattaaataggctattcaaaaaaataaaaataaaataaatagtagagaaaataaatcattttgttattaattatcattaaagaaaattaattactgaaattttccaaacaccaatcccgcccatgaaactcgactcagtcaaccctcaacgctccaccttttcatgtcaaattcccctctcggccttactcaagcgacaatctacaaaaccttaggagaaccaagcttggatagccaacaaacatacaagagataaattatagaaacatacaaatcataaaattatttaacaaaagagcaaatatattctagtaagaacaagaatacatggattgatcactatctgttaactcaagaattatatgaagaattaataatctaaaaactacaaaatcaaggaaaaacgagaattgaaacaatcaaaccaaaaaaagatgaaatcaaagaaaaacataccgaagaaaagagaataatggctgtaaataatataatatagactactactcacacctattttcccctatttttatagcaataaacttctgatagagattggttatagtatattttatatatatatataaaaacaaacctggccgagaaggatttcattggtgaatggtccgtaaatgttggaggtatctagaaaggtaataccagagttgatggcgtggtggagaagagcccactctcctgaaatctgcatatgtactaatcgtggccacaggggtttttgggattgaaaggcacgctcatatcgaccaaagctttgactcgatcagggcgaaagaggcaaaggtaccaggcgattacggcgccccagtcgtggcctacatcaaaaaccttgtcctcatcggcggctacggcgtcgagaaagccgatgagatcgccgacgatatgaaggcagatgtagttggcgggagattcgggggcgtctgaatcgccgaagccgcggaggtcctctctatctaacttctaattgtttttaattagtggtgtatatttgtttctcaactatactacacattttgtccttaacgctccttagaattaattaagtttatttaagttaatagcttcattaatatttctggttcgaattcttatataaatattcattaaagtaattgtgaggttgacatagtaccactccactttctttctcatattcgaaagttgatatagcaatatataactagttttttggaatattaatttggaataaatataagattctttcattgccgtttcaagataatgacaagataatataatgtcacatttcttttaacatatcacacgacaaagaagaaatatatacatgataaatgatatatatatatatgggtgtgctcttaatgggtattacccataaatgagtatttaattatggaccattagatttaatcaaatggatgatatttaaagttattaat

SEQ ID NO: 325247 - DNA, 1644 bp, Cannabis indica
gaagcagccagattggcgtactcgtgtataagagccattcattccatgggagtaagggcccaatggaggcttgaagcggggacgttacagctacctgcttttcctggagagctaccgacttctcattgcaatccttctccagttcctttttcagcttggagttattagcactcagatttgtcacctcttatttgcggagaccaagtagttgacccacaccctcatactgatcctggacctccctcagactggtcgatgtcaagtccgaattatccagcacctttgtaagatcacctctgtactgaggtgaaatcttaatcgggtcctttgaacacaaaactcatgggagactcaatatttataaatctgatcaaagttggtggttgtaagattcttgggaacaataaagtaataaaagtagaaaaaagaatgtacataaatggtgtttaagttctgaggtcttggtgtcgacaaagtatggtggactcaaggagaaagatgaagcaagggatatggtgttcttagcagctaccaagtaaccaagccagtcatacgccccttttaccctaacctattactctctttatataggccttagggtctgtttaatgatcccctacatgtcagggtatctcattaacaaatcctatatttcctcttacataatgaataaacaattacaaatagataaaaatccctttatttctagactaaaatctcataaacattgggaaaatattcggctaaagatgcaccaatttaaagtacagtgacaagggatgtcacctctcggcttgaaattcatgatattaatgagaagtattgaaaaaatgtgttttgggttgccactgttcccatatgatgccacagggactgtggtagtgtcctctaacaccccacccttagttacactactttattcccgagtaaagtataccagtctgccttgtgagccaattttggactcgataaattcagaattgagttataattatagacacacttagatctatcttgaaaatatatttccaatgcaagttgaaccaggtaattcgaataaatatttagagagttatgcctgttttacggaaggatagtttgtgttattttgttctagttgcgagcactaacatggccaaatgacagctcttggccatgcttctgggacccttggggagtgttttgaatttttttatggcaagtcatattttgggggtctcgggatcctaaaacctcatttgacgtccaaaatcctaacaggagaccactaccaccagttgggactgaaaagtggtagtggttggccatggcttatgggaagccatgaatggtgtttcttgcttatttcattcatatgtattctagaaaaccactttggtcaccttggttataggctaattgcttaggagagcactgccaccatttttaccaaaaaagtgacagtggtcgcattaggggtctgtggagccttgagtgacttttctcacttgtatttgatacatggattttggaaatacaatttttccaatgaaaatcctcctcctgtgtggtggctgaccactgccaccattcgtcccaaaagcgtagtagtggtcggccaagtggtttccacaccacttggtggcttttctcacttggttttga

SEQ ID NO: 325248 - DNA, 518 bp, Cannabis indica
tagagccagttggtgagtattgacgcaaaaataggccaactcgtttgtatgtataaatgaaataaaagttagaagtgaccaagtaaaatagtgagtacacacaagtatttatagcagtttatttttttttattgcgataatttaaaagttatgtccacttcaagtttttattttcacgacaatggttacaaaaaaaataattaagtctgaaaactctaatttctagagacagaaactaaagagatgctttgattttatgaatatttttcagatatggaatgaaaggacattggtcacgtacctgtcgtacggtaaaataccctgttaatctttatcaagcatctgtgaaagagaacaaaaaaatagaaacaaattttgtctatcaagatgatagtcttttcaaaaagcctttggatattacgtacttagtgttagaattatttatttgtggactaatataataccataatcacaatcattaactatgtgcccaatatctattactaccataatgggat

SEQ ID NO: 325249 - DNA, 535 bp, Cannabis indica
taagcggtctttacacttaggctagaacctctcaataataacttgacggtcccagattggaagagatgcttcaggcctaacagctaaatcatctcgctcagtgttttacctagtcgtgatgacagtggtacacaacctgacctcgactacctcagcattaaacttcttcttgaagaattggtttgattttttaattggacacgctccactttagacaactctagcaaaagaagaggaaagtacaaagtagaagtgttgggttttgtgccctaaataaaacccatttcaatacaatcagatttactaattcataaacatcagaaatcacattttatattgcatggttcacatgatttatttcatgattatctttaatgtataaattctattaagtccagaacatatgtatttgttcgtgataatagtgttctcagtacagtggaatataatcatgattatatgttcaaaagtttattccctgatttttcagttcactggatttagactggcatgataatcagcgataggtatactt

SEQ ID NO: 325250 - DNA, 2067 bp, Cannabis indica
aaaagaaaaagagaaaaaaaagttgaatgaataaagttgtaacaacaaatttcatgaaaaaaaaaataatgtaatagtacaaaaaaataaatcaagttgtcaaaaggtcaatgttttgttatttttctttgctttgttgttatatgtttgttattttatagttgttttcatgttgtttgttaagttgttttatggttgttttttagttgtttgttttaattttactggaacacaatatttgagagagtctgcccacgttttgtgctcagaggcagttttatcatcccttatgggtttaaccgttttattcatctctttatcagatattaactggtttacatacagttttctgcagttatcttcctctgttctatgaatcctcttggtctctgccattaattcatcactttcaactcaattctccactcccctgtactcaattctgcttcctagtaatcaatggatcctcttttggacaagatgaaatctaagatcaaccttacagaggatgaagaatccgtttttgaatttcatgattctgaggctatctccccttctgttagtgttgatactgttctatatgcaaagattttaactaagaaaaaagtttggctctcaactttacaacaacaaattaatgtctgagcactgggatggtagatttcccgttaaaatctctgaatcttcagacttgttcatgctgacttttggctgcgaaggagataaacttcgtgttctggatcgcgagccttttcattttcaaaaccatcatgtggtgttgcatacaccagttgtcggactgaattttaatagtgatgatttaaagttcactccattttgggttcaagtataccgccttccatttctcagtaaaacaaaaactttggctattgctcttggtaatatcattggaaaatttgaagatgtgttcgaggactctcttaatgaaggctggggaccctttttacgtatccgagttcttatggatgttactaagcctttgaaaagaggacgaatgatttctttgggccatgtcaaagacaaattttgggttgattttcgatatgagaggcttcctgaatactgtatggaatgtggaataattggtcatccatataataagtgttctgtttttcttgagaaactggacaatggtgaagaaccggccttggaataccagccctttattaaaggttcgcctctgccaacttcttcttatgatcgctatcgaactgatttcgctaagggtgatgcttggcctttgctgacacgactagccaagaaaagtttcactgcggctgtccctcaacttcacctgcgtggtcacccacaaccaaggcccttatatgcaggagagtcatcgcatgctactgaacgtgatgatctgaattccaattctcctaccaaccgtatagtccaaactccagttgtgaaaccaccttccatttgctttcagccatctcttttgcataattctaccataccttgtcccacttcctctgtaagccttgatcgcagatcatattgtacctcacggccccccaacttcactgatctatcatctatttatataccaattactaccaatccttctccctgcaatgcctttgccacataccccctacatgccaataatagtcacttcaacacacttaccacttgtgtctaattccactacacatcccgccactgctgtcatgaatatttctgggaaggaaaactcaagcccaaatgttcaatctaaacgacagaatgaaagcctttctcttagacaaacactcaaaagatgtagagggaatattgttaatgatcacgaatcaaccttgtcagttgatgagaatgagcgccttcgagtttctactgatttcatggattcggttggtgatgaagacttttcagcggagactgttttgcagtcccgcaggcagccatgagaatcattagctggaatgctcgtggtttggggaaccagagagccattcgtaaacttagtttgcttgttaaagagcaaacccccactatacttttattatggaaactaaattagcttgtaactctattgctcgt

SEQ ID NO: 325251 - DNA, 920 bp, Cannabis indica
gtaagtagtgaatgtaatatgttagtgatattaatcttaaaaaaattgtatgacgctgaagatttcgtaataattatgtcattgcaaattgttcataaattattctaaaaaaatgttaaaatatcaagtaaacaccgcctaaaattgtgaaaagaaaaaaaaaggaagaaaaaaaagtgttgggagtcaaagaaaacaattgcataagaattgtagaataaaaataaaggtaatcacaacgttatagcactaaaaatacctataaaaattgttagtgacaatttgcatgtaatttaattctaaagtgcatataaaaattgcaatttgcaggtaattcttaatataaagcatttcataactctatttttctttttagtaagaagtttcattagttaatttaatataaatatattttttttttgctaaattagcagtaagattgtatttcaccaaaacaaacacatatacaacccattagcaccaatcaatggcctggagtagataaaaactatacaaaaactataaaccttttacaaagactcccaccaaactatatcctttcttttcattttatatgtggtagaatttaaaatggaactttatgtgacagtcagtagttccgtgatccgtaaggataaataccgggtaagttattcaatcccacaccgcctggaaaaggtcatgtgtgattattctgagactgtgtaggtatagaactacatagttgaagaagacttaaatggattgttttggtactacctatattaacaaagtgcatcctgttttttggtagtccatcaagaaagaactccacgtataagcgtgcttgacctggagtaatttcaggatgggtgatctcctgggaagttttctcagaaagcatgcgagtgaggacaaagtacgctaaaaatactcgtgtt

SEQ ID NO: 325252 - DNA, 1381 bp, Cannabis indica
atcttatttatctttaattgtgcaacaaaattaacaattagtaaaataataattaaatatttgttaattatcaaaacaagaagactttagagtttgagtcaacaattacaacttatttgtataggtcactagataatgacatttacatgaaagttcctaaaagattaaaaatgcctaaagcatataataaaaaaaaaacttgagaaatgcattcaattaagctagaaaggtttaaaacaatctgatcatatgtggttagtgaatatctattgaaagaaaactatataaataattcactttattaatgagtttttattaagaaatccaaattgttatcatcgcagtttatgttgatgatctgaatatgataggaactctagaagaggttatcgaggcaataacatatttgacaaatgaatttgagatgaaaaaagatttaggaaaaatcaaatttcgtcttggtttgcaaattgaacacttatcaggcgagatccttgtttatcagtaaaattatgtagaaaaaaatcttgaaacgatttaacatggatacagcccattcattgagttctccaatgttcgatcattggatattaaaaataaaattttcatcttcgagaagatcacgaagaaattcttatttcagaagtactatatcttagcttaattggtggactaatgtatcttgctagttctacaaggtctgttacagctttctctgtaaatttgttagcaagatatactgcttcacccacacgtcgacattggaatgaagttaaataaatttttgttatcttcgtggaacgactgacatggttttattttactccaaagaactcaaaatcaaaattggtgagatatactaatgttggatatttatctgatccacacaaatctcgatcacaaacatattatttatttacctatggtggtactgctgtatcttggcgctcaacaaaacaaacaatgattgtaacttcatcaaattattctgaaatagttgcactacatgaagcgagtcgagaatgtgtatagttgagatcattcattcaacatattcaagaatcatgtcatatttctaagaagaaggcttcacaattctgtacgaagataatgttgcatgtactgctcaaataaaagaaagtttcatcaaatgtgatgaaactaagcatatttcaccaaaaaaaaaaaaaaattcaactcatgagcttcagaaaaaaggggatatagatgtccattagatacgctcttgtgatgattttgcagacttgtttagaaaggctcttcttacaacaatatttgagaagttagtacataaaattgagacacgtcgactcaaagaatttcaccagttaagataaacactgcaaagaagggagataag

SEQ ID NO: 325253 - DNA, 1824 bp, Cannabis indica
ttaggcatatctgatttgcttgtagaagtataaggcatggaacctgctcggataatgcttgctaacgaactaaactcaaccggtttggctgttaaatcgttctagatggaacctaaactagtataccccgtccagctgcaaacatacttaatgtgtgttaccctattgagtgccacattaccttgtgcaaaaattatgataacatttgctcccaagtacacgtgggagcttctggtcgcatgggaacttccaaggttttcatattgcttggattagtagcacgtgttaggcttcacatgtcgtactggaggtgacatttgccttgcttgagacgagtgtatcttctttcgtctcttcaaatctcaaaatttaatacttattcaaaagttgagaaatgggttaacgtgctttgacggttgcaccctcactcatttaatgatcatactttttgtcattttgggggtgagaatccaatttcaattgcatactgagattaccctttagtgggtctataagaggaatttttaaattcattcagaactttcaacagctcttcatcttcaaagcttaaaaaaaaggaaaagttgttcttcaagctatgtgagcttcgctttccatcctgacctcttccactaagaaaattactctcggtgcaatagtgggtaagttattttttttttttttaacttcttctttatttttttgtttctttgcttacgcatgtcgtgaattactggaatatatgtgtattttgttgttgcttgctatattctagattttcttcaaatttatttttgaattagaaaagaaaaaataaattcaagaatcgtgcgccttgactcgaaaatatttggtgaggaacattcaaagaatttgtatagtacaatcaagctagaacttaaccatctcagaatttagatcatttgacctaagatcaactaagtgacattgacatagaaaatacataatgttaagtttatgatatcctgtccactgtcaatatcggctcagtccgatgtatagccgacaaatctgatactagtttaatttgctaacgtcttgaaaaggacattctacttacaaatgtaagtaaaccacattgctaattatcatatcagtataaattcagtgcactgataaatcgtgagactaaaaagtttggagcatataattatgattatttttcactatgtagacaacactacaatcatgaataattatatgttcgggatttaataaaatttatatattaaacatataattatgaaagtaatcatgtgaactgtgcaacataaaatgatttctaaattttattaattagtaaatctaattttattaaaataagctttatttagggcataaaatatcaacaaactcccacttacactaatataaaattaaaagtgctgattagtgtataaaataacatattattaactacattaggtaaataattacattatctaatttcttgagttaattgcaaatatttatttaacttaattaaagggacatttacaccctatactgttttttttttcaattttatttcaattttattgttaccttgttcttactatatttttattgtttcaattttatactaatatactgtttttttgataaaaaaaaattgtttcttttttaacacaaacgtgacagcttgtatgtttttttttattatatttgaagtttttaaaaaaagtttgatttaactttgtattatcacattcttttaatttaattttgatgataagtatatcacatcatagactaacttttattactttttattattctctctccttattcatcttattcttt

SEQ ID NO: 325254 - DNA, 1545 bp, Cannabis indica
aacataaataactgctaatttccaaattaactaagcgggctttacaacgaccctatcgtctaacagcatctaactcctaaagtcaatactagcttggcatagtttttaccataatactctcctttatcattgacttggagaggaagtatttttccttggtccattagcctggatagttcatttatcttagtagctcctcgtttaggtatctccctaggacattctgctcctgggtctgaatctgatcccgaacctttgttagccatatctacatcattaacaaacaaaatataaagttggccataacagtgtaacttcttacataaaaaattatcacaagtaatctataacaaatattaacttcataaacaaacattatcacaagtaagaaatcataagtaagttaccaattagacatgtgttcgtttcttttttttcgtttatgtttgcctgaatcataattgacccataatctctcattgatatctactgaccttgcttctagccaacgacaatgaatcaaataataagtgattaaatgatataattaaaagagaacaaaaacaataaggtaaagtgaacaccaaattttaaagtggtttggccccgtgagtgtggtaatagcctactccccttctattgtattgacttaagagaaggaacaaagtatgcttccccttgaaagctcttacaactgatctctgagtaactctcttagatcactattttctctcgaaagcatatttctgcagcaattctttcaatccctttcatagtaaggctaggtcactatttataggggcttaatgcatgagggatggtttcctttttgcttaaaatgaataaaataggaaattacaatgattacataattacaatgtataaaataggaaactagagcaggttgaaatttttctttgactcaatcccacgatcatagggattgtcctcgtgtctggacataactagattattctgaagttgttatctcttgtaagtcgctcgacacaatgggcttctaccaagtcgaatgtcttctccacaaccctgctcgaatatccagttattatagacactaacttttcaggtgtgggctgccatggacatttccctccgcccaggtataagaaatataggacacttgtcgcttgatcctatcgccacgtcaatgtgcaaaaagctggataacatttgctccccaaagtctatgtgcgaccctcctggtcccacatggacttcactcattgtggagtcttgtctagatggctgacgcgtgtcctaggcgttgaatgacgaatcgatgtgaccctgacaaagggtcttcaatttcaaatcattaatgttgattgacagttttaccttgagtcatgacttgaggtatgcgtgtgatgacggttactcagccagtaatgagtacataacatatacttttagggggaattcgaggagtttaaaatttttgaaatgattatttccttttttgaactgcttatgaataggattgaaaaccctaagtaatctttttagtcatttttattcttgaaa

SEQ ID NO: 325255 - DNA, 692 bp, Cannabis indica
atcttaattttcgctaaaataaagatcgagatatatgcgaatggaataaaatttctacgaaaatcaagataaaaggtaactttttatctcagttttcagttatttttttaaaaaaaagtaagataaaagcccactttttttgagagagagaaaaaaaaatggaaattttcattaaaaggcaaatcagatattttttatgtgatgatatatcactcaaagagcataattaataaaatatataaaccatgtcgtttataaatgaaaactctaataacaccttcaactaaaatacaaataaatcttctattcaaaaaaaaaatacaaataagtcttcaacgttgaagcattaaagatgcacaaagaatgcttgatcttcaatccgaatgaacacgtgacaaatcacaactatcaataattatcagccaaaaatctttcaatgaaaattaggaaataattattcaatttagtataaaataaaataaacgaaggaccaaccatagcgataacaatcgtaagaaacaatcgcactataaatcatggaaccaataaaaatctgagaatcccctaaatttgaacatggacaatgtccccaagagaaacaagactaaaattctcgaccatgaataaataaagttctactaccataataatagaaaggtggtgtagcaacaccattattaaaaataaaaata

SEQ ID NO: 325256 - DNA, 2024 bp, Cannabis indica
gttcattcaacttcgtagcttgatcactctattatgtaaagtacgtaactgcactactaacaaccctttcagttgcaaataacttgttattctcaactactaacatcgatttgattgcgagctatcgaagaataaagaagaaccgacaacgaaacaaaacaaaacaagattatgtcatatagacaaggttaaaacagtactcaaagccatgtcacagagacaatgtaaatacactcaaaactatgtcatagagacaaaaatacaacaaaattatatcacagagataagattaatcgcaataacaaaaataaaattgtagtaagaaaatacaatctcgaccaaaccgcacctaagtccaaaaaaaaaaaagccgacaggcctcaccagagaaaaaaagcaactcaaataactataaatttaagaaagaaaaacttatatattaatttatattattctctcttattagttgaaattagttattttatattctaaattaacattttgatcagtaaataatttttatgaattcaattataagtacttaattaagaataatttggtcaataatatataaaagtttttgactaaattgataacttgcgtgactaaacatatttttgatcactaacaaattttgtgacaattaatgagaaagaaaccaatttgatgaagacattccactttaaaaacacatattgtcttattaataattaataatgttgtcctcttataatgatgaacatggccattatatatttactttttgtccggttgacatttaaatagttacttatttttcataatatatagctataaaaagtgcatgtaattaaatacgaagaaacattatataattaattcataatatatattaatcattacatgtaattttttaattttaggtcagaattaattacatgtaaattaagctggacttcgctggttttggtatagaaccaagaaagcacgtggattaatttgtttaaatttagattaattataatacaagttaatcaataataataataataattaacagctcaaaactacttagcagatgtgtggggggcatgtgggtcatgtgcctcccaaattttttataaattaaattatattttgaatatttttaattttactctcataattaaaattaatatatatttcttttaatttacttccttttatattttcaattttgtattcataaaatttatttttgcatttacatccttacttatctttatttctataaaatatatattttttttaataatgattatattgtttagataaatatttcctcattattattttttttcacaaagaagaaatggtagagattttaataaacttgtcatttaattagtacatgatgatttcacgatataataagtgaatctaaagcaatatataaatatattggtcaaaagccacactgcgcatgcatattccaattaatatcgttgtcaaataatttagcataatgtttaaagtttacttgaaaatgataattcatgcatgcatgatcatatactataaatttgtattttttttaacagggaattggtaaaaattgttgtaaagtgatgtttggtttgataaaatgtgttactatatgcatttgaagtagtagaaagtgaattttttgaaaaattattattaatacttagactatatagacggagagaaataaaattactcatgatcaataattaaaacaactacaacagcatgttaattggaatgtcaattattatgagactattgtatgtgctcgtgatggagccaagcatagtagctgtattcttcaaagaaataggaatggtttggaagttctaccaagagtttctcaagaagaacagagtcacacaatacttatagtgttatgatctataaaacactcaagaaatatatatatacatatacatatatatattacagatttaaacatattcttaaaagtgttttaatatagaaaaccctaaatcataaaattatggaaccttcgctaaattaaagaagaa

SEQ ID NO: 325257 - DNA, 1001 bp, Cannabis indica
gttagagtagggagcctgagagggagaaggtgatgtttggcgagaaatggggcacgattctggggaaattttgggtgagggaagaagcaaaaaaaaaaggaaaaacataaaatttattaatttaattattgtttttttataatttgtaatttttttttgtaatttttaaattatttttataatatttaaataattaaaattatatagaccactaaaaaatttccacgtgtatatatgggtacaattaggttgtccacttggcacttaacacaatattttagatggaaaagtaaaaatcaaaacagaacggtaattttaaggattttaccaccaaaaattaatttgtaaaattaaatatcacaaatcatataactcgagtagttttgttgtctttaatattttaagattactattaggaaaggaaaaagaaaaaaaggcaacaagtgtcacattcacatgttaagtagtgtcacgtactaattaattatagttaaattagttttgtaacgtaaaatagtatataattgtgcaactaataataaaaaaatataaaaatattgaacttgtaacgtacaattattattgtataaattcattcttcacaattaaaatatcaaacttaagtttaacattacaaataatattgaaagtcttatcacaatataccattattattttttatcaggtatatgatttcacctttaatttctcatcacaatctgctatttttagtgatttttctttcacatttatttaaattttactgtttttgtaattttttttttctaatatgttcttatttaaaatgttaaaattattgatattatcagtggtaggctctgataaatgaggcaactaaccttacttatttttattcttattttttaacaaatatatgtgtgttaataattaattaattcgtttcaggtaaatttttacggttcattttcatataaatttttgcattaacaattttaattaataattatttgagtaatttg

SEQ ID NO: 325258 - DNA, 1397 bp, Cannabis indica
gactatctatagaggattattattcacatgatagaaataataaagaatttatagcgcatctatattatgtatagagcgttctataaaatttggagtgcaattttgagtcaatatataatagagacacgaggaattaataagttagagtcatgagaaatatattggaagcttgattttataggtccatgatcctcacattatttaaaatattatttaacagtatgttacaataattgttatttaaatcaattaaaatttacattactgtttttgtcagttttgagaatttttcactaagttgatgaaatttagatgaaagagagaataaatgtataattattaaataagatattttgttgttataatgaatagtaatatttaaaatatgttttattagaataactatttggatatgaataaatgattatataattaaaactagtttaaatataaaaaaagttaattaaatatggtaaaaatacttagctgaacgtatatttcaaattaatgtgcctatggaattgatgcctattcttacgagcgattgctcttcttaataaagcatttcattttcaaaaaaaaatatggtaaaaataaaaatatgacaagattttttattcattaggcaaaacatgcaaaagagaaatatctagcccaatactatgtgtatggggcggctagggaagctagtttcccttttgtattttctttttattttgtatttaattaatgaaagaaaataactatttacttgcatataaaaagaaggaaataagagagtgttctacacactcttctttagaattcaaaattttagaaaagattgccttttttcctatattattaaagtctctctctctctcattttcgaaccacacattggttgtaacattgcccactctattatgttacaacacctaaatctatgtggaaatccctttttccttattcaaaagttgttcttctttgttcttcaagaccttatactttttctttaaatctttttccaaagcttctatttgagcacaagaatccttataagactttttttcaacatcaagctcattcttgacaacagaagacaaagcagcttcttctcgtcgttctcgagctctacttagtgcatagcttaattccacaaccacatcaagttccttgcagcatgcttcatgctcagaagaagaacaggggatagagagaggaatacaacttttgagtggtagcaagacctaagtcgaatagagccatgaggctatgttcgacatccttctgaagttggagccacttctcattttcaacttcaagaaggcactgcacataaagatttggctttgaaagaatggaaattctaattagttcagaagtagcagatgttggaatttattttaccaggatct

SEQ ID NO: 325259 - DNA, 1124 bp, Cannabis indica
agaaaatatttcgcgtcagaggaccattaaggatgacacatctaatacatagcgaggcatcaacttcgcaatatgtagaaaggtgttgacgaggcaaactggctgttagaacacttatagtatagtatacattatacaaactaagcacaatagccaaaaggacataataacgaatggcgagacatccatctcgctataggaaggcatactactggtaccttccctaatcagctccagacatctttcaatgagctccactgctccgtcaagtcagctctttcagaaagaagctgacattcaaatgatgttggctgctgaagttcatcttggcaccaagaactgtaattttcagatggaacgttatgtcttcaacctcgaaaagacatgggaaaagctccagcttgctgcttgggttattgctgttatttaccaagcgagataccccgacgagaaatactttacagcgtgtttaaatccacgtcagcattgactgttaaaagcggttttatctacagctgtgtgatttacaaaaaataatcgtatttatttacgtggagcatgattacagcccacaatttcgagtttatattgttatgggatttgaaatcaaatgtaattaactgccaactatgttactataaatagggacaaaatgtacagaaaaagggatgaaaaatccttgagagaaaaataagaaccctagttctgtattagaaaaatctaataagattgactcgtggactatgcaaaattttaattgtaaaaccacgtaaaaaacctggtgttatttttgctttattcttctttcttttattttttattatttctgtgcaaaatcctatcacgaaaataagcttattatcattaacaaaaatctgtgttaacagtaatatattgtttatttgaataatgtaagtataatttttgtagaaatattaagttaattgtttttatgtaatcatttataatttattcattttttatatgatttaattcatttagtatatagaagaaacatataaatttcatataaaaggtaaaatggttaacttaaagcattttgattacctttccttattgatgtaaacaaattagggtaaatattattttggaccctgtatttt

SEQ ID NO: 325260 - DNA, 1079 bp, Cannabis indica
aagaaaaataaaagggttgttactcttaataaaaaaaatcttcaacttctataactctaaaagcctccaaaacagagaagaaaaagtttcatttcaagaagcagaaagaagtcataatccatcaaaatattgattgtttaaaagccttttttgaactagatgagttaacagaagaggaataaaaaatgtttcgcaatgacattgtacccacaccttccccgcaggtgtttcacaatgacaatgtacccacaccttccctgcaggtgtcgatatttgatagacttaaagcaagcacatcaatcccatgagtgtcagcatttgaaagacttcttttccaaagtgctccacaagcaaagggaactaaaagcataagaaatgggtgccaaaacaaaagaaacccttgagagttactattctttaggggtgtgaaacacaagatgaagaaaactttgctcaagtcaattacctctcttttgaagaaagtttgaccaaagaagatgaagactcaagctcaaacacttcaaaagattacatagacattgtccaacctgcacctcaagaattcgaagaaggaggacaagcaccaatggattatttaatagggatcaaccttgggaccaaggacaatccaaagcctgtgtttgtcaatactttattaaatgaagaagagttaccacaatataaacaagtccttcatgaaaacaacgatgtatttgcttgggggtatcaagacatgttgagattggatccaaaggttgccgtacacaggttggcagtatcgaaagatgctattgctagtttatttgggaagttaagtatcccttttggctcacaaacattgtcattgtgatgaagaaaaatgggcaactctaaatatgcatggattactgagatcttaatcgatcttgcccaaaagacaaattcccactccccatcactgagttgttggtagatgctaccactggtttcgaggccttttcattgatggatgggctttttgggtacaactaaatcaaaatggcacccgaggacgaagagctcactgctttttgaacaccaaaaggcatattttgttatac

SEQ ID NO: 325261 - DNA, 2041 bp, Cannabis indica
aaacgaaaaggggtttcagccatgttgactttgcctcgaagatataagaaccgatcagtggacagaggtttggttagagaatcagcaacttgatcaattgctggaacatatctgacagatatctctttggccatgatttgatctctgatgaagtggagatctatttcgatgtgcttactccgagctggaaaactgggttggctgcaagagcagctgcgccttggttatcaacccaaataactggtgagaaggctggtttaatatgtaattcagacaataagttgaccagccatttgatttcagcagaggtgttagcaagacttcgaaattcactttcagtactagaccgagcaacaacattttgcttctttgcagaccaggaaactagattgcccccaagaaacaccacataaccccctgttgatcttctatcatcaatacaactagcccaatcggcatcggagtaagcactaatttccatagaagctgctggtctgagtaggagaccgagagaaagagtgcccttgagataccgaagaaggcgcttgcatgcttcccaatgattaacagttggggcatgaataaactgacttagtttatttatgataaacgcaacatcgggccgtgtcaatgtgagatattgaagagcaccaagtgtgcttctataaagagttatgtcctgaaaaggttccccatcagccaaaaataatttttgagttgaacttgttggactggggcagcttttggcaccatcaagctgaagtcgaacaagcaggtcagtcacatatttagattgagagagatacatgcctgcagcatctctaaaaaatctcaatgccaaagaaaatagtgtaaaagggccgagatctttcaaggcaaaggaggtatttagatcagcaattagtttggagatgagacaagaaatcaggtccagtaacgaggatgtcatcaacatacactaagagaataatcagactagcaccagatccataaacaaagagagatgtgtctgattttgaagcatgaaaaccccactgaaacaaagtgtacatgagtcggtttggtgggatcctcaaagcctcttggttgtctcatatacacagtttatgcaaaatctccatttaaaaaagcattgcaaacatccaattgtcgaacatcccatgctgaagtgacagctagagtgagaacagttcgaacggtaaccggtttaaccacagggctaaaggtgtcttcataatcaataccaggtgtttgtaaaaaatccttttgcaacaagtctggatttgtaagtgttgagagagccatctgcattaagtttaatccgatacacccatttattatcaataacatgcatatgagactcataaggtacaagagtccaagtatgagatcgaatcaaggcagtattttctttttgcattgattgaaaccatttggggtctttaagagcttgctgaacagtccttggttcagtaggaacaagagattcaggcaaaggatgtctagtagataagtaggccttaggtttgtagattccactttgagaccttgttttcatttgatgaactcgagatatcatgctggagtcatgtgtaggtggctgctgtgttaatggttgctggtgggaagttgggagctgctggttatgaggttcaggctgttggtttgaaggttcaggaggctgagaggaataatcgggctgctggtttgttgataaaggttgctggtttgtgggttgaggtggctggattggagatggaggttgagggtgagtggtatttagaggtgcttggttgggcaggttgtgagaaggaacagcagcattaccaaacaattgattagaattagaagtaacagtaggaaaattaaaaacagcagcaggtaaaggtatggaagattgtacctgagagtgagaggagacttcaaaagcaggaaaatggctttcatgaaacaccacatttcttgcaatatagagtcggccattagaattttcacacaagtaccctttgtgatgagaagagtaaccaagaaaaatgcattg

SEQ ID NO: 325262 - DNA, 583 bp, Cannabis indica
tagtgagttctgttctgaacactatacaatgatacctaaaacaaaaaaaaaaatgttaatgattataatcccttattaagcaatcaattcaaagtagacccatcttattgttacaagagaactatattaataatttttattttgtgtcttatttgatgaatgcgatgcagtctcttattcacctaactcacttctgtggtatctgaaagacaaagcccgtgtttgaaattgatgaaaccactttataaacctttctttttcgtgctataattgttgatgttaatgttttcactacaatatatatatagtgatcggataaaattttgactattttacatcttcatggttctttggatcatctctaacataaatactaaaaatgtggtgtactattattttttcaaatattttattaattttaatagtaatttattagaaatttttacatgaaaaatccattttacacaatttattacaaaattactcacacacgcctatgactacatttttacttacaaagttgcttttattacacaaataccacttagtcatcattccatccatcatcaatcaaatcatactc

SEQ ID NO: 325263 - DNA, 1368 bp, Cannabis indica
gatcattaagttgatttttgaattatatcctaacttacctccctagaaattcaatttgcatattaatgattagttactagtcgttgcctaagtccttctatggtaatacaatttcagaatgatgcaatggttgggtacttagtgtactacaaaaatattatttaacaacatttaattaaaaagtgttgctaacttatttatttttataattagacacacaaaaatataaaacgttgctaaaaatattatattttaaaaacaattatattttaaactaaataataattattaatagcaacacttttaaaaaagtgttttgattgatgaagataaaaaataaaagacaacactttctatataaatgttaccacatataataaagatttaaactgatttttaattagtggagtgtaacctccttctaataatgcgtacttacaaagatgagctacctaaaataaaaaagcaaaactgcaatttgctttctttaaaccaccattgatattaagaaatgttccaaagaaattatatagtttctaaactttatacttattttttatatatgtttggtattaattaatatacagattttcgtactttaaaattttacaatttcttattgaagttctacattaattaaaataatttcttggtgttttcaggtaataacttatacattcaacatcgaaattcttcatcaaatttacgtatggattacactttggctccattaggtaatttttatttttctttatgcaaacaacccatttgagttgcttatttttttttattatttattttttcttttctttcatcaatcatgaatcaccactctataaatgtgtgtttatacatgaacacaaaattatataagataattataattgaattacatgattctgggtattgagtcaatttgcaaacttggttccttattaattattcatttcctatgtagcaaatttatggtaattgttctggaaattatttgttcatttgctgaatagattttttatagtaattattagtaatttttatatatgaaatgacagtaaggtgttcacaataattaattctaatgattgtaatttttatttttgtttaattaacttgtagatttctcaaaataaacaatacgagatgcatagatggatcatccagcaactatttatcattggaaggagatgaacaaagtgctcagatttttatagcatttaaaagagtacttaatgaaatcttagagaaatagatattaaatttgtatttagtgtttctcttttctctgttaactttttatttagttgttacgttattattattttttttttattaaaactttcaatgtaacgtaatattatgtatttttac

SEQ ID NO: 325264 - DNA, 892 bp, Cannabis indica
ttttaatttaaacgaaaatattatatatttaggtgtccataaaaatcattataacttatcattttacataaaaatattgaatgaaatacaatttaatataatactatacaatacaatacgatgtaatacggcgtagcaaacgagcccgagtgactaacacatgggaatagacacagaaatgaacaattgcctgttggatttcttaaaggattatacataattgtccaatcagcccaaataaattctatgagtactcacatccagtgaaccattattctactctattttacattactaaaattttatttgtttttatcataccattacattacaccttctattagattttctatttttttttctataatatttaaacattataatttaaaaaaaaaatagaaaaaaaaagagtacataagaaagaacgagtagataaaaattaattaaatatatttcttctctaatgtagttaagctacattagattgaggttaaaaaaaattagagaagtaaatatgttataaaattattttttatacaaaatataacacaaattttataataatcttctcataaatgggaaacccacaaaactggtgtgcaagcaagcaaaaagaacaactttcaaacatgcctcataaaactacatcctgactagcaagaggaaattatggggacattagatttagagcgtacactagagtggaaaaaagtagattttcaataggaaactaaggtctagtttgggaaaaataattatagttgtgctgtgaggaaaaataattgtaattgagttgtggaaaacaccttgtagtatttagtaaattattatttttaaaggggaaatttgatattatatgcttaaaattaatttatccactaaaaatatgcta

SEQ ID NO: 325265 - DNA, 1001 bp, Cannabis indica
aaaaaagtacaatataaaatttattttttatatttttataaaataaaaattatgtcaaaattagtgattgacatgacatcttgtccatgacaatacctaaattaataatatatgttgttttgttattttgtcatttttttttcttttttttttttataaatttaacctttttttgtgtctaaagataaatttaatttttgttgtcaaaggtaatttctagcatagttgtcaattttattttaataataataggatatgtttttcacgtggcagcctttgcaacattgtagctgcagacccacttacgtaaatgagtttgaatgttgttccccagttgagtgtgcctttcacgcgctctctttgtccatttttttgtgtaatcttatttctttacagtatttttgtaaatatcaaactttaaaaataatatttttgtaaatattagatagtataaatgtttattttttctaggagtagtataaatgtgtattttaggtaatcttagcttaaaatagaaaaaaccccctttatgttgtataataaatttgtattttattgctttgtttatttattttattgatatgattatttattttacttattatttggtatgattattattgttacatagaccaaatcttatgtacatttataaacatgttttatttatctaattagtagcaatgcgtcaattcttagtacttcaaataattattatcttatttatatatagcttaaaaattaattatttaaaattcgttacaaatttttacaaaattttacgatgcactcttatttattttggtatttaggagtatttttagactttaatttttttttttttaataatcgtgtacattttatttatttaagatgttttataaaattttgaaaaaaagtattaatacgttgaacataagattcaaaaagtttattgcatgcatgcatgtctttttttttttttttttaattgtgtgaaatagattgtttgaacattgttt

SEQ ID NO: 325266 - DNA, 755 bp, Cannabis indica
aatccctcaatttatgtattctaaatatttaatatatgttcttaccaattatagacattgtaagaaaaagagaaaccttccctcatgcatttagccctataaatagtgatccattctcactataaaaggggtcaaaagaattgatgcagagagatctaagagaaaacacttagagatttcattgtgagagctttgagagaggaaacgctgtattctttgttctcaagtcaatacaatccaatgggagtaggctattactgaactaaaggggtcaaacctcttttaaatcttgtgttctttattgtatactgattcttactctatcttaattacattccttatcgcttattaattaagtcataatcgttggttaaaagcgaggtcaacattttggtgttttcattgagagcaaaacttcaagtttgctctttgccttaagttttattagacacacaaaatggtggctcaaactcgcagaggcgtggttggtcagagtgacccactatgaatagatcttgcattgcagactcctaggaatgcaagggtcccaccaggtaccaatcttgaacaactaaacacacagccacctactgtgagccaaggtgtgacatcccctctggttgggatcacacccggtgtgcaagagactggaaacaccagttcggcagtcgattagagcactcccagcactgaaatcccattcacaactaatgctcagacgaaaataggagatgatactgagattcaaaaacctc

SEQ ID NO: 325267 - DNA, 1253 bp, Cannabis indica
atcttctctaagaactttaacgagtgaatcaaagaaactaataacatgaacatgagttcatgattattcaggatataggtcgatctactattgactatcgttatgatatgaaataagtctttatagtaaatagtaagtttgataaagataattttatacatatcggtccttgttatatataatctctcttatatacatcattttcacttaaatgtcattctacatcaataattcgaaccgagatattacttgcatcggtcaaccctacttgctgactattttattcataactaagtgatcttaattctctatagaggtacaagtcatagcctcatatatgaataaagattttttcaatatttatatataaattattcaatattaaacattaataatttaacattcatacatatatcaaaatgttcaactcttatttaataattataaatatctttacagacttttcatagcataaaccttaatacgattttgctcattccatcaaattaagccatttaatatttgcccaaactatcacgcaaaagaaaaccaaaatacaagagtaaaggtaagagataagcaaatgtcgagcaaccctcttaatcaattccaccataccattaattaaaacctcttaaaacttaatatataatacacatttcgaaccctaagggtttattgagccaataaagtctagttaattgcaaactataatttaatgagccaattataattaaaagtgttctcatgttcttctaacataattagtagttattaaccatcacattatagttattaatatttttaggcgcatgattgtggttataaaattatgtctacaattatattaatttacaataataattttaacaaaaatttcccacaaaacattactagaatagcaagaataatacaatcaaaagaatcaatttaccctacataataagacttcacaaatatgtcaatttatggaattattaaaattgattgaaggcccctaagttacattcatcaattttaataactccataagaattgtagttgcactgtaattacaaaatattaacacttttaagattcgcttagtatagtgattattatattgcattgtataattttttattagattgtattgtgttcgtattattttatatagaactatgtttgatattgacttgtactaatagattgtgtaaaattataaatcttctataataaactcgaccccaaccccgaccacgacctaggacttg

SEQ ID NO: 325268 - DNA, 598 bp, Cannabis indica
aggcaacaaaagattaagtttattggtttttattgttaattcagattttgtggggtcttttggtttatttttagaataaattgacttgattggattttttttatcccttttcgtggagcacaagggtaagaagagttttgttttgtttttattttattttctgttttgtgagttttttttttttttaatgaaatgtcaatttcattaaattaactttatgagtataaaatgtctagcatagaaactggagcattagacacaaaaataagacgactagagagggaccgtgacatcctagcaacagcatgtgctaggcggtttgctgatcgtttaacaaaatagattttaacaaaaggcaaagaaagcataagtgaaatacaatcttgaaccaaattcccaaaaacagagaagagaggtgagcggctccgtatggcttggatcgaaactaagctgtctgactccaactcaacattttgcctcttatttcttttaattactcttatttctcttaacttcccacacttctctttcctgtataataccctcacctaagtgttggaaattattttaccaggattttagatctactcacaagtat

SEQ ID NO: 325269 - DNA, 1241 bp, Cannabis indica
aaactaccgaaaatcaaggatgaattttgggtcgatttccgtatgaacgacttcttgaattttgttcgaatgtggatgcttgggtcatccttttgagcgatgtcttgctttcatggagagaatggatagaggcaacgatgatgactttcaatatggaccttggatgaaaggttcaaaactcccaacaaatagttatgacagatatcgcaccgacttttctaaggccaatgcctggccgttcctcacacgattggcaagaaacacccttacttcatcactggccaatccgccttcccgtgtccctccacagccaagaattctctatcatggagaatcttcacgaaccattcctgcacaacattcacaccacggccagaccaacattcacacccctgaccacatcctgcaatctttagcaaataccagtctccaatctccttcccctggttctcaccaacctgctatctttacccctccacaaattgcactaaatactggccatttatcttcatctcatcacattcctcaatctgctcagcctggctcttgtgtcactaataacttacccacctctgatgctctcaaccacatgaatcaccttcctcaaaacacatcacctcatgtcttcaacaccaaatctactgccactactaccacttctactaatactattatacactctgttaccgacctttcaaatgtctatatgcatgacattgactatgtatcatccaaccctcttgtgccaagtaatgtttttgctacttacccgccatctcacaacactcccttaacaactcagactaaacctcaacttcatacaccaataccacatgcacctatctaccattctgtcaacatttgtgcaactgctgctatggatcaagaaaatatttccccaaatgtcattcttaaacgaccaagtgaatccatgtcagtgaggaaatgcttaaacggagtcgtgttttaaatggtgcctcaacatctttttcggaggctgctgatcttgtgactgatgtctgtgaccacggattctacaaccactatctcttcttcagcggaggttgctatgcagccccgccaatcaccatgaaaatcataagttggaatgctcggggtttgggcaacccgaatgcattcagacatctatgattgcttattcaacaacagtcgccccatgtcttatttctcatggaaacaaagcttaatccaaattcgcttactcgttttcgtaatagtct

SEQ ID NO: 325270 - DNA, 1346 bp, Cannabis indica
atttttgaaaaaatttccgtgtgacagtatttttgtaaaagctaacccaaattctagtatttttgtaagtttcccaaaaataattgttggacactaatttacagtgtataaatgatataaagtgaatgtgagaagtttggaatcattttgaattatttagcaaaatgctgaaaaataaagtaattggttactagttaccaatttgtccaattttagaatgtatttttgaacgatttgtgaaagttgtgcacagttctaacatctcctataactctcaaattaattatttaagtccatagatgatcaatttaacattggtaacagtaaaatatctatgtaatcattcatgttgaaacaggaatgaaaattctataaataaagaacatatttataagatacttgttgaaaccatagttgtgtggttagaaccttgtgaggttcttagatattaggctgaatatatgaattttgaaaaatccttagaaatatttttggagtttctctaaatttctgtaacaccctatcctaatagggaacattacaagattaacttaaaatatattcctagataagcaaggccttaagattcaaaaagtgtaatttaaaatttcaaacatactttaaacaatcgtttcttgctaaaacgttctaactattacactttagttgcaaactaaaagactggtgatcccaaaacaggttaataaaatatttacaatagttttgtactcaaaactcgacttagtcgacaaaataacacttttatcataacagttttcctagttcaaccccataggtcaagtaggccaaacatgaacaaatcccaccacaagcctcaaactcattgagtgttagctttagactttcttttaccaacatcaagcaacaattgtgagctaaggcttagtaagaaaagtatgctaaacattctaaatttaactagcaacactaataacaagaaatgaacatagacttactattcttaattaactttattcatataatatgccccagccaaccaaaatgcttaacaacttattcatataatatggcatggttaagaggttattacgaaagagaaaagaacacatttcattaatctgaattgagtgaatgaattaacagaaagagtgtatgataatattgacaatatataggacacagccacaaccgacttaacactaaaacagaaagttagttaagaaactaactgatatgcccgaaacagaacaagaaagaaagaatagatatctacaatattaacagaataaactgtagtaactaactaactaccaaagactaataaacaaatcctaataccccccctcaagatggagcgtatatat

SEQ ID NO: 325271 - DNA, 1466 bp, Cannabis indica
ttatatacttaattattagttttaaagtcatatatatggtgttgtactttagtggaatgtgatatttttaatttatctttttaattttattgaactttgaaactaaaaaaaaaaagtttggccagtttattagatttttttttttttttttaaattgggcgagttgcactcgaattttagcaacctaaactttaaattgaatttgaaaaaatataggataaaccgtccaaaccgaccgatctacaaccctagtaataatacatgttacacttatgaaacatccatgttacgcaaccttaaatgtcatataaatgttcacttgtcactctttaatgaataaaaattagttaatttttattctttaagaatcagttaaaatattttagaataataataaaaagaacaaatcaaaatcacttccatagacaaaatataaatataaatgttgtgaaattatatgtgcaagtgtatataatcacaaaaataataaaataataaattgagatcgtctctatcaggactacaaataaaatttagtgtaaaatcaactatcaacaatataaaatttaaaaagagtaattgattagattaataatgaaaattatttaatttaaagtttgtccaaaattaattaaaaattaattttcacttttaatttaattttcaatatttaaatttcaaaaattatatataaatatataaaattcgaaaaaaaataaatgaaaatataataaaataaatatttgaaaattatccaatttagttgttctaaaataaaaaaatttccaacttaaactattttcaaaaaaaaaaaaaaacttaattaaataacaaattaagtgatttgaactaaccacttaatttgaaaaatattccattttaagttgatctaaattaacaaattttcagcttaaaataatatttaaagaatctttcaataactaatttcctagaatctctcagcttaattatgaatttcaaaaaatattcaaaattcaagttaattcaaaaattagttataaatagctaaattttcaacttaaaaaatatttaatgaaaaatacaagaaaaatatttagttataagcatctagaagaatctaattagttataattttttatttaattaaatataagaaaaatacatagtttatcttgaaaaagtttcatttaaactaagtgtgtttttcttaaattaattttaaaatgttcaaatgaaaaattaatttcatatattttgaaattattatgttgctaatcaattttattaggttaaactggtttaattgacctagtatagtcattcaaatgaggcaaatgggccttcgcaattgggattgttcatgtgagggagggctggattcagtatgtcgtacccacttctatggcgccctaactctcacacaatgcccaaaggagaggaatttaaccttaaatggacaactgttattaattgaataggccgaa

SEQ ID NO: 325272 - DNA, 510 bp, Cannabis indica
caaaatgagaaccaaaagttgtcataaaatgtacaaggtgtggaaaagttggacacaatcgtagaacgtacaataatccacaactttacaaatttttgaaacagaataaaaaaataaggagtcaaagaagaagcatcgattaaatttgagaactctagtactttttcaataagatacttacaatatcatttttacatttctgaactatgatctggttaaataaactttgctttaaagattttttcataatttcatttattttagtaattaaattcaattcagttagttttatgaagataaagatacatgaaaaacatgaaaaacatttaatcttacataataagaaaccaattattgataaaacaagaagaaaataaaattcaaaactaatttacctagaaatataaataaatacactgaccattgaatatatcatcacaaattgttatttttaggggtgagcataaaatctgaaaaactgaaaaaaaaaaccattcaaaccgacctacc

SEQ ID NO: 325273 - DNA, 511 bp, Cannabis indica
tgtcaaagttcggaggaaaaaattagtaattagtcttttttttttgaaggggtgggtgcatagcatccatgttcatgacttgaggtatcaactttcaaatttatttgccatggatatttaacaatctatctcgagatttattaatatttaattataaggtactgatcattaatgtttcataaataattaattcaacattttcaaactaataattttgaattagatatcatttgtttgtgggctctattttatagcaccattgatatgtaatatttatattaagaaattagactgatttattttagattagattttctggtaacaattattagatttgaaataaatcattaacaactcatattttcttttgtatagaaaaaaatcaatattttcataactctatatctattctatataaagtgtgcctatataactaaaattcttggtttatgagaaattcatgggtgactttttatttttatttaataaaataataaaatattattttgta

SEQ ID NO: 325274 - DNA, 1020 bp, Cannabis indica
taatgataataatttctttttaattgagatttctctattgagccaggtcatttcgggtcaagcaaccctagagtactctagaaaagtgtgcttaccacagtagtttgttgctgagaaaagagtgatcaactgtccctgagcaaaccgttcaaatccatccatgacacattcatgggcccttataattagctgtagtttgtttttcttacagaactctgtgacacgatctggctgcaagtagcatacataacagtagaactttcagtttgtaggagggaaacactttgtaaccgatataataatactagaacataaagatgaagtgaagacttatgaagaaataggatcaaggaaaattccaatgggcataaaattccatggtagatatagaatgatatatttaatctatgcataatatcatgaaaaatgaatacaatgtcgggatgttacactgatacttagcatcagctacagatctgcagaaaatctaaatatatcaaatttagatattgtatcctgtcgtaataaggaatcatggcatttaatctctaaatatattccatttgggaattgaaattcactatttctatacatcgtcttctttaaacaaagactctgttccttcccttccacttctgggatggtaaatttttctcagaagatctatgttttcatactgctgatcactatgttactaaagccagtggtttatggtatcctttaaactgaagtcatatttgttctatatccacaaaaagaaaatgttgcacacaaacaataatatggatttatttttgttacagtaagattgtgaatacaagaatatattccatttgggaattgaaattcactatttctttagacaaagactctgttccttgcactctgttaatgtaaatattgaccagaagacctaagttttatactgctgatcactatgtttaaatccagagacgtttctagtaccctttttaccgaattcatatttgttctatatctacaataaaaagaaaaaaaaaa

SEQ ID NO: 325275 - DNA, 1120 bp, Cannabis indica
tgattaaacataaacaacagctaatttccaaattaactaagcgggctttacactggtgctatttatatagaagagagcttacataatatatctaagccaaagtaggttgatatcccttaaaatgagaagatatcacctcttttttacatattaaatatataaataataacttaataattattcctaaggaataggtaaatatctgaagttgaacccctacttttgtgagttgttagagtaaattcgtgtagttgagagtaaaccattgtctgtccaggatcaaagctgtaaagacaccaattgtgtctgctaggaatgaagctgatcggcctaccatttgatggaggctagccggcccatgcttcactatagcaggccaggggtgctccggccaaaccctcctggttggccattttattgtccctttgtcttgcttgattatttggactcttcgtcaactggtatgttttgcatggtgacttggtcatcttactgacaagctgtactccatgtggcatcaatcttgcgtatgtggacatgccacgtccgtgagcaaaaattagaataacaacatgcatactacacaacacacttggcacaatactgttatattatttataataatataatatatagattaaatatgtgtaataaactaataatatgtaacatatgacagtatatatatatatattttttttttgaaggaatatgacaatatatattagttgtcatctttttgtaacatttgtggagttgttactatgagtaacctccaccattatcaccaacattaagaatgtaaaaagatgttacacatcttaatttgaaattcttaatgctataggagttatggtatgtgtaagagttacatttgagtccataacatctatgggggttataagttataattttaaatggtgatatcctaaacactatataaagaggtctaagttgctcattttgaagatcaatttttctatcaagaaagtactttgctagaaaatcctaaaaggcttgataattcccaaagctaattccagaagagttcccttagtgcttagagataggggaaataagcttttggacaaatgtgtaataccttgttcaagtcatggtg

SEQ ID NO: 325276 - DNA, 594 bp, Cannabis indica
agagggtcaccctgacgaagaccacaagacggggttattttccctacctgacccccatttaggcagatgtttaaagtggtggtagataagcactgcgatatccaattgcggaatctgacaggggtcccacagcactccaaaacatgatcaataaaacgccaactcagcctatcatacgccttgacaagatcaatcttgatcgcaaaccaaccttccttgcctttcttacggccaaaggaatgaataacctcttgagcaataacgttgttatcatgaatgtttcttcctggaacaaacgcagcttgagtaggacaaatgaatgagtgtaacaaaggtttgattctatttgccaggaccttggaaataaccttatacacaacattgcagagagagatgggtctaaaatgactagttctctttggattaggaaccttcgggatgagaacaatatttgtcgcattaaaacctctatgcatctttccagttataagaaatctgacaccgcctcacaaaatcagcgccgacagagtcccaataatgttatagaacagaactgacattccatcaggcccaggagccttatgcttatccatg

SEQ ID NO: 325277 - DNA, 717 bp, Cannabis indica
ttaagataataacttttagaaaatatcgctaaagaatcgtgaggttccacagtgtttggaaccattggtcaccattggtgcctaataacattcttctttaaagagaaatcctaataggcaccaatagtgtctaacatcttcctatatgtcaataccgctatcggttcaaactaattatcgagtttcatataatttaatgtaataatttttaaagagtattgctaacaaattgcaaaacgacatatctaaaaatattagacaccactaatgtccaataacaaaaacaaaactattaacaatgcacttcttttaaatatataatataagctagagagtgcttgttgggttgttaaatataggtaggtacgaaaataggtggtacaaattgtttttatgaaactagtggtataggatttaactaattttgatatttgagggggtaaaagctggatggaatggtttcagtagtgtgcgtttcttttggtgctactctcctccaattaaagctcagtactgccctacactcactcactgactactttgatgtgaatcagtaatggtaatgattaacttgaaacgactctgattgattatatatttgtttctaaatttacctcatttctaattattttctaactatacataccactgtaacatgttgtaaaatagagatttcttttcaaaatatgaaaaaaaaaaagaagtatgctatagttt

SEQ ID NO: 325278 - DNA, 1762 bp, Cannabis indica
actgagactcgaacttgagcccgaactcgggactcaatcccggacctaaaccatgcccctgacctaaaaagggatttgaaccagcacatggacacgaacccagacccagactcgaatagcgacggagacgtagattgggatcgaaacacgggagctagaggtagaccaagacgtagacctagacccgaacctaggacccagactcagaccttgacctagatcatgatccaaaaaacccgtacctaaactcggaccctgactctaacttggacccggaaccaaagccggacccagatctaagaccagaactgaacccaaacaataacccaaactcagaccagaacttggaccgagaacttgactaggactgggacccgaacctggaccaggatctggaccgagacctggacctaacctagtcctaaaccctcgctacgacctgacacttgagacccgcgacccagaccatgatccaaaccttgacaaggacccaaacctgaaccctgaccaagactaggaccgagaccttgacccgaacccggatcgggacctagactaaaaccaagactcgagacccgaacctgaacctggacatagatcaggttctaggaaccaaacttggatggggaacctagacaaagcacctacgcccatgaacctagacccaaatctagatcttggactcaaacccgaacctggacctgacctgcactcgggaattcgaagttggacctagacccgaacccgaaacctaccccagacccaaactaggacagcaatctacacacgaacccataccaggacaaaactcgaactcggacccgaacccaaaatcaaacccgaacccaggacccgaactcagacttagacacagaatcaagcccaaacctagaccttcactcggacccgaactcgaaccttgaccgggattggaacccagaacttagactcagaactaaacaagaactcagatcgagatcaaaacctgggactcggacccaaacctgaaccgagacccaggaccctaacccacacccggagaccgatctagacatagaccgagatccagaaacgcacccaaacacagaccaggactaaaaccccgacccaaactcggaccccgacccgaactcgaacccaaactcgaacttagaattgccactagaactggaatcggactaagactaggactaggaccacagcaaggtcccatacgggaacccaaaacccaaaacaaaaacccattccgagacccaaacttgaaccgcaactaggacccgaacccgaacctagacaaggatccaaaccaagattagaactaggacattgagacagaattgggatacggacctgagcaacggacttgaacctaggatccaactcgtgactcgacccccaaaatggaaccagtccaagacccgagatcaggatctggactttgacctggggcttggactgaacccgtagcgggtgtctcgatctgagacccagccctagacccgaaccaagaccaggacccgaacccaaacccaaacctgaacccagtcccagacaaaaaccttgaccaaaacccgtagcctgtgactcaaaattggaaccgaaatcgaaagtagacagggacccgggaacgggaccagaacaagcacttggacctggacctagaatcgtaaccggatctagacctagacccaaaaccgtaaccagactagtacccggactccaaccaagacctagacccgaaccgggacccgaacttggactc

SEQ ID NO: 325279 - DNA, 525 bp, Cannabis indica
aatcctcgttatttgtattgactcaaaacaaggagaaaggttccgtttcttatagctcttacaatagtatatctgaatgtgaattcttagacaaaatctctcaactagaatgttttcgagtctttgcccagtgaatatgcatcactatttatagggctatgagcttggagaggaagtatttcccttctcgttacaattgatataagcagaaagattgcgtagtaaatacagaatacactgatcctgggatttcgacagctttccatatgtctgtaatttaatctcaagttatagggttttccttgatgactcacggtgcaaaagttaaattcgctaagtgtttgtcgttctgggcaggctgcttattgctttgtcttgagcaagcatatgaggcatcttgttcggcctgtatcttccgagtagatacccggagttgattccgcgtgtcaccatcgtgtgatgccacgtcagagtgccgaaattgagataataaataatatactatagacaacaaaaaatcacata

SEQ ID NO: 325280 - DNA, 792 bp, Cannabis indica
atgagcccttgttactcggatggttggaaggctgaccttggcttagagaagtcaaggtgccgcatgggtgaaccgctgcttgaaaaagtgagcccgtgacacccatcattgccactctagcaacatgaggatcatatggtggtgcactacaacacgactacttagttctggctatatatatcactatgagtccagaaatcacccagaaggtggcaatgggacagactggatgttatctctcaaaagtaagagtgactagacctatgatacagcgactgtcacctccctagatctcaacaatcgaaatcacctacatagaagagacaaagggaggtgagcaacccaaaaaagctacaagatacagacaaaattctggccaatcttacccaagggtacttgctagataaattacattgtacgaggctaagtatcagtaaagtactatctcaagtatatctacttagacaaatgatgagtcctaagtttgtgcacttaactataatggactcattatcatgtcttatacaaagttcccaaggaaaccacgtataagattacagttatacatgcctacaaggtcgtcactaaccccttgcagaggtcaaaagaggataaaaaattaaccacccacttagaaccttagccttggccagccaaggttcccaagctaagagagggtcggccaggtcccatgacctagccaagggccgcccagggtccctatgcccaggcataggccaaccaacttttggggtatccccctatggctggccagtgttgggttttatgccc

SEQ ID NO: 325281 - DNA, 2867 bp, Cannabis indica
atccacgaatgagagttgcacattaaaatcttgtgaggccaaaggctagccggccatgtacctataggttgcaggctgactagccatacaatgcctacaggttgagttatggctgaccatgctcctgccagggttttgcagaccatgtgcctgccggcctacaggctgcagatcaagtggttgctagcctttgtaggtgatggccaaccttggtgatagccagccttcggtatggccagccttggtaggtggaggccaacctttgtacactttttccttgtagaggtcaagcttccttggtcgatcagacccttcctcagtataaaagttaccttttggctggccagcttgtgctcaaaccctagccgaccatacaagctcatcctgactggcctgtacaatcctcttggccacagacatggtggtacaactccttgacagatcacttaactcttttcgctttttgattgacaattttgccataccttataaggagactttgtattgctattggtaaggttgtgctctggatgtcctttttcttagcttacgttggtatgccacatcaagtagaaaaaacttgggataacattttccccccaaatcctggtttgaacatctggtcggatagggactttccagctctcgtcttgcttgtagtagcctctattgagcagctttgtctagccaactgttagctttttgcatggcatgttcttaaatcattaatcttctctctccatatatgcttcatcttctcttcttcaacatctcttctttgaacctactattgataagttttaagcttttagaaaccttttgattctcacgttagattgtaatcttttttgtattttgatccacatgatagtattagaacgtataatctgtgactttatgatggaaaaagattcaattttggcctttgttatgattcttgactctttgagtcataagaacacaaggcacacattcaagttttgaaaaaaaaaaaacacacatttagattcaaaactaacccttgcttgcgctaggggtcttgcttgagacttggctggccgtacgatttaatcatgggagttggctagctttagggtgtcaccctaggaagcttagccggttcatgcctgggtttggtgacccttgctagtttttggctgagtaatgggaccctggttgaccctcttaaagcttgggaacccttgctgacctaggctttgagtccatgagggtggccagctttctgtcctcttttgacttcggtaagtatcctggcatggccctgtaggcatatacaaccttagtcttatgcgggttttccttagaaactatgtatgacacttaatggtgagtctattatagtctgatgctcaacttaatactcaacatttgccaagtagtttcacttgagacttgtactttgttgatacctacccttgtacaatgacataatttggcaagtacccttgggtactgttgcccagtgttttgtctatcgcttggaacctgcatggaactctgacttttggcttgggacctgccaagaactctgccttaccttagcccgttacgtggttcctataggaactttgtttagttcttctctagttttattgttcttacagagccttggccttatgcatttgaaccaaaattttattcactttcatcctttaggctttcatgttcttgcttttggcctatatgtactctattttagaatactattattgtttagccttaaagccttttactgatcgtccaagctatcttctaattgccttgacatgttagtatcaagatttacttttctttatctcaagctgaagtatggttccagttgacttagagggaggtttactagcttattttaagcgttaaaattactctacataagttttctatcctagtttgatgcattgtacagtgtgggtgtccccaaagtgtgaacgcagacttacgatctcttggtcacttacaattcacaaagtttcgtagaccttgctttgggggtgctaccgtgtggaactaaaaaagaataactttaagaagttatctttgttaacaaggagtttagacacaattggtcttacatgtaacaaaagcttacaacttagtgttcacttttgaaatcatgttttggctacccttgcgcggcttactgcacaatggccatcactgaaaagtaatgggaggccatgctgaaaagcgatgggtactagctcatttatatttggctacctctatagggcttaccgtgtgaaggccatcactaaagagtggtgggaggccatcactgagtaccgatgggtactagctcttttatggattcatagacgatgaaatgttagacaaaccactatacaagttggctagtaagaggacttacccgagatgttctctattccatatttcggtaaaagagccaaatccaagttcttgttgtactaacaaggcttgtatgcacatttattgtcatcttgtaatgcaatgttaacccttttcagttggctccaagcatgcttaatgcagtatccttgttgtcaaggaatattctttaggaagtaagtctcttacaaagaatttctttcctcgatctgtttgttgaagggcctactaactctttgtgggcagaaatgccactttgagtttgcttggtctcttcttgttccctttcgtcaagggatccttgaacatctttgttataagatgttggtcagttgctcttacttctttagccaaaagggcattaccttttagcaatataggcctacatctatcaagaaacttgcatgttcctagtcgaatggatacatcttgatctgattataacctgaataggcatccataatgttggaaattatttt

SEQ ID NO: 325282 - DNA, 743 bp, Cannabis indica
actttaatatgcaaccaaacaaggaattattagattgtttccttgcctttccatttcatttcattacctccaaccaaaccccacctaagttttttcttctctctctcgcctctctctcattctctttggttaaatctgccagagcttccaacctcctccagctacctccccctctcttctctttcttcctctctctctccacctagacacacagtaactagcgcctctccatatttttccttctttcctctctgatggtctagacacatagagcgcctccccctttctctctacccaaatgcacaaccaacgcctccccttctctcaacccagacgcaaggccaaatctcggtcatggtggtcgaatctgaccacaaaattaagcaccccaccctatgaaaatccaagatctaacttttggaacttctctctttcactcagtcactcactcatctttccctctctacattaaacaagagactggcgttaatggcgcagggtttagacgaagaagaaagaagaccaaaaaaaaaagagagaaaaataattttttaaaataattttgttctttgatttttaaaattttaaaagatttttaattattttttataatttttaaatggctaattaggatttttgtccccgaaactttgacatgtaccaattcatgcccatgaacttttaaggtcgttaaaaataccccctgaactattaagattattggatttaaggactttttttaa

SEQ ID NO: 325283 - DNA, 1050 bp, Cannabis indica
taccaaatataagaacagtacagtataatctagttcaacacaatattatacaatacaacacagtagtacaatatgatctgaaagtatcatatctcttaaatttgacttaaacgatctaaaactgtcaacacaatcgatacttacaactcgtaacagtgatattgaactactaccggtgtctaatagcaattccttttaatatttgatgagttgtgtttggtttggtttgatttgtaaggtgaagaagttatagcacatggaagatgtatacataagaatctacaactacaaatgaacgtgttaggtttgttcaaaaagtggggactttctatacaattttgattaggactttctttagtttctttgtgataacagcacatgttatggggtccctctcttttttatttgttttttatatataaaaaaaagattttttttttttttggaaggagaatttttattattattattatttttttttttgtaaaaagaatttttattatttgaagtgatggtttagatacttaacaagccaaagaaaactaaagactcaaatcactcaaattataaaactatataatatagttagtgataatgacatttgagatttaatggtgtataattaatttatataataaaacagatattaattttcttgagctgtctttatcatcaaatatataaaaattgtagtggttgtaaatcatttttatgggttggtataaaacttaactaaaaagataataataaaaaaaagagaatatatatcatttaatttaatagtcattatctcagttaggaacaaattatttggattattgaggtgttttattttttgtgataatacagctagcatattaatgtgagccaattatgccactcaaggctccatatatggataactcatcacagtcaaataaagttgtacttttttttttttttaaaaaaagtaatatatttatagattaaattgttgtaaattaagatttaatatagggtaaataccattttggacactgtgtttcgcaaaagttacagattggaccctgt

SEQ ID NO: 325284 - DNA, 1281 bp, Cannabis indica
aagctatgaatttacagttgaaaatgtgtacaaaggctctacttgaatcaaaaagttgaacaaacaaaaatcaaacttacacaattcaagtgaccaagagtcatatgtcttatcgattacctgggggaaaactatacccgtacaaagcataggtaaataacaagctcagaaaaacttaaggaaaaatattcattctaaaagataacaaagcacgaaacattcaggattaaaggctgcatggtaagcttgttgtcttaaaatgaagtgaagtattaccaagtttaaaggccgcttggtcgaccacattgtaatgaaaaaaggcccatgggccgagctaaaataagagagaaaaaagtggagaaaaggaaatttcacacggctggagtctctggctctttgtactcgtcggtttgttcatcactgaatatccttagaaagttcctcaactcgcttgttggcagccaagagttgtttattcacctcgccctacttcacactcttgtcctcggcctccttcttggcgttctccacctccctcttaatgttggtggtggtttttatagtctttaaggtcgaagactttgcttgggagtaggtgtaggccatctttaagtggagctgcatgaagaaaaggtaaaatatgcacttgtaaaagaatgagaaaaaaaccaaaggaagagtacttactcggttcgcctccttcactagcccacccataagcagctccatggagatgtcatgtcctccaaccaactgatcgtttaccttaaggagtaaccggtcatgatagaattagagcatctccttacccttcttagttttagggttcagcgtaacaggagtggatgaaggcttgagcagtctgaacccatccatacttccccctttgacgctctgagatggggtggccaccacctgagactttgagttcttcttggccagtaggtctacctcagacactgcttcctcagaaacctcggtcggagaaatagccagactcttctccttgagggtgctcgagactatgtcctttggtggaacttcatccacctttgaccatttggccagagatatttggctggagccatcacccgaacactttttcaaagcgcacatcaccttctaagacatagctgcacgtgactacaacaagacggtaaaaacaagtacagtctaagtaaatgcaagtaaaatttgaatgcaagttaaagtaccccacacataggcaggagcattttcccaaacgagtaaagaaggggatgttgggattttatgccctaa

SEQ ID NO: 325285 - DNA, 1247 bp, Cannabis indica
aaatatatataaatattatttaataaaaaaaaaacatataccgtggtctacagtgcacggcatatatgccgtgcactgtaacattaacctcaaaatgctgtattgaatggtgcctccttggaacaaaaaggaacgacatttatataaaatgtcacttctttggagaagctcttaacgtgtacattatatttattaaaaaaatcataagaagtttaaaaaaatttaacatgtcgaaaacatatttcaaattgtttgattaaattattttttagatactaaaataaatagggattcattatctattttaaacggacctttaatatttaaatatttgaaaagaatttaggccacaagtatttaataataggaaaaaggttacacacaatttgaacatcattgtgtctaataaatgtgtgtaatttgaatgtgtatctactcttaagacatgtttactaataagtaagagaaaaataagatataaattcccttatatttgtgataacttgattaaataagggataaaataaaaggagtttccccacaaattttctaagagactttttggaatgagttaatgctagtaaagaaatagtaatgtaaaatattattatttttaggctttattcttagaatattattcatataactaccattgaggagagaaatgttgatatcttaaaaaagatgagtttgaattatttcctaccattatattaatttaagagaaaaatgcaataaaaatacttaggtggcgtttggttactaagtgaaaatggaatgggaatgggaatgggaataggaataagaatagaatggaatgaaatttttattcttttgtttggtaaagactatggaatcaacaacggaataagaattatcatgtttggtattgtatggaatggaatagaacttttattattttgactaaattaccctttactcttcaaaaattatatttattttattaaattaccattattttataaattgaacaaataaataatattcttagcaaaaaaatatatttatcatgtgatggaaatgtgcacattctcaaacttaattattaaaaaataaaataataaaattacatataaatattaaataattagtaatatgatggtaacatccaaaaaagtgagaagtggaggaggattgatagggaaaatagacttttgttagtatggaattagctttcaagtgattttagtgtggaaaagtaaatccttagtttaggtgaattgtaa

SEQ ID NO: 325286 - DNA, 556 bp, Cannabis indica
tagagtacaaatagaattatttaaaaacaaaaatcatagaatcataaaaatacccgtaagttaaggtgcgattgcagaagcattcttctaaaagatcactccattggtctcccacattgcctcaaattaggaatactacatgtcatttacattaagaagagagaagaagaagttttgcaatttgaatatagagagaggataatagttggttgactctttcttaccttacatatgctttatattaggtttctaattagggattcatttcttggttgggctgatctaatctctttgggcctaattgttggttcattatgtgagtttttctcacttcttgttgggccaaatcattgtgagtgaaagaagagtttgagataagttgaaaactacccatttttattacatattaactaaatataattctaaaataattttaattgataaatactctcttttataatccaaataccaaatataatctcacataacttattaaaattagagtttctaatatacataatgggaatatgatttataaaaatgggtataaattaaa

SEQ ID NO: 325287 - DNA, 753 bp, Cannabis indica
tggtggaaagagcattccattggaatgtcattgcaatactttaaaatgcaaccaaacaaagacatagaatgaaaattatttcattttcattccattccatttcattacctccaaccaaacgccaccttaattcgtgtatttgacgtgagttaaattaagtacatttcattttgttaaatattgatttataagcttctcaaatcctttgactattattgtgcttcttttcaatctttcttcttttctcttttataatgacaatgcaatgcatatgattaatggatatcatttcgtaaaatgcattaattgcgtaagaaataggaaattttaggcaaagctattaacacatttgtgaatgcaaacacgcaagcattagctggaattttgtccatacaaagatgtcacttgtttcataaataataatgaagacaaaaatgtctggtaacaagaaatcatcctattcttctaattgtacccttaagaaagattaaaggacaataaatactaccatcgatcttgaggtttttaatgcaatctttttattttcattttttaaataagtactagatctttattaaacgttttgaattctgttacggatggactaacaaattaaagagagctaaaatatctagccatgtatttgttaaagaaatggaattctccttacgatttcttatctttttagtctaatgagcttattgttctttcatataaataaataaataaataaaggctaattaataatttttt

SEQ ID NO: 325288 - DNA, 1020 bp, Cannabis indica
aatagaatagaatatttttgagtaattggttgattttttcaaactgattaatatgtacctaaaacaaaattatattaattggaaaagaagtttcatcacttaaaagttttcaatgataagtgatccaatccaaatgtatgattctcgtgtggatttcatttatttattatgtttgtttattaataaaataaaagtctttgattacaaatcttcaaattgataatagacaattgtacgatgactttaaggtttttttaaagcaaagaaaaggaattttattcacaaccaatcaccaaaccatacaagaactagctgacagcagcaaaagctcaaaaaaggctgattaaagaaacttcatcaccctccctttttctaaatctgccaaaattcacacccttaactttaactcttaacacattttaattaggaataatcatctaatccattataacatttttcttttcattcgatctaatttaattagtaatcagattcaaaaaattattatccaattcaattcaattacctcaaaatctaatccaatttaattcaattattaattagatttgatcaattttttaattagatatctaaatacctaaattttaatattaactaaaaataagaaaaaaaaatataaattaaatattactctttatataaatttaatactctataaatatatagtcgttataagtagaatgcaactaaaagtttgaaataattaaaacaataacattgctaagtaataaaatagaacaaaatatcatgaaaataaatatacaaaacaattaagcgttacaaatttaacacagaaaaaatctaataaaaatagaattaatatatattattttttttattatataagttatcttttaatatataaatataattagattggatcgatctttaattaaattttgagattgacattcagtaaccaatctaattggttgaagttcaagtcgaaagttcacaatctctttctatgggcgaggaggcggcccttatcaagccccc

SEQ ID NO: 325289 - DNA, 1581 bp, Cannabis indica
aactgttttgtaagttatggatcacaaacataagagcactcttaacagtttctctattctatcctttaaaatacatcaccgaaactttactgtttctactttacaacacacttttacataacaccatatatcaacttctttaaaatacatcaccaaaattctaccttttttaaattttattatattttattcgcttcaaatctattaaattaatacacatatctccataaaaaaataattattaaaacttaaaataattaataaaatatgtttagagcaatgaatataaatgtaaaccgtgaatagtaaattttaaaggaactttaaaaagaaaagtaaatttagagcatctactgtagtgtatttttagtacgattcattaaattttttaaagtttctcaagtttagagaagttgttttgagtgctcgaaatgtgtaatttaagtgagtaaattgtatatatattatgaaaattaaatgctatagaattataactgttgaaagagcataaatactcataaatatcagatatgatctatcaaaatattaagaattaatgtagctcgaagaggagttacaaaactcaaaattgagttttctcgaaattgttgttttatgattgataacttgttttatggttgttttaatcacatggagccagttttagaataacgtccatgaatgtgcatagatttattgagcacgtttccagctttcttcccaaatttttatcctattaaacatctattaaagtgctgggaacaaccatgaggtgaagagaatttgactttctaaagttaccctcaaacactacaaatagaagtctaaagtgcttattttgtgacaatcaattttctatcaacgagcacttgctagaaaatacaaggactgataattcccaaaattatttcctgagagttcatttagtgcttagatatagggagaaataagcttttagacaaatgtataaaatattgttcaagtcatagtgatccccaagaatctacactcaagattgtgagttagtgtttttatacatattcttctttttctacaattcttatatatatatataaatatatatagtgtaatatatattgttgtaatatttatttaatttatttatttgcccttgtattatattataataaagttataatatcttgattttcttctattgacatataaaatttctaacaatcaaaagcttattcattttcaatggaagaggagctaaatcaagattttgagaatacaagaataagaatttttttgtgaaaatcattattgattttgtgtttaatatatatatgtatatgtgacatatatatatcatattaatatatatagtagtatataatatggtatttgaattttatatcatgttattatttgtatatatgtgagatatataatatatagcatgtatatatgagtaatatattatatatatgggtgcactcttaatgggtattacccatgaatgtattttgagttttcatgataaattattctatttaattagaaaaatttctcatttttacattatatgggctgtgattggttcatcagctgaaaaaa

SEQ ID NO: 325290 - DNA, 1074 bp, Cannabis indica
taattaaaaatacattaattttttttttaacgaaatcatgcaatttagttttttttatgaaacacaaccaaaccatgcagtaatgagcgatttagattaaccgagccaccaaaaacggtcttactgtttatgattgtggttcaaatttaaatgtgatttgccggtttagatgacactactacaaatctaagttttagaggcaatttttaaggcctcttagcgttagttttggcaaaagttgctatcgacgctgatcaaggcaatcttataggatctaacataatcgacaccgtagtgtacactatgacatcgattttttaaaaataactgatgtcatatgtatactataaaaattgattaatagtatataattgacgccatagtgtatataaaatcaacaacaaatgctaaaaaaccgatgccatatcattcaaaattaatttagttttctaatttaagacctattattaattcaaaagtctaatttatttaaattatacatttatgaatttaaaataaatattatttgaatgaaattaaatatttatttttctgaaagctaaattaaatattattaaataaatttcatgactagccaatatacttaaattaatcgtatagaagctaaaaaaattacaattatattagaaaaatattttaaaatgttaacaagttaatatatctaattaaacatctgaaaaatacaagttaatctaaaaaagtaagctagagtagaaaaattcttagacatttcagcatatagtccaagtttttgtgaatcaccgccagcaatcgttctatccattgtcgatgtaacggtaacaattcaatttttgcatcgtatatcttctttctcccaaactataaagagaagtaaatatttatattagtatatatatttattattattatttgttaatataataaataagataattaaaaattaaaattatagttttttgatcgttaaacggttggggtttgcacgtgcgatgaaatccctcttgtatttcattacataaaaatcacattcttagtttttaggttgtcttggacaattttctagtgaaattc

SEQ ID NO: 325291 - DNA, 501 bp, Cannabis indica
aaggtgcaaaatcgggttggtcagtttaattgggcgggttggacctattttcaaccctcccaattaacagactgggcagtttgtaattttttcgggttatttcagtttgtaatttttatcggttttttcagttcggtttgggtgggttattcggtttgggcggtttacaatttttttttgtacaaccctagtgcatggactcttaatatttcacactacaaaaaaaatttcaaaatatatctcaaatttactttaactcccaaaatacccatctcattcaaactttcacctaactctcaatcacataaatctctcccactccctctcactctaatctagggctggacatccggtctaatctaacattttttttcctgagctgatccaattcaattagtaattggatttgaaaaacatcatccgatccaatccaagctactttcttttcttgtgcggcgtcggagctaccaatggaccaggagaccacaaaattggaatccc

SEQ ID NO: 325292 - DNA, 792 bp, Cannabis indica
aaattaataaaaaattaatatataatgatgagtgaaattaaggaatgcaacttctccataaaataataaatagcaaatgtctttttgtaatagattgattagtgggggttatatgtattttcaaaatacctattatttaaactttggtaattgattataaatttatatatattaaaaaaataaaatattaaggagcggctagataaatatatttaaagtgataataaaaaatttaaaaaaaaaataaaaaaagaagtacataaatgtatttaaagcgtcatatcaccgtcttatatgtcagctatatatatttttaaaatatctattatttaagctttggtaattaattataaatttaatatataaaaaaatagaaaatattaaggaaagagtagataaatatatttagagtaataactaaaattaaaaaagtagtggagccactactatgtctatgaccacaagtgttgtaaactattaagattctaattgtaatggtaagaatattataatttgttatttatattttgttgttatttttatataattaattattattatttttgatacatcacttaattttttttttttaaatttaatatattttatttatttcaaacatataatattaatatttatatatattcccatataaaataaaattaaaatcctaaacaattaataaaatatgtttagaataatattctataaatgtagaccatgaatgttgaatttcaaagaaaggaaaacttacaaaaatactggaatttgggataagttttacaaaaatac

SEQ ID NO: 325293 - DNA, 1478 bp, Cannabis indica
ggcccggtgtgagtcatgatttctgaaacatggacacaataagtatgaccaaacaagtttataaatacatgtttttaataatcattttcaaattttatatcttaattcacttttctaaaattatatgttttgaattaatataattcacttatttttgacgtgattttaggcaaataattataatatttatgtaattgaggagaagtactacaaacaaacaaattttacatagttcggctaaaatttatccaatgtgcgtatgagagaagttctggttgagaatttttttttttaccaaagttacgtacaaccttgttctctctatcacttcgtgtgcatttattaatcaataataattaattcactcgatcgacacaaaaaaatatattttaccataaaataaaaaacctaacacatgaaacgaaattatattacataacatattttacagatcaaacacatggttattaattaaatattgatctgtacgtagtacatatattataaattaattttataatagccagcttgcattacgtactttttttggtaggtggcaaaatacatggctaattaatattactattgcaacaaattattaaagaagagaaagagaaagtatttatttcagaacttgatttaattgatgatgagtttgtttcaaatcagtatctgtgaaagctatattgaaacaaaaggacttcacactatagtatctatatgggatatatagtaattgaaaatgagatatgaataataaaaaacactcccatttgcttgggaaaaataaaaaaacccaactcctttcctcaaacaaatatgaacaagacaagagagggtaatttggttttttgttctggaccacaaaaaccctaatttaaattaattaatattatatcatgctagggaatcgtttgtttttaacttaattatcaaattttaattcatttttttgtcgtacatataaatgtgtaaagatacgcgcatgtgtattcctcttatatctttttagctatatagtcctttttctttctttcctttttgctaacaaaaaagaaaaaagctataaacaaaaaatcgcaactaattccagcaataaagcaaacaaaacagattagagacaattacaattgcagcaatgaatgcttacttactagttgctatcaaacttttttgaaccacacacacatagatatattatcacatgcatatatatatatgtatatataaatatctacacatataaactatagatattctacaatgcgcacttctctaaatagagttaattgatgcacttcttactgtaaaaaatcttatttttatagttataacaaaatttgtaactaaaagtaaaataattaattataactaattataaatcatcattcttatattgtgactaaaatgtttgtggctaaaagtattatttatagaaattataatttactgtgattaaatgttttttaatcacaata

SEQ ID NO: 325294 - DNA, 1059 bp, Cannabis indica
taatccaattcaatataatacaatacaatacgacttaatacaacgttccaaacgaactacataatatatacaatcattaatgttctagatatcgaaataaataaaaaattacaaaaccacacctttaatgataaattttcaataataaatacttatatttttatttatccatctatatttataatcaccaaccatgaatcattgtgattacacaatcatgtacaaaaatttacttattatttttattttattttttagagagagaaagtgagggagagagagagtgaattttacttgtaaatgttaggtaatctttattattattattatgaaaaagtagaatattcttttggtgagagttgttgattttaaacatgatgacaaacaattgacaaaattccagtaagaaagtcgacccagctgttcttcctttattattttcaagcttagtattattatttattatttaagaaataaaaaatataatacataagacagcttcttttataaattaataaataaagttaaaaaaaaaaggaacaaaacaaaagaatatgatgggcaataataatataaagataaaaaagaaagcaagagattctcttttactatgtaactttttcattctcaaaaggacccaacaagatcaactattaattaatccaaaaaataatatttaaaaacaaataaaaaaattaggaaatttatgttgtacacccatctaaagggtttctagtaaactcctttggtgcagaaaagttttttaatataattttttttatacaattatttagaatcacttgtaaatttttaaaaaattaaatagtttataatgttaaaataaaatttaaataattacttatgatcacatgtacaagaaaaaataaccacacgtataataaaatatgtaaatatatataatcttaaataatcataatatataattattaaaaaaaatataaattaaaatattctcctaaatatcaaaacagataaatgttagacttttatttgggcttacattaagttttatggttttattaaaacttgggttgattg

SEQ ID NO: 325295 - DNA, 725 bp, Cannabis indica
atatttttgtcaattaaatatgccaaaaatggaattaacaatgacaaccttctttctttttttggattaactgaatggcttgtaaacaatctgattctatgctaaatcgatggtatttatgttgtattccaacctgtaatcccaataaaatagcttgcaactctagctgaagtggatccagctctctatcaacgacagtagcagaggcataatgaacccgccccccttgatctcggacaacacatccaaggcccgatacccctcctccacccttaactccgacatccacattcaccttcatatgtccaaattcaggtgccgcccacttcacacagtcccgccgagcccgactctcacgatcaactccctccccctgaaattcagtcagataagacctacaccaatcaaccatgtccccagctataggagccatccctccatgagccaccgtgttccgtacattccaaacattccaagtaactactagaaaaaatgcaaacctggatttgtcccactgccgagccattctcatcagaaaagaaagcaaatcctcacccataattcgctccatatcatccatcaacccgctcaccgcccaaatttccttactacgtttgcactcccatagcgcatgagctgccgtctctaccacatgcccaaaacaccgcacacaaatgttatccacagccactccccctttaaccaaattagcatttgttgggatc

SEQ ID NO: 325296 - DNA, 1621 bp, Cannabis indica
ataatttaatatataatataattattttataatatatagcataaaaatattattttcatatatatttttttaattttgtaagtataatttacgtgcggagcacgtattattttactagtatgataataatacaaggactaaaaggactaaaagattaattaaatagatgttacaattcttttttttttaaaaaaaaatagatgttacaacatacacttcgtatatatttatatttatataagaaaggtagaagataaaattacaatacaagagatgaagataattttcactcataatcttgagtgtagaataataaggatcactatgacttgaataaggtgtaacatatttatccaaaaacttattttttttatatctttaagcactaagagaactctagaaaatagtttggagtactatcaagccttaaaaatttttctagtaaaatgttctttttgatagaaaagattacacaaatgaacacattagacctctttttatagtgttttatacacaaatgagcacataattaatgagtgtaaaacggattaataatgaaaatttggtgtttacatacaatagatagaactgttccccaatattcaaagaacgtttctgaatttttcaccttcaggcgacatgttgcctgactctaggcgacatatgtcgcttgtacatatttctatacttaaaatttgtgttttataactcccttggagccaaatcatcccacaatcccaaacgttttccatctcatttttatcaaataaatgagtataatccaattttcaaccgttatattatcatagctttgaatctcataatcaattttgtgtaattcttttttattatactaaaatgtaatcaactaaaaaattacaaaagtaattaacttataactattctccacattacaaagtgtagactacaatttataagttaaataaatcatatattacataatttatttactaaatatatcatattatttacataataatatatatattcagggccggcctaagtattggacagcttgggccattgcacaatgcacccatttttttaagactctaatttttttttttttaagcaaaggctttttttttcttaatatatatacataaataaaaaaattaaaattaaaaatttatgaacgaatcttaaaaaaaaaaaaactagtgatagaattgtagttttaatgtacacggtttttttgtaaagagcacaactttaaaattttgtacaaggcctccaaaatacttgagccgaccctgtatatattatcacatttaaatttatatttttattattaaataatataataatttcctattaaattaatatatgtgacacttttataatacatttgtaatatttatttaatcaattattttttaaagcctcaattaaaaattatgttaaatatatcacattgcattaatttttatgctaaatattaatacaatatttacacatatattcaattaattagaaatgtgttagatgtgaggatgtaatatattatgaatgtagcatgtgctattattgggtgactattcaatagttacatttttattgtaaccatatggttatatttttctttgacttataatagcag

SEQ ID NO: 325297 - DNA, 744 bp, Cannabis indica
aaaaaaaaaaaaaaacagatatttaaagaagaataaataatacacaaataattatttttttgaactactcaaatctgataagaactaaaaaaacttaccttatgatcggtgggccagtcaggatagatggtcggtcggagaaccagacgaggcggggttagtcggattgctttgtaatttattttttcacagagagaaataataaaaaggtggaagatgaagagtgagaaagagatgtgaaggggggttgtcgattagggttttaattgaaaaacttgccgaacttttaggggctacaatgtcgcccctaaaagttgcctctaatactgtgggggggaaaaaattccacctatttttcaacgaaaaatttcaatactttaggagcgataaatgtcccttctaatactaaactacaaagtctcgtctaaaggttttagcccaatatcacccctaaaactctctaaaaacagaaaaagaaatctcatcgttttagtggcgacaaccttattatgtcgcctttattatatcccttctttagagacaacaacttatcgtcctaaaaataaaaattattaaagtgttgtctcttctgaaaaacataacaaggattaaaatacctaaatattaagagaaatgctaaagggcaccagtggtgcctagcactctcctatgtccaactaagtatcgggtcctacatagtttaatataatagcttttaggaagtatcgctagcgaatcgcaacg

SEQ ID NO: 325298 - DNA, 2586 bp, Cannabis indica
aacctattaataattaatatatttttttaaaacaaaataattaaagatataaaataataaatattgaatatgattggatggacattggatgatattggattggatcggtttgattatccattggatcggatgtctcaccaaacatccaatccgatccaattggatttttaaaatttgcatccgatccgatccgatccaattatggttggatatctaattttattggatcggttgggattggatcgatcggttgcgattggatcagatgactttctgcacacccctaatgcacacccaaacactttcaggtaatctagattaaaaacttgacatgtccacatttattgtagagttttgaatccaattgaagcagatgtgcttctattgactaagtagcagaatgttgtaacaacttcttcccagaattttctttctaaaccaacacccttttacatacatctaattcttttcaattagagttctgttcatcctctctgctaaaaaattatgttgaggagtccttggagctgatttgtgtcttccaatcacagcttctttgcagtagtttaagaattttttagagcgaaattccaaatcattgtatgtcctcagtttcttaactttctttccagattgattctctaccaaatgtttccaatccttgaaagtcttgaaagcttcatctttggttttgagcaagtgcacccataccttccttgagtaatcatctacaatgctcaaaaaatagttttctcctcccaagcttgacacctttgagggacccaagagatctaaatgtatgtaccctagtggttcttggtggtgtgtttgtcagtattgaatttctacctacaacattttccataaacacattcttcacagaaatttagctcaccaccaagtttacctttaagaattccttatctttctaactctaacaagccctttggctcacatgaccaagccttaggtgacatagtttagttttatcaagttcttgattggatgaaacaatattgacacaactagttactgtttcaccaatcaagatgtagagaccattcatgaattcccctttcataaccattttagagtctttcaataccttaagaggcttatcatcaatttcaaccttacaacccctctcagttaatacactaatagataataagtttcttttgagatttggaacataccttacattttgaatctttcttttgactccatcatgcaatttaagcatgattgaaccagtttcgtgaatttgacaggcattgttatcacccaagaacactattccacctttgctttcttcaagatcattgaacagctcttcgctgaggcacatatgaaatgaacctcctaaaatatgaacccacgcatgacttgaatctacatttgaggccactaaaacatctgcagactcatagccatttgttacaacaccagcttctccttttctctgtatttttgttatctctcttgagtttggcttttaaagctaaaaaatcatatcgaaaatgatcctccttcttacagtaaaaacacttcttgtttgtaattcctcttaattcatcttttgactttaatttctagctctcctttaggttcccttctggttcttgatatctttcttttgtgaatttcctctagcaaacaaaccttcaccattatcaccttgattttctttattcagggatacttttacttcagatattgtatggggtttctttaccatagagcattgtatcaataaaagtgctcataggatcttggcaagaaacttagcattataatagcttgatcttcttcttctaatttcatcctaattaatgtttctgagattgagagtgattttgttgaatttatctaagtggttcctcaagtcttttccctcatccattctaagagtatacatcctcttcttcaagtatagcttattagccaaggacttcttcatgtatatggaactgagtttgttccataatcctagagccttgtcttcactagaaacttaattagaacttcatctcctaagctgaataaaattacactgtgtgccttagtttcaatcatcttcaacttcttcttgtcatctccaatctccttaatgccctcttcataaattgcttctgagatttcattgtgaacaagcaatgccttcatcttgatcctccatagcccaaaattgtttgtcccattgaacttatcaatctcaaatcttgcagcaaacatcttcttgatgattcttaaagtcttcgaattttaatcttgattgaactaatcccttgctctgataccacttgttgcgatcgaacctcactccttaacaatcaagatcagaagctcacaagagctatgaacaagaacaattacaacaacaaaaaactcagcttaagagattgaataattctgtaacgtccccgcttcaagcctccattgggtcctcatacccacggaatgaatggctctcatacacgagtacgtcactctgactgcttcatggactgacgactgaccctacagaccaacacgagtgtttccaacgtgctttgtcctcactcgcacgcttcttaggaaaacttc

SEQ ID NO: 325299 - DNA, 1023 bp, Cannabis indica
aaatcatgtgggcctatgagcagcaacgagatgcggttatggagcgcacattcaagaagataactccgcgagttgttcccaagttctcacaatttccacaatagattcttgatccatggacaacttcatcagcatcgaatttggatattccccacgaggactccgagtagagggagtttcctaatccataagctattttatattttctgttgtatgctatttttagtttatgatgtgctatttttgttttatcttttgtgtccaaagtctgttgtgtcatgttttctatgtgtatattaatgtgtcaatgagagacttgatgattttctatggcctagtgttctgcttgatgatgatactttccaatcattacatgcatgttgttgcctagttcaatatgttgcctttgtgtgttcgattgctggatatgatggatgtttccttttagtctcttctcaatagggttgtacttgggttttctaccatgttttgagtttttcaaatgaaagctacattcatttggttagcatcaagaattggttagtgcttttcttgaggcaaaatcctagttagacttgttccttagacatgatttaggccatcttcggatgtttgagcctttgtaaccttccctatatgaatattttctccttaggcacccaatttttgagccgcttagcctattttgctgttcaacccgatcatacatatcacatcattcataccatacatttaccacacatgtcctaacttaattgctctcacttgtcaagagtcaagtttcacattaagtttggggtgagtgcggtgagtgtagcttgtgaggagctaattcaagattataattttagccacattggggacaatgttgggttgtaagtctggggtgggggaattaggtcacaagtcatacatttacatgttatcaagtacattttcttgctaaatgtcatataaatttattattatctctcatgtttgagtatgtttgttcaaaaaatatatatatctaaaacaaagaaa

SEQ ID NO: 325300 - DNA, 654 bp, Cannabis indica
aacttttccttacccaaaacttaacttacgactctctacaaatctcctattctatattacccttatctgtttttatatatatatatatatatagattccttttctgtctatatataaaactgtgatatatagaatatagaatagtaatggagaataaaagggtgatgattttgatgatggtgatgatattattaataactacatttgggtgcggaaaagctgaattacattacgttggaggaggaaagagtaattgggctcccaacatcaacttctcccattggtcttctcaacagacctttcacttgggtgattggctatgtaagttttctttatttttttcttgcaatatattattatatataatatataaaacaacgtttcattttggctttgattgattccaaaaaaaaaaagtgaaagatgtcgtgaatggatttgaaaaagttctttggctcataaaaaataacagttcagatcagactatcgatggaggatatagttctaattaatccatacaggttgaggtttctgaaatttctatattttttttaattttttttttctaacaattatttttcttcttttagcaatatccttatatattatatataaataataggtatatttttgttaaaaaaaaaataataataa

SEQ ID NO: 325301 - DNA, 1596 bp, Cannabis indica
tataataattatatcatttaatgaaaaaaaaaaatggctcattaaaatatagaattaatagagtatattcataactcgctgactatatagtcttaggcgagacaagtataaaaaactattaatgtctatactgacgagacaccatcatgccttggaagacgcagatccaaggacaagattcgttttaaaaagataaatgaagttatttgaagtattcatgaacaatatgtagcaagacatccacctcgctattcacaagacatattgacgagatgaattaattgttatatacttagcgtattttatacattataataactaagtgtaacaacttggaaatatgtagcacatgattgtccatgctacgagaccttatggtcaaagagcagttcttaagtttgctcagtacactggtgctcataccattgctggaaggcatatgattgtccaaagtcagcattaatcatctacaggcaaagcgagatgctgttatccaaatcagcataaaccgtctttaaggataagaataataagcagttatacggttatcaattgttatccacatgtgtttaaatgaaacgtggtcaatttccacgtttcatgaagcggttatgtaattcgaatttaaatgtaaataattgtcaacctatattcttataaataggacacattccacagaaaaatggatggaaaaatctgtgagacaaatactatcagttgtatattgtattaaaatattcaaaaatatcttgaataagatagactcgtggagtatgtagatttaactacaaaaccacgtaaaatatctggtgtttttattatatttattatactttattaatctttataattcctgtattagatttattacgaaaaaagctcattattggtgaacaaaaatctacgttaacaatagggtacatccttcatgtcttttgtctcttttttattgttaggacattgttcctttaacaaaatgaattgtcctcctaaaggaacggatgtactttttgcatctttcatgttaaagttttgaataattttcttgatgtacccagactgcttcaagctaatagtgaacccttctttccggtttcgtgagacttcaataccaagtatctatttaactcgaccaagctctttcatctcaaattctatctttagcttggctttaatacttttgatcattgattcatctttgctcatgataagcatatcatccacatagagcaataagaatatgactgaagattgctccagattcttagaatataggcagtgatcgtatacagatcgtttgaacttgatttgatgcgtgtacgtatcaaatctcttattccattaccttagggactattttaaaccatacaaatatctattaagcttgctcactaattcaaatcctctcccttccacgtgaaacccaggtggttacttcatgtagatctcttcatccaagaatccattcagagaagcagttttgacatcaacctgttcaacttcaaactccagatgtcctgctaaggacaacatcaaccttatcatcttttattttgccacaggtgagaagatttcagtatagtctataccttccac

SEQ ID NO: 325302 - DNA, 512 bp, Cannabis indica
tcttaggaacagttgtctaaagatttcaaaaaacaatttcaggtagcaagagatagtcgaactgaagcgtgttccctcactaacgtaaagtagcagcttggcgagtcactcaaggcatacttgagtcgatttagtacaaccactgccatagttagaaacttgaacgactgtatacagcttacttctctttaaacagggattacaactgatctctcgataactggaggcgagctgtgggatgacatacagggtcgccctgtaaaaagcatcactgaatttaatgaaagagcttaggtgtttgtacgaaaagaggaagtaaggaacgagatgaaattgataaagactggctcaggaaataaactcaaaactgtcttggcaagcaccgtctcaacgaaggctgacaatccaagagtctctagcactacgagaaaagatgactataaggaatcagccaaagataagacaaaatagaagaaacacgataagtacgtgccaatctacactatttatac

SEQ ID NO: 325303 - DNA, 572 bp, Cannabis indica
tagacaagaatgtcagaaggacgtcgttgaacaaacgaaatatatttatccttgcgatacgtgcactaccatgtcctcacataggagataggatctgattttgtaggtccaagtgtcaaagagtagtcacgactcacgtcacactataagggcttctggatgtacctcttgggcttcttgtccaaatatgatttgttgattgtccgaaggatgttgttcgctctatcttttgtaaggctagactggcttccgggagtaggatgatctcgtctccctaattgtagctccgaaaatacaaagtgaaaattacatgaaatatgggattttgtaaaaagttacaaaaatatggcatttataggtttgccactcttctatggcattttttcacatttaagattttctatggtatttgatatgccatagttttgtaaacctattatccaaacccatatttcatgtttttgtttctaacttaattagttttattttttttaatttattttactattttactattttagggtttctttctattttggaaaatttactaccaaattactaacttttttttt

SEQ ID NO: 325304 - DNA, 634 bp, Cannabis indica
agagagagagagagcttgagtatattgctctttgtacttgttaccataatctctctcagtcttggtcgccttcttctcacgagcaacaactttatctagagactcatttactctttgcttgataatgaactccatctttagcattaacatctgctagagcttgggtagcctcgtatcttctttgttcagcattggtgcattttgacttcagtagctcaagttcacaggccaacttgttgaccaaagagcagctcctctccgccactaggctaacttgtaaaaagagttatgaatgaatcagacaaataaaacaggcatatcttttgtcttaggcaatttgagtgaaaattaacatacaatgttgacttgagtcctcatagtatctaccatgtagacggggtctccactcgccatcattgcaaacctatcagcaccaagcttacaactgatagttgtacttgttaattccatttttggcatatttaattgacaaaaatattttattattcattgtatattttcggctggtatacattaatatggtttcctatttggtgtattcaaacttgaaaggaaagttgtctagctttcctatttttggaaaaaaggtaaaaatggtaagtttggttaccca

SEQ ID NO: 325305 - DNA, 577 bp, Cannabis indica
attaagtatttatgccacaatttgcccataaaataatgtaacaattacttcccatggtttgttagagtgactttaaaagctaaggtggaatagatgagggcgtaaggtggtgggcattgcctttaatggatccatcatctatcgaatatataaatataatcatccatattgcaattacaaatttacaataaaacaaatacatcatggccagcccgtccctattcctatttggtagatggtactcatatctaatcataggaagagggtttgtggagaatataacacatacatgtacgtacatatatattttttgaaaataattataaatttataattatatatgtgcacacataaattatataaaattaacacacatttaagtaactagtcacacctttgtatttttcttgaacattattactctttattttatagtgtaaatatttgcaaaaaatattgattgaatattctgttttattaaatcaaattcttattttttttaagaaaaaaaagaataaaattgtaccatgaatttaattttgtcaaatttgtaaagtctttttttggcaagttagtt

SEQ ID NO: 325306 - DNA, 1194 bp, Cannabis indica
tctgtgtatgttgattttgagaggtttgactgatgattactgaacagtaatttcagatctatattttgagggttaattagtttttaattgtattgatggactcttgaatcttgatccatcagatcattgtatatggtaattaatatatatagagttatatatgtaaatggtctgattttctgctaagtttatttcaaatatatattggatgcgtggatgcgtgtggttgcaatgataacatacaatttttattattaatgcaaaatcttagattgttttttttttttttgaactggaaatcttagcttgttaaattgtagtacataaaatttgaaagaaaaaaaattgtagcacatacgatatgtatatatatatggttagactactgactaaagaattggcatctcaaacacaaaataagtacttagtctatgtgtaggtagagtcagttagttgagaataagaaataagaatatttgtggggtcctaaatttatttataaaagaatatgattcagctgcagaacattacaacaactaatagctagatggtcggaagagctaatgctaaccactatatatttattttaagaaataataaaacagatcattatcatttcttatttattttattatttgtaatgattgattccaaaacctacagtcttctctgttgactatctatatcatggcaatgccaattagagttttctttttgctaaacgttatcactttatacctttattataaacctctttacaatcactctctctaaaaatatttttatttatcttaaataattcttaagggattaaggaattttttaatttgattatttttaatctactaaggtgagtgtggataaatttttgtttttaagcttaatttatttatctaattagtttaatttctcatttttacattatatagattaggattgttccaccaacagaagaaaaataaagaaaaaaagtttttagcaaacaaaaaattgagtttgacttaaatattttttatttaaacatatttttgatatagtataaaaaatagatattttttgatatatttttttaattaagtaactaaactaagcatatatattaaaatttctcttttattattcgtcattggatcaaatctaataatttaatatttttaaatttaatattggactttttttcagttttaaccaaaa

SEQ ID NO: 325307 - DNA, 1520 bp, Cannabis indica
tttttcaattttttttttatttgtatatttaaaagcaattttttgtatttatacaaaagtacatggagtaattttaatcgcaacccaaatttacattacaactcatacattaatgagtaacttaaatcgtcaaaatagaaaaaaagttaaaaataatagtatatgaaatgattaaaaaacaaacttactaaaatcaaaatcataaaaaaatggcacaaatagttattcatactttatttatttatttattaattattgaagcaagtagtgatcaatattaattcataatattttagtaaaatataataattgaaaaaaattatttggagggtcaccctatataccctacgtacgtgccatctttgccataccataatatctagttttggaagctttctcaagttgccttttttagtctctttcatgaagatatttatttatttatattcttttcttatataatgaagatatttttatattatacttacaagcaattcggccaatttttcaactctttctatttcatcaatttaagtataagaaaagtaataaccagactatttctcatgaaatattgagaacatgatatgaattagttgttgggtatcaatttaagtcccacatcggaagaatagataatagataagagctgcctaaatataagtgtttcacgtactctggtcttctgaaaatgtgccaaaaacaaaaccgtgaagggttaaactaaaaacagaaatatcatattaatgtgtggctgcccgaaaagtggaagagcggggtacaacattagtgaatataacctcattgattttctttttcttcttcaagatatgtgtctaaatttgataaatcacacgacacttgtagataattgagacatttacctaaaaaacaaattgaatttcattttgtacatagtatccataaatcatttttagtcaaattgttggtacaatataaatagtaatcaatatttacattataatattaaaagattacaccgttacaacaagatagtatcttaaaaaatgaataaaccgggatgtggctaaaagaatactcataaaagtatctttaccagtacaccatatggtcaaactgttagggtttataaaacactcaagaaatatataaatcacagatctaaacatattcctaaaattgctttaatatagaaaatcctaaatcataaatatataaaacctttattaaattaaagaagaagatgataaaagatgagcggaaacactaacctgaagccattgttggagattgcagagaaggttttgatcttctaagaatactattttcttaggtattttctctgatggagaaggagagaatacagaaattctagggtttcttggggaccactagactcatcttagaatgagttttgggtatttataatttggcccctcaacaaattgtaaattaacttatgttatctacacattatttttaagacaatttaatatccttttgatacccataatataattggtcacttaattttgtat

SEQ ID NO: 325308 - DNA, 2817 bp, Cannabis indica
tagatgtacaacagtaaaaatccaatcgtttttttttttgatttaatgcgatttattttattatatataaataaaaagactcatgaatttctcaaaaaatattttatttttaatataaataaaaagtcatgcatgaatttcttataaaccaataattcagttatataggcacactttataaagaatagatatatatattagttagttattatataataataaattaaaatctttttaatcctataaaataaaaaagataatattattttaatttgaaattcaaaataaatattatataactgaataactgtattcggttatatcctttattattttatagtatattttaatttaaatacattatcctataatatatttagttcgaacaagatttattatttattttgtaacagataatgattgactaattctaattaatttcttatttcattagaattaaaataaatattattttcaccaaaataatatgtttctctctttaatattatttaataataatattttatttaactaattgatatagtttcatcatattaaactaaatagttaaatactagtttaattattcaattcataattgatataattattaaaaacaataatttattcaaaattactatgttttttatgaatcaagaaattgtattagctcaaaaacatttatatacatcctaatagcaccccaactagggcctaaaataatcatctatacacttaatgcaattttgtacaatttaatattcttttaaaaccttgtgcttttctatttcatgttgtgttacaaagcatgaaaccaatctttatcttcatcattgatcttctttggctagaataatttgattctttgaacaacaccagattttagctctctaatcatcttgacaggatcctagttgtccttttctcaaaaacaagtgtttccaatcttccacaggttatagtccaggctagcaattgcagctgctagcactagcttcctgaaatcgttgagtttaactcttccaatccatctaaataggttagggagagatatggttgctgcattccagtccagccatgttttgagctcctgcagacagtacacaaacattggacacacaaagaacaaatgggctactgtttcattctgagagttacaaagtagacaattatgttcatctataatccccatcctttgtagcctgtcttcagttttaagcttttgttgaacagccagctaaaccacaaagttatgctttggagtgtttagttttccccaagcttgcttactccattgtactttggtttgaattggacagaagagattgtatttattagatacactgtaattttgctacaacatcacttgtccattcattaattccttgaactgatcctttagagatactaagcacctccaataccaacttccctgaactggtgctttgtaactccaccagtctgcaccttggagatacacactgttgatccatcttaaccataagatgtcttctttgtttgccactgccctcacatattttcccattgcagccttgttccattatgcaacttttttgaaccctatgcctcctattgttttggattggcaaatagagtcttaggtaacaacacttggaccctaaaatattgtctgtcctttctacaagtagcttctacgaatagcctcaatgtccctaataactttcttgggtagaatcattacctagcaccagtatgcatgtatggccatcaatatagagttgattagaacaactctacctgcaaatgacagatttttggagctccaaatttgaattcttgctgtcattttctcagccaaaatagcacactcattccctaaaatcttctttgcacatataggcacccccaaataggtaaatggcatatcctacagtgtaattaaaactagaggcatctagttttcttttcacaatcatccttcggaatattgctgcaataaattgcagatttggatgggtaaggttacatgccagaagtcaaggagaataacttgaggccctgtagtagataatatacacttctgaaatcccctttgcagaaaaaagtacatcatcagcaaaggccaaatgattaaatttgatatctacacacctgtcatggtaaagaaaatccttcttggttccaattttccccattattcttgataggtactccatacctagtacaaagagtagtggatgcaatgggaaaatgtaatccataaaacatctcttctaagaaatcccactcaatggtgttataagctttttgcagatcaagtttcatcatgcatctagctttattggatttccttccatagtgcctaaaaagatcttcgcatatcatgacgttgtgccctatgaaacttcctttaataaaacccctggttcttggaaactaaatcaggaagactggctttgattctagaacacaataacttggtttcaacattataaatgacattacaacaagctattggtctaaagtctttaacagtattaggacacttaattttaggcactagagttaagacagtggagttgatttctttaagtatcttacctgtttccaaaaaggaagtaacaactttgtataaatcatctccaaaagatatttataaaataaaaaccaaccaaaagatattttaattttaaaaattacaattattaaaaaaaactacagagtatatgataattaactaaagggtatccctttagttataatgtttggccttatttttttgaaacagttttcagaaaataaagttccaaaaaacaagaattttgaaaacaacaa

SEQ ID NO: 325309 - DNA, 506 bp, Cannabis indica
tgttaagaaactgattaattagtaaactcattgttagatgttaatcactctgttattaacctttttctctgttttagcattgtgtggtcccatcaatatgtaatcgtgccttcagtgatcctttctgttattcttgtggtccattggtctgtaatagagtgacaagtgtcctcttctttcttctttgtactctgagttttactataaatggatagcctatgcctcagcatgcttttgagctgagttttatcattaaagcaaaaggttacttttctctctgtcactgccataggttgacagtttcaagccattattattcataggagtgttgtgagtctttgccccttgcattttagctttacatagaagatcttggatgtacttttttttgagtaagtagcagacgagtggcagtaagcagagctttaatgccaggaaaacaattttgggtgccaagatccttaagtgcaaatgagctgtttgttggaaattattttacgaggatc

SEQ ID NO: 325310 - DNA, 517 bp, Cannabis indica
cgaaccatacaaatacttgaagatttgttacgagcttgtgtcatggactttgaaggttcgtggagcaagtatttgcctctcattgaattctcctataataatagttatgaaagtaccataggaatggctccttatgagctgctctatggcaaaaaatgtcgctccccaatttattgggacaaaataggagaacataaatacttgggccctgagctggtccagaggacaaatgaagcaatggataaaattaaagctcggatgcttgctttgcagaccagggaaaaaagatatgtagatcccaagcgtcaggacatttcatttcaaacaggagatcatgtcttcctgcgggtttcgccaatgaagggtattagacgatttggaaagaaaggaaagctaagtccaatgtttatcaaaccttttaaaatacttgaaaggattggaaatatagcataccaattagccttacctctaacattgtcagctatgcacaatgtatttcatgtctcaatgttgagaa

SEQ ID NO: 325311 - DNA, 806 bp, Cannabis indica
tagtgttgtaaatataggttggaattttcgatacagcacgagcttaggaggcacgagcatgacttaatatgaaaaaatatgggcttaaatatgacacgacgacatgaaaaaatatagacttaaacacgacatgaaaaaatatagacttaagagtaaatgcctacctaacaacaaaatttcttgtggcttaacagaatactttcaaatactaacaacaatgctgaagagaaagagatgtaaatgaatcaaataaaccataaattgtccacaacttctctaaacagactattagtttggtagctatccaatgaagcatttgggtaactattcaacgaagcattgcctattttgcttgcttctcccattgaataccggataaaatttgaaacaactacgaattatctctccaatcaacaacacaaacattgttccaaccaacttatttgtcactatgaacatagttaaaataattacaattcaaattttcctagaaacaccataaattaggttttattccgagagcctaaaagcttttcaatgttaccaaacacttcatcaacaccaatatacagaatcatccaaaacttaaacacagtgaacgaagcattgcctattttgcttgcttctcctattgaaataccggataaaatttgaaacaactgcgaactatctctccaatcaacaaaacaagcattgttccaacaaacttatttgtcactacgaacataattaaaataattacaatcaaattctctctcttaaaagtttctcaatgttaccaaacacttcatcaacaccaatatata

SEQ ID NO: 325312 - DNA, 1645 bp, Cannabis indica
attttggcagttttgtggtttcgatgcacatagaatttaataaccatcttttctacttcttttttcaaattttactcgtttgatcaattgtctccatgatctaatggagatcaacccatgagtataaaacgaaaacctttgcactacctttgccatttcagaaattttgggaattttttaagctatactgcagaaaaccatacccaaaatatttcaaaaccttgcatgccatccttatcattgacatttttcctgcgagtttcatccgatttgatttttgacctcaaacattcagagggatcatcacgccgttcactgttccatcgatttcaggaccattcatcgtcccaaaacccaactttgaacagtaagtaatttctctctttattttcttatatgcttttaattttgtgtttctaggtttgattactaatttcttagtgagcacctttgttacctcattttgttttagcaattttaaggttgaattgtatatgggtaaatgttagggttcacgtagaacgtaggttttcgaatttctccaatttagtaacttctggtttgataaattttatccaagtttctccttgcaacaatgtccccatctggttcagaagtttatcatccaaatatttaaaaatagagtgtctcaccgaacttgccattccatacaaacccagaattttagaacccaaatccaaattagagataaatgatgcaaaaattagggaacacttactaaaaacctatcaagatgacattgacagtcgctacaaacacttcttgcaagaaatcgctgtttcttgcgagatgatgcttggcttgaatcccctaatttattgtctattcctctggccaagcctttatttttacccagagtctcaattgcttttgaactaagtgacctagactttgaaatcatgatctccaagcctcaaaaattgaagactccccaggatcctaatgtcacctttgagactaaattaatagagtcgaaggtgcgagccatcggtgattacgtaggtaataccctgagggcttgtggtattgaatataagcgagactaccagattagatcggtggtttctagcgagttcagttgttatccaccagtacgacttactcgcgaagcacctgaaggggtcagcagtaaggccagtacgagtggctcgacgggaataggcgcttggagcctcaaggacatcagggctggagctattatccccctgcaggactattttaaggacttcctaaaccatctcgggcttgccccatttcaattgaatccacatttgatatagaatcctcgcaagtttgaaggttctgtataaaattttgaactgggagtgccccactccccaggaaatagagtttctctactctgtcaaggctgttcctgcaaggaataatgtagcagggggtttttactaccttgggactcacacaagtgatcgtaagatcattgtggatttgccgaataaaactccctttaaagacaaattcttctcgaggactggtctatccccaatcggcacaaccacctttcgcataatacgtaagtaatttttacttaagacttggttaaattattccatgtatttttactcttggtttgctaactttaattttgcctttgttttcgaca

SEQ ID NO: 325313 - DNA, 607 bp, Cannabis indica
ttttttcttaaaaaatattatttaattattaaaaacttaaaaagtaaaaatagtgtggtctacagtacctcactaaatttggtgggacactgtagacaaacttatttataagtatagttttagtatcccattaaagtaaatattgtgtgaaacgacactatatttggcgtttttaaaatccggttagagatgcccttatagtacaagtttaaaattatgttaatatttgttttttttttctaaaaaatgtaaataatatttgctatcaaatattatacatagatgtctaaattatttaaattaatacattaattaccaataattgattatatttttaattattttattaatttagttttttattattctacttatatttttgtatcaattagagtttattctgttactgagaaattctcatttaatttctttttctctttatcatcttctttttttttcttatttattttatattacaccacaagaattatgacttttaatgaggacacattttgttagtaaagatgggtacttcgtcagtattgaatatcaatagcgacatgtcattgtaaaaatgtcgttggtaatacttggtcagtgaaaggta

SEQ ID NO: 325314 - DNA, 1497 bp, Cannabis indica
attatggatcaattctaatcaattagaaggaccatttcccaatctttcaatgttttcaaatcttacattgttggatgcctcttacaataagtttaatggtactgtacctgaagatattggtaagcttcatcatctcgagtacttgtacctaaactcaaaccttcttactgggcttgtcactgaagttcactttgaaaaactttctgaattgaaagatctttatttatccgataactccttaaccttgaggatcaattccagtgcttggatcccaccatttcaactagacttggcatacttgaggtcttgcaatttaggtccacagtttcctacttggctcagaacccagatacatatctcacgccttgacatttcaaacaatggaattcatgatgaaattcctgctaattggcttttgagtagtcctctagaattgaattttcttgatctatctttgaatcgatttcacggtcctatcccacctcatctatcaaacgtgaacgtattgattctttcaaataataaatttattgatctaaagacttttctttgttaccccttacaaagatcaataaaacttcttgacatttccaataatatgttaagtggaagccttcccgattgtcattggcatatgaaggaattgactgttctaaaattagataacaataatttgtctggaatgattccaagatcaattggttcctcatatggaattcaatatttgtttttggggcataataatttttcaggaaatcttccttcatctttaaagaactgtacacaactttacgttcttgatgtcgaatataataatttagaaggaaatattccaacttggattggggaaaggcttacaaatttgatttttcttcgagtaagatcaaatcatttttatggagtcataccatctagtttgtgtcatcttcaatttcttcgaatatttgacatctccatgaataccatagcaggacttattccttcatgtataaagaatttcacctctatggtagatttagttgaaaagaatcaggaacctttgaatatttttgcaccagttcccctttatgacgttcccttctatgagaatgcatttctcacgtatgaaattgttacatcgattatgtggagaggtgcttatcgcgagtatagtagtactcttggattattaagagtgattgatctctcgagtaataatttgattggtaagattcctcaagagttaacaaaccttgttgaattggttcaacttaacctatcaaggaatagtttgaatgggacaattcctatgaagattgggaacttaaataagctaaattctctagatttatcgcacaacaagctttctggtgtaattccaacaagcttggcaagtatttcttctttgtctttgttggatttgtcagataacaaattgttcggaagaatccccaccggtactcaactacaaacttttaatgcttcgatgtacattcataatgatggattgtgtggacc

SEQ ID NO: 325315 - DNA, 2316 bp, Cannabis indica
ataatataattataagagagattaatttttttttttcttagttcgaaaaattaagatgagatgtttacaattaatatttaatttttattttgtcggaaaaatattgcaaccaatattaacattaaattatagttttgttgatggcaacattaaattatagtcgaattgatataattcaaccaaaccacccatttcaaaaaagaataaacaaataaacaaagagaccaccaatattaatattgtatacacaaataaaatcaaatctaaatattatgagaaatgttaaacgattctacgtgttaaaatggctaataacctaattaattattaggttttatgtaatttaatgtaaatttaagaaaatatagctagttaattataatgtcacaagtttatgagatgttcaataataatactcttaaaatattataaaagtaaagagtattgttatggagtattaatagtatttaataatattttactattttcttaaataataaaacttaacacttaattatattaataattatataacaaggtagctaacacaattttttttaacagttctcacaaataaatcattataccaaaaattaaaaaactttacccaaatcgacacgtggcagaaattttgcataggatccaacagggatcctgttcactgcgctacgtgcatcccggtcactaattttatgattcaaaaacaatacgcagtcctatcgcgcgtgacacacactaataaaaggaaaccgccgatataaaatcagctaatcattaacttcatgggaacggtccagattaaaactaaatataattaaaaaaaacctcataatcatctgactttgaagaatgtagtcctttcctttcacattgcacaatagcgcgtaagacacaacaaatacaatatttcgaagattctggacgagaaggaaaaagtacaatacacatagattgatgcatgcaacaaactctcaataacggttttcgccgacgttaacggcggaaggatctcgcaagagtaaaagctttcacggcaagaaacggcgttaagaacgagtttgataagatgacgggtcggtgatgggagaaggcaccgacgtagtttgttagagtagtggaccccatactcaactaccttaagtggggtccacgatctaaagccagctaatcacgcgggaccaatttggaaagcacttggaactgcattccgtacaatctggtctccaaaatctattcatatatctaagatttttttattttaatttattctcttataaaattaaattctgccaaaattagtcaaattttactaaaatatcagtaaaattaaactaaaattttgaagtcatatctaatatatgatactatatagtacaaaatttatataataattatttaaattattaaatttatgcctttatgcaataatatattatgcacttgattttagtaatatcttataatcttaattcaagtcaaattattccctacctatttataatcctagtcaaactagattagctcaaaaacctctataagtaagcttagtgaagagattaattaatcaatcattaaagaagaagagtgagattaaatcaaaggtgatactatgggtgatgtattgaatctttgtgttaaagggtgtggattttatggaagggctcagaatcgaaatatgtgttctaagtgctataaagactttattatggaagaaataataagtaaatctttatctaacatccacttgagtagtgatactactagtattactactctgacttttaatgatactaatgagaatgatgccattactaattctctttctgatcaatttaaagatttaaaaattacgaaaaatagatgcaatgattgcaataagaaagttggattgacggggttttcatgtcgttgtggcaatctctactgtggtcatcatcgcttgcccgaagcacatgcttgcacgtatgatttcaagggcgctgctcgacaaaacctcaaattaccactagtttgtgcagataaattggagaagagactttagttttgaacattaatatctttcttttatatgtcgaaccatattgttatttttttttaaaagtaatttctgtgtaaactttatcaaaccttaattcttaaaggtgagagagtctgggatttctatgtaagattgagagtttgcactacataaaaatagagatggtttttttggccatttacagaccattttagagaaatttaaaattgttgggaggggtgtgcataaattgatctaattatccaatgacaaccgaccgatccaatcacaaccgaccg

SEQ ID NO: 325316 - DNA, 853 bp, Cannabis indica
ttcttcttctttctaattttgaatcctagagtgttcttcaaaaaataattttgagccttagtgattgagtgcatgtccacccatagcaagttagtccttaatcattgtgtgtaagactgtgaagaatccaaatagctaaaggagaatcaggctcagatctttataatactctgcaacagaaaggaaccactaccacaaacttaccttttagtgacatgcacaaaaagtgtgggtcactaaaaggttaggggtaagttctagtgacatagataaaaagactcaacatttagtattaatgtcctagaacctgtgtcactaaagatatgaagtgtcactgtagggtaaatcattcaatttctataaaaatttttaaaaaaatattaacttatagtgacgcgccaagcgcgactggctaaatgtttaccgacactcctagcgcgtcactatatcataactatttttttttaaaaaaaataacaaataaagctctatatatgtgtataaattaaatatattttttttatttttttattttttgaaaaaggcagctacacctcttcattaattataaaaaagctacgtattttttgaaggaaaaaacttcttatattttgtttcttaaatttaaaattattgattaattataattgattattataaaattttataataaataataaaatataataaatgaatataagaagaaaggaaaagaaaccctaatcaaaatcacttatcatctatctctttcttccgcctccctctgattttctctgaaattcctacgcccttggcctccaccagcagtccgaccatccagccttacatcatccgattgggctctaccaccggt

SEQ ID NO: 325317 - DNA, 684 bp, Cannabis indica
atacatttttaaaactcaattatatatattaaaacggtgacatctacaatgtatttgattctagaaaaatatcaaaccccatcaccaatcagagaaaaaaatttgaaagctattaactaaatgaattcatggtatataaaatcatatacatagaccaaaataactaattatataatttacttttctattaaatgattaatgtatggatgtacttattaaaaaaagaatgattttataaaaaattaatttcaaattatctaattttgtcatctcaaataatgataaaaatgtattaaaatttttggagtgtacttaataatattaggggtgtaaatataactcccccattcttttcacagttcattttcaaaagaaaaaacgtggagctgaatcatttgttttttttttttttttggaaatgtgaatcattgctatttattaaaaaaatgaattaatattttttaattaataaagtgccaacttattattaaattttctctactagttaactttgttttagttgtagcattattttctcacttaataattaattttattttacttatttattattgctttacacgtgacatgtaaaatgaattagtatttgccactaaatattcctcacttaaactttatttatgaatatatatatatactagtatattgttacgtgcgatgcac

SEQ ID NO: 325318 - DNA, 2079 bp, Cannabis indica
aaaaaccctcaattttataattaactaggcgagggtatgctgattactatttctcctcgttttcatttcatttgtaattctagttgcttaaatttatgtcataaataattgtaataaaaatttatataatttaacttctgtgatattatggatttgagtcaacttatttaaatcatctacatatttttggaggaattgattctgattgtaaaataagactgcttaatatttctaatatgcatgaggcctttttctctttaatgtatttaggggttaactttcgtcctacaaagtgaaaatactcagattgtggatacataatagaagagaaacaaaagaatctccatggttggaccagttagtatttgtcgtttgtagagagagcccagttaattcattatgggcttttggagatttgtaacttttggatgagtgtctttatcttacctcaaaatattaccgctgaaatagatagaatgtgttgtaactttctttgggagagaaaagggaaccgaagtaaacctcacttgacttctaatcaagtttgtcttccaaaagatcatggcgtattgaattttagagataggaaaaaaatagattattgcgttaatggccaagtatatttgagttatttcaaccaagcatgattgtctatggattcgatgagttaatgcaatttatatgagaacgaagatttttgggactttaaattgaataaggatagtagctggtacattaataagattatcaagcttcgagaggtttttgagagacaagcttttatggaagctagttgttgtagaaaattcaaagttagaatgttttaaaacactctgataaatgttgctaaggccagttttgacatattgtcaaatcccccttgctccatatgggacatgtaatggagattgggggtacgaagtacgcggtaggatctattacctctttcggaggagctagctctcagagcaccctcgtctgggtaagctgcagcatacctctctcgaatctcctcaacctttgtcaaagaattcagatgatggagcatccaactagctttttagaagttgttcctcttttgtagccttcgcgagaatttttgctaagtcacgaacaatctcctctttgatctcttttggagcttgaatttggcctctgttgttgacattatcaatactttgaaaacttgcaatgattccatgctcgtggagcaatggtgtagtcactaaaccttcaactctcagtcggcttcagtgaaatctttgaattgggccactttcttggccaactcttagtctgagcactctaaggcacaagctctatcaacaaaaataaagaagtacaaaagcccaatctgcacttgaatccaaatagaagaaagtttgaaaaagaatcaggtaaaaaaagggtaggtgtaagaattttttacctggaatttggaaggtaagttggagagtaggaacccttttcagtggaaagcaagtagaaaagaaccaatacttcatgaggtcatgtgaacacttagtcttgctagtggggtagtaggcgtctgtgtacttcttaagcttataaaaacttaacttttggcaattggtcctcattggttgaggctttgcaccgttgaaaaacaagatctcctctggagaaggcacttcaaatttgttggcaaagagcttataggatgaaagtatagttggaacagagcaattccaatgcatgcaataaaatttacgaagtaagttcttagagcgagattttcccgattgaaatatgggaccgactctaggttctgaacccatccgtgctcgtgaatgcggactcctctaggatagccatcctatgccacatcaatcgtggaacgttgagcaatttggtattagtggcatatgattcgagcatccactatgaacaaaagtaattttccttttcgtacatctcccaaatggagtcattaaattcttgagtgggaggtgggacttgttggaaatattttaccaggatctagatttactaccaagtatgtttgattaacattctaatatgaattctaaaacaatgaaataaacacataagagttta

SEQ ID NO: 325319 - DNA, 996 bp, Cannabis indica
cataaaagcaatttctaatcttttatttattagtaaatatgatattaaaatgggttttatttatggcacaaactaaactgatatgactagggcaggcattgattgaacttagaaataaagtttagacagatactataaaggattttactataactacaagtaaactattaaggtatgaggattgagtttgtgtcccaggagatgattagataaagaaggaaatccttgatgagtttcatagtactccatattccctacacccaagaacaatgaagatgtatcatgacgtcaaggcactatattggtggccggggatgaaaagtgatattgttgaatatgtctcgaagtgtttaacctatgagcaagtgaaagctgaacgttaaaggccagcaggtttacttcagcctttgagaatacctaaatgaaaatgggaagacataacgatggactttgtagtagggttacctagaactactgggctacatgattccatatagattcaccaagtaagcacacttcttgcctataaaggtgacctatattgtggaccaatataggtccataatataggttgttgatcgtactcggttaggaggttgtcgatcgtactggtatgagtactactgtttgcgattttagggatgacttcttatcccagttatttagttaagaccgggataaaagggtttcacattaaacccttttatcttggttcttaactaataaccgggataaaaggtgcccctaaaaaaattaattcctgtttggcaaacccataaaaatcgaatcttgaacatatttttatgccttaatatttttttttaacgttctaccaaacagggcccttgtctaaaaaaatatttggtgcttatttgaggcgccaaatctaaaagtgggataaaaagtctcaatatatcttttgggaacatgatagtgtaattgagttggagcgctaaacatagatatagaatctatagcttttatttggacatagaa

SEQ ID NO: 325320 - DNA, 1814 bp, Cannabis indica
tgttataattttttttacaaaagggctatacacaaaagtcaaaatactaatcaagtgaagcactaaaacatctcctgacagctcgaccacacaagccaaataagtcgatatgtaaatttgtcggagaagactgtcatctcatggctaccctagtttttctttgcccttacctgcaccacaaaccacccgtgagttgtaaagactcagcaaaaaaagtaaatataaacatatatcaattagacaatcaattctgaataatataattaaaaagtaatgcacaagtacctgtctaataagacaagccatatgtgttccctcatagagtaaccgtttcccttgttctctaataagacaaccctaatgtcctatcccgacatccacatatctttgtcattgtcttataagacaactaaaatgtacaaaacctaacaatggtttcgattgatgtgatgattttctcttgctcaatgacaatcaccgtatctttaccccgatcgtaatcgagtcataaatgataataatcatatcttgatatcctatgtggtacatatgtacttttcttacctcaagtcccaattcaggaatgttgatcgacccaaatggagaatggtcaacgatcccagaccctatgtcacaaaaaaaatgattaatcaacttgacctaacctattccaggtctttaattcatcaccgaaagtttccttattaatcactagggtaccaataccctaaacattgagaaaacataaaaaaaaaaaaatgggagttcttagcatcaccaaaaatggtgggtcattttctatgttccctgctaggaaaaatggtatacctacttagttcttcaaagaactaaacatctctatttcaaaaggaacagacatgatggacaaccaacatgggatacacctacaataacatatctctaaataaacctaatcacaaagcagggttaggggaatggctgcagggtgttcaatcctgcatagcataacacacagatgtggtatcccaataccgcctctaagaagcgttaccaagaaagaagctaaataactattgataggagtgcacaaaggctttacaacaatcatgccaaggggcaaagctaactgagtgtagaagggatcaaactgtagcatcgacctggcctccaaaaggctggcaaaccatgagcttagtagtctagctagccatagaactgacaatctagctggcaactacctccacaggctggctggccatagcttcattcaatcggtcaggcaatgctcccttaacgtggctggccacctggtctgtaccctggctagcccaatccatagtataccttgacaacaaagatcctgtagcaagcatgatcggagcctactaaaaaggttcacatcgagttacaagataataataaaggtgcatacaagcttggcgagtacaacaagaacttggagttggctcttctaccaaaatattagaatagagaacatctcggtaagtgttttcattagccaacttgtatattagttcctctaacattttgcaatgcaggcatccataaaagagctagtactcgtcgctcttcattgatggcatcccatcactctttaatgatggcctttgcacgctaagccctgcagaggtaggcaaatataaaagagtcagtacccattgcatttaagcatggcctcccgtcactcttcagtgatggccattgtgcggtaagttgcgtaggggtagccataacgtgatttcaaaagcgaaaactaagttataagcttttgttacatgtaagaccaactatgtctaaaccacttgctaaca

SEQ ID NO: 325321 - DNA, 877 bp, Cannabis indica
aaccctaaattactctaattcttgtttcatatttctaattaatatcttgaaattgaaagtaggtatattaatatgttgttagcgatcgatgaaaataaattttgtttaatattttatataaatatattttcttcattaattattaaattaaattaaaataaatacgtttttgttattcgtgtttttagataaatgatatgtgtatttttaagtccgaaaatcaatttacgagcctattcaccatacccaatcaaactagttagtcagcccacaacgaaatcaggctatggctttgggtttaactgcccaaccttggcttcgacaaagccaaaacttttggtccctaaaggatgaatctcgtccttagaaggaaagactcaaagaagtgcagtcggatacccttatgggataattcggaaggagtacttagtcgaagggttgtctggcaacagtcctacatggcatcccctgacactgaatcctacagaatcaggagtttgtctcctgtgtcatgcctgggaaaggcacatggcaaaaatatcaaactacctttttgtttgacacccactactctgatatccattattcgcgatattggcagcacacgcccagttgtcaactttagacagtacgattttatacgaacaatggaaaccttctaagctaggcctcacctacccaaatcaatattataatgtattttaccttatcggtgtgcttattttctcatgcaaaccctatcaggtgagtctgcctgataacccagttttagcctataagtaagactttatcccttcatgcaaagttacgaatttttgacaagaatacttgtgtaaaatactccatagccaaaagttcaataatattaactcgtgga

SEQ ID NO: 325322 - DNA, 2301 bp, Cannabis indica
taatcagggcatattcaaatctcacttttcagaattttaaatcgaattcataaataacgattatagatgaccaaccaataattgtaaaattagaacagattgtatgaaattgaaataagaaaagaatatgaaattaaatgataacattaatctataaaataaattcaagtggttcacatagtaatttttaataaaattagctattaaaatcattctaaaacaataaaaattcaagtaaaaacataaaagatagagatagatgagaaaaaatattgtttagagtcctccaatagtatattctgctccaaattgtcctctgatgctcaaaattagtctctaatttcgaatggtctccaaacttagccaacaaccctctttaaatactaaaaaaaattcaagtttccgaaaaatcaccaaagccgcgacaatgcttagaaagtcgtgacattcattaataactcgcgtcatttttttaaatttttcatttttatttttgaaaagtgaccattcttaactatagatcacgatttttgaagctaaaaatgtgaactttaataaattttaggcaataagaatcaactaagcattaatggagttttcttttttcttcaaaattaaccattttcatctcaaaaaggcttgaagaacactaaaacaaccaaaaacggaaatctctcaatatttttcctaaacaaaaacaaaaacaaaaacaaagcataaatctgaaaaataagtgataaaaaaaatactaaaacacacactaaaatagactcttaaacatgcataaaaataaagccaacttctcccaaacttaacttttactcgccctcaagtaaagaccaagttaaactaataaaaagataataaagaacacaagtaagccaccaatgctatctgtatacattgcctttcctttgaaattacaattgtaattcttttaaccagattttcagctcaactgtcttaaagttcaaccttatagttcaatagacactacaagaaatgtcacttttggtagcacatttttgtgatggcaaaagtttagtattgcactggtaaaatagaatttacttctgatgtgttggcaaaagaggttgacaaatcaacgttagtattagaacttttaccagcacaaaataaaaagcgttggcaaaaataacttatctagcacgtaaatgtgctggtaaaagttagattttagccactgtaaatgtgcgctggtaaaactttgacctttttaccagcgcagtttgcgaaatgtgctggtaaaagtaaaccaacgtagtagcaaactttaccgataaaagtgacatttcttgttgtgagagaaataaataatgtctcacaaatgaccataaacttggactccatcacatatgctcaactcatgccaataattccacaaactaatttttcaatatgcttgcatcatttaactttctctactcaaaaagactttaaaatgttataacgtgagacttaagtaaaggtagataaaaatatcattttagactcaactataccctaagcttttcatattccaagaaccacaatttcattacaaaactattctgatccccacttaatacaatgcaagagagatttatatattttactttacaattcacacccacatttattttcttcccactttttttcttctctttttttctttttttttttcttttttttaaagaagaaaaattaaagattgcaacaaattaaaacatcactctttttaagctttaaactcttcaagacacaatactcaattattattttctcccaaacttatttaaaaactcataatataattaggacaaaagaaaataataaatgggtcaatttttagctcaaaaagtgtgtaacaaaaaaatcggtttaatgctcaaaagaggtaaactagagataatcaaaaaataggttagcttaaaagacacaaatgctctaaaaaaattgcttaaattatttttcaaagcataagttatcaagaattttacctcaaaggccaaacaatgcaagttctatcaaattcaaattatcataccaccaaccccagtcaagcatatataatgaaatctaaaatatatagcaattgtgaaacatattaaaaatttcctacaaaacttttctattgaagtctaaaacaattgaactaagtacacggttattagcaattttctttccaccaactaaaaaaatagcaatataaacaaaaactaaataggcttacaactacttagaaaaaaataaacactaacacaaataaacaaacaaacaacaaaaaaaactaactaaaaa

SEQ ID NO: 325323 - DNA, 594 bp, Cannabis indica
aaaatggacacccacacccctatccagtcaaagaaagtacaagtgatgaacgcgtatggtcttgaaatgctcatgaagcctgtgcacgctaatagaagctcaaatctggccagccaactgcctaaggaaatggctaaccaccggtctcctcaaatcgaagtccctcgctgtccaatggggtatgacagacacgatgaggtgtaaaaggtgttggggctgggcaaagaaactaagacccaatgcgactacgatgaataactcgcaaagggtcatcagatataacaactctatccagctcatgactttggtactggtgctgatgcaagggccaaatccattgccaacgactacttcccctgccttttcactacgtcacgaagttgatcgaacactgacgttgaaagatcacatagtgacgacggctgagttaataccatcagtatcaccaatgcctgctgggtttatagttaggtctggttatggtaatgttggttggaactgtaatgaaggctttagtaagttggattagtaaaggcaattagcagtaatttcagttacttttatgattatttatgaaattaattatttgtggac

SEQ ID NO: 325324 - DNA, 603 bp, Cannabis indica
atcataagtataatttagtggtagttagtctaattccctgtggttcgacctcacctgtgtgattttactacttgattgcgtatacttgcgtagtgttcataattttcgtaacagttataatttcactaaagatcaaatttatgacccatttttttttaatctttacttgtttagcttttaatatttttttccaactattatactatgttattttttcaagtttgctattcaattttcttgaagtatccctaatttatgtcatctcgtgaattagttgtacatacatgaattaaaaacttgtttgtatggttttggtccatcttttttgtacactctatttatttaatgatatgctcattattcaaaaaaaaaaaatatgacccatttcattagcttctctctaggaacataagctataacaacatttgaggtggtatagtgtggattattgttatattttcaaaccaatccatacatgcacattttacaatttcttaaaccacaatcataccgcaaaatttcaaaggaaaatttgaaatttcatgcttacaataccctaaaatttttttcctaaatccataattattaaaattggtcatatat

SEQ ID NO: 325325 - DNA, 1542 bp, Cannabis indica
tttttgtctcatccttatccttattcgttttttttttttattttaattttaattaatttggaaattaatataaattagtggtgttatgtgtattaggtgggtgggtggtgagtgttttgtgttgttgggtttggagggttttgttattctgtgactttgtaattgtgatgtaaattgtttcagctttggctctttaggcttttgctttttcttctcattctcaccaattattccaaaaatttacaaattcagactattcattctcattattattattattagtattataactacattgtcattttttatcttatgggtttatggaaaaaaaaataataaataggtattttgttctttaattttctaggtgttaattaggaatttattatgagtgttttgttatgtaattggtaattttactctcaaaattagttgtcttttgttatgtttagggaaaattggtaatattttgtaacgtttattattgatctgattatatttaaatttcttttgtaaattaatttgctgttaaaattgtatgattttttttttgaaaaacaaatatgtggaaagaaaaaacagtaataataagtatattaattagtttagaatgaaatagagcaagggtcaaagatgaatggaagtttcattttactaatgctgaaagtttaagaaaaatatttaacaatgataatagtgtttgtttttttaactttaaagaagaaattatttatttattaaataaaaaatggtatttttccttttgtttttctaattttattaaagtgtaaagaacaaaatatttgtttattgttatctgctcctatatttgagaattttttagttctgttataattatttaagatattctgcaaaattttaaaaaattaagataaatttaacacgtcaaaaatataaaataagtttcgcgtacaatagaatatttgaactttattttcgagttgttaattttttctaaatctctcaaaattttacaagttatcttaaatgatgccaaaaaattagaccaaaatattctttcagatactgaaacagatagaaagtgcatcgataaaaccttttagagtattcgaagcacccaatatatatatatttaaaattataccgcttatggccttatcttttaatctgtaacattatttaattgttttactatgatattttatttttttatttgaagaaatttactatgatattttagttgaaagcatgatgaagttgtccatttgtctaatgttatcaatttataatgttaagtaacatctcaattattgtcaattgtcaaaatttcatgtccaatgtacgtttagtgaaataaagttcttctatattaaatttttaaaatgatgatagttgattacgttggagctcataaatattataaaatttagttgtaggttgagtttaattttttaaaaataaatgtacggtatatatttttatttgttattattttattttaaatcaacatgttagatttttattaataataataataatttattattatatgtaaaaatt

SEQ ID NO: 325326 - DNA, 932 bp, Cannabis indica
aacaacgacaattacacacttcaaaattttactaagtgtgtaaaaaaaaatacatgaagtgtatatatatataagaccccaagaggtatgcaaaaaaaatcatctccaacccacgaagtcgtgctacgattgtcacagagcaatgcactccgaccccttatggggtggtctcggggtgatacaccccgacctccacatggtggtcatgggggtggtgtaacccccaacctcgggccaagcacacattttcctcattaaagataatttataaacaatatgctatccacactcagggtaaactcttgacctcggggtggagtaccccaacccccaagtggtggtctcggggtaccacccccgacccactcttgacccaacttcagtccaagaaaaaggggcatgcttcaagctcggggtgtaccccgacccccaaccaccatggggtgacttcaaggcggtgtaccccgatccccatatggtggtctcgggctaacaccctcaacctccaaactcagccacggtcaagacttaaaaaaaaaatcttactcgaggtgtaccctgacccaccaatgtcggggtaacaccctaatgtcgagataatcgtggtcgtatgggagttgcttgggtcacggagtgtgtgtgcgtagcttggggtgtttatgagctttgggcggtcttggggcatggtaagtcaaaaggatcataccccaacccctaactcaaggcctcataatgaggctaaagcttagtctcagggtatggggatgcaacacagggtacataccccaatcccaaagtaggtatctcggggtgtagagatgcaaggtggcccaaaatccctaccacacaaaaagaatgactatccaatgaatcttcccaaggtatatactccacaaacacattttaatcaatttcatgagaatcaaaattgg

SEQ ID NO: 325327 - DNA, 936 bp, Cannabis indica
ggatgatactatcttgtttccctgtgcaaatgagagagaggcaagaaccttgactgagtgcctttctttgtatggaaaattgttcggacagtcttgtactgtctccaaatctagtgtccttttctctaaaaatttgagcagtgggaaaattcaatccaaataatgctgaattttgctcaagttagaggcggggagagacaccttagaaacccttttatctttaagagaaacaaagggaagattacatcaggttaaagacaagcatgttgaatagattggatggttggaagatgaaacttctctcttatgcgggaagactaactttgattaagtcagtagcatcttctgtgtcagtttatgctatgtcgaccaacaagatcactctatcaacctgtcatgaaatggatgcaattctgagaaaatactggtggttggtaatgttgaaaacgacagattcaaggtccttagagcttgggatcacatctgtcaacccaaggcttcagggggcttggaaataagaagatttgaggatatggatagagccttactggctaagctagcatggagtatagcaattagagaagagaagccttgggtcagttattcatagagaaagtattgttatcacgacaacttttggagaatagagcagaagagcaataactcctatcaatggaagtgtattctggaagtgaaggatattggctcggtttctattacagttggaggagaatctattgttttttggaatcaaccttggattcttttgatggaccttcaaaattttaaggagacaatgctcaagcttaagagtaagcacttcactgttaatattttcgtaacgtcccgacttaagcctttaatgggccttttcacccactggaatgatgactcttatacatgagtacgtcacttttggctgcttcctggattgat

SEQ ID NO: 325328 - DNA, 1878 bp, Cannabis indica
catcgtgaaactaaaaaaccgcaccgcaaaaaatggtgcggttcgatgcgatttttgcagtttggactatcactaaataattaaactatcacaaatacaataaaacttgagcaatacttgtcaaaaataccacaaggcccccgacccctttcgaaaatgggttagccaatgtattacgactacgtcattcaacattcaccttaatgggggtaagattagcagtctggtctcggagtgtggcttgaggcagggtgaccccttatctccgtatctcttcatttgggttgctgacattctctcgcggattttagagaaggctatttctgatggcgatatcaaagggatcaggttgagtagagacgaccctggtttatcccatctcttctttgttgatgaccttatccttgtgggtagagcaaatcttgaggaggcgagaggttcctggaactgcctcgagaaattttgtcgttggtctggccaaagtgtgaacaagctcaaaacgtctattttctcagtaataacaccagtgaagggatgaaaaggggaatcctacaagaactgggctgaacttggcggatacgaacattaattacttgggcctcccgctctttagatcgaagaataaggatgtggattttaatttcatccttgataaccttgtttcgaagttacatggttggaagatgaagatgttgtcaaaagcaggtcgggccacgcttattaaatctatggggctggccctgccagtgtatactgtgcaaactaccaagctctctaagaagcttgcttcgaaaattgacggtatggttagggacttttggtggggttgtgaacaaggaaacagagggttatacctgaaggcctgggaccacctttgcttgcccaaatctagagggggcttggggttttggaaatctatggaattcaacaaagctcttctggctaagtggggttgggccctccttactgaggatcaatccctgtgctgcagggtgttgagagccaagtatctgaaaagcaaacctctgtttgaagcaacctataaggattcagactcttgaatctggaaaaatgtggttaaatcgatagatattctcaggaaaggggcttgtaaggttatatcaaatggggaagaaacatacgtttggaaggacccgtgggttgttcacgggaaagagttctacccgaaacccattacttcttgtcctgagagggtgactcaggtggcggatcttctaacgagtgatggggagtgggatatccctaagctcgagtccctgtttaacactgaaaccatcaatgatatcctgaaagggggcagaccttcgagtcaagggagagacaagtggatttggaccaaagaaggaaacaggaaattcaccacaaagtcggcttatttgattccagctttggaaagagccccagcctgtgtggtggctccagcactttggaatagactttggaattccaaaattctggaaagacataaaatcttatggtggggcatcctttcgaatgctttgccgatacgtgggatcttggtcaagagaatccaaattgaagatgtgacctgccccttgtgtgggcaggccgaggaatcaatgaaacacctgttcctctactgtaactttgcttaccatctctggaggtcttctccctggggaacaccattgactctggtggtcaggcttgggattgggttaaatttctttggaacataaaagctaagggtgtggactttgaaaagttattcctatatgcgtcagtcgttgtggacactatttagagagcccgaaatgacaagatacacaactcaaaatcgcataacattttaacgacaattgactctatctctcattgttatacagattatgtggc

SEQ ID NO: 325329 - DNA, 874 bp, Cannabis indica
tttcgtgtcaagtcgtgtcgacctatatctaattttctcgactctaactcataaaattcatatcatatttgtgttcgtgtgttgtgtcgaaacatattttgccacccttgatcccaacatctaacgataaacagtcattaataattgaaaatctttttttctattttgagaaaaactactaattagtattaattataatttcctaatcaatcttcataataatttttttaatttttttttttgcagtattagttatatttataatatttttttgaacaaagattatgaattttattcaataacattcgaccattacaaatttacaatatcctttatggtgatagtcatcataagtacaatctaacaaagtataaagcaaaaatcttatgaaatgcacccattaagaatgaaacttttcaaaaatagttcaaggtgattttttagcattgtcattatgtatatactatataaacttttaataaataaatatcatcaaatcaaataagtataaaattttgaggatttcttatatgtattttttatttgaatagtgctatagttattctattattataattttttagttaattctcgtgtttaaaaaaatatacacttgaatatttttttttatgtctttattatagttataataatatttttataaaattttaaaaaacagtaaataatttatagtattaatatttttttaaacaaacataataaactgaaatattataaactctattttcagtacttaagctatttataatttttcaaaattttacaaaaataaatatcattttgttagcattctttttttttaatgaaaataatttttattagacagaaacatccgctaatacagaggactgaa

SEQ ID NO: 325330 - DNA, 1057 bp, Cannabis indica
tttagttaattaattaattaataataataataataaagcagttacaaaaaaagggagccccaagtcgtccatcaggcatgaaaaacggactggcacttcagccactattcatatgcgcaaccaacgacgacaactgcacaggacttgggcttcagcctgtcgtcatcgatgatgggagcttcgggattcaccgacaccatcagaacacggtcgaggcacgtcttcagattggttcggcgcatagcagtggcttcaaaacgcttggagagatttgaagcgaaaaaatttcccaacaaattccaatctttgattagagatgctattttactcatcctaagagctctgccaaagattcttttgttgcccaaaaacgatgatctaacatgtgtctgaaaaaaatttcaaaggtcacgattggcaagattattctcatcttcatcgtcaccattgatctcactcgagttgacagccatgatgaaatgaaaaacaaataggagccatgtccaagagttgaaccaccatcggaccattgggccacctcgtcgaaaatccaacgcctctaatcggagacgccttgcacctctaatcaaccatgttactcctctctgcacacccagcgcctcaaagcgtttcttgtagaactccgtcattccacaaccatggtcggcgtataccatatctggttgaatcgatgagctcattccacaaccacagtcgtccataatgggctgaattttattccgattcatttaaagtataaaaaggtatctcactttttaaaaattttcaatctaattgatatttaaacaggcagaaaaactatttaaacagaaatgatatgtgtttaaataggtaattaacataaggtaaaaatgaacataaagtaaaagaacacacaaataaagactccctctttaaatttgtcccaactattgtaatctaaactcctaatcaattttttgaagtgctaagatcttgaactcccttcaaatcataacacttgcacttatcctcccaaaaaatgacccccgaacaagtcttctcccgaagcttgatg

SEQ ID NO: 325331 - DNA, 2169 bp, Cannabis indica
tttgtatatgcattgcaacaagcaataggtctgcagtcacttacagtatttggacatttcacttttggaatgagagtaagcacaatggagttgatctccttcagtatctgccctgagtgccagaaattctggactgcagcacataaatcttcttgaatgagctcccaagaatcctgaaaaaaagtaacttgagtacccatccggacccggggctttgattcctggtattgcaaaaacagtagatttgatttcttcacatgagtactcctggcacaaccaattagcatgttgatcagatacaacagcccctgaaatgtaccaagtttgataaaacatgtcttcccccttgcattgtattgcccaacagccctttataatatgccaaaaggcttttgatatctttgtttcttttgttaatctttccccctcctgattctgtattgataacactctattttgtcttctccttgctttaatacttgcatgaaaaatagctgtgttttcatctccacttttgagccaagtcaccttagatttttgatggagataagattgataattttttgaggaggcaatataatctttttgggctgctaattcctcctacaacaaattttgatttaacgggtcctactgtactctattttgaatctgatttagcaggtttttagccttctcatttgccatctgtatatccgagagagcttgtttattcagctcccttagtacctttttcaatctcttgactttagtgactacttggtacattttatgctctgtagtttgttgatccaggaggctgctactgctgtagtaaagtccgaatgagtgttctacattttgaagtatcgaaatggtttcttgccactgggagccgtatcatagaaggtcatgacagctggtgtgtgatccatcatctcttcgttcataaaattcacctcagcattaggaaacatgtccatccaactcagattggccatggccctatcaatttttgaaaaaattctatcgtctccttgttgcttattgctccaagtataaaagttgccacaagatttgacatcctcaagaaggcaattggaaacacagtcaataaagtccttggaaggacgatatttaactctattcccaattctttcttccttggcaaggatatcattacaatcccccatgactaaccaagaatcattttgagcaacatgcattctttccacagttctttccttcccacttcatcattataggcatacacaacacttaagacaaacttatagattccatcagttgtttcaacccccatatgcattagttgacttgaacacttaaaaatacttacattataactacttcgattctacgcaataacaattctgccccctttgtgccatgatatgtttgaagtgaagcaccaaccttgaaaaacatttaagtacaagtctcctaacctagaagacttgactctcgtctcgaggagaccaaccaaaccaaccttattcttattaataaattgccgaaccatgtgttgcttgtgctggttgttgattccccggatgttccacactaaaattctatccattggatagaggaggatctctccctcctccagtattaaccaatttcttcgaccccgaaccttcaatctcattcctgttctcaatagtggcctccatatcagtctcctctaaaatctgatatgcattacctgttactgtcattgcaggttgtttagactcctttggtttccagcctttttgaaccatctgaaagccatccaattcagctgcctgccccttatttgtccctggtacctcctcaggctttttcttaacaacccacgcttgcttgcctcctgcttttttcctacattcacttgtttgatgccccattcccttacagtgctcacaaaggactggcttccactcatatttaactccaaccgaagtgttgaaaccatgtaaatcttcaaactcaatgaggtcaggtaattcatgatgtatcgagacttcaagaagaactcttggatacattacttacctctctctttggtatttgagtctaccataaatggttttcccaattgcccaatgatcttgaataatgacctctcaccccagtacttcaattccaaattttccagctgcactgagattggaatcacactgagatttt

SEQ ID NO: 325332 - DNA, 1176 bp, Cannabis indica
tacaaaaaattgttacttttagtcacaacataattttattgtaaataaatgtgactttagtcacaacaaaatgttacttgtgactaaaacatattgttttgttataagttgtcacaaatttagttttagtcacaataagtattatgactaaaaatacatttagttacaataaattgtaatttttgtgactaatacctttagccacggaccatttagtcacaacataggaataataatttataattagtcacaattttaatcacaagttttattgtgactaaaagtaagatttttataatgtacccaataccaactaattatcattggggtaagcccaccaatcttcctttatcccaagtaaacattacaaaccacttggtccacaaattatcttgttttgttgatactgcctgccacattctaattgactatgttttgaaaatggatctccttatctgtctcagttcattttactatctcttgaaaataagagtaaaatatatgcagtacattgttgtagaaatttatacaatatactatttttgataaaaaaaaaacttacacttttactttcaagtatatatattttttacaattttgcgatgtaaaaacaatattaaaaaagaaaactacattaaagtaaaataaaaataacataaaaataatatgaaaacattgcagaccgtattatatgtaaataaaatattaaaaatcataaaaatatttaaaatttattggtttgtgagttatatatactactttttaattattatttagtttttatttgttaaaaaggtgattagtgacatcggtttctaatttttattattattattattacttttaattaaattgttgtcgggtttttagcaattattttacttttattattttttattaaagtatttaacgttgattattattattttgaaagtactattatcatattagttaaaataatgagagttatattgttattttttgaaaatataatattattattatacgttgttattgttgttgttgttgttcactacaaaaaaactcctacttttagtaacaactttttagtcagaacaaaattagtgttacatgtgactaaaacatagtatttagttacaagttatcactaatttaattttagtcacaacaagtattgtgactaaaaatacattt

SEQ ID NO: 325333 - DNA, 760 bp, Cannabis indica
attcaaacttttactcaacaattctacattgggggtcttttcatagcatccctagaagatggtgctttagtttttctttcttttttcttttggtaatatgatttttggttagaacattgttattgagtacctgtagtgtctagcatttctagacatgtcatcttgcgattagatatcgatactctctaaaggttatcacattgaattatatgagacttaatatttagttggattaatagtgatagttacacatggaaaagtattaggtatcactgataccttttagcatttctcttttgattaaggatagtctagcttcagccttcaaggccaatgtgaaggagatctatcctatcaagcaaccaatatcatacaacttaataaaattatttgtgctattgttaaccttttattataatctttaagtcaacatctatacctgaaaatacatatgtggcagtattcgttataattataatattatttttgtaaattttttaaaattttgtatagtttaccgtattgaaaatgggtatgaagtttttggaacatacgtggtaaattgaaatattagaaactctatttttgcggtaaactattcagaaattttaaaaaatttaaattaaggataataattgtaactataacgaataccggcgttatgaaaacaattttttaaaaaaaaataattaacggtatgtaatttcggatatataaaattaactaaaaaatagtaataagagattataattaacactct

SEQ ID NO: 325334 - DNA, 1716 bp, Cannabis indica
taaatattattaccgtcaaaaattaaatttatgtatttatttacaacttaaaattaaacttaagcatttataacgtaaattactctccgtaattataatcttattgttttcttggttttggaggagggtcttaattttcttttgggttcacaaaagtgtctctgaaaagtgaaaagttgatgacaccaaaaaatggtataaagaaaaacagatacaatggtgaattatttggtagctttacaacctttcataatcagtctccaaatctcaaagataccatccaatggaaatatttaagtatttcttttacatttctaaaaaataaaataaaataaaataagtgattgacaagcttgtgacaacataacttggatctattgtaaataaatagcaattttggtagctattaaatttattgtattttgttgacaactttttaaaatatatatcttttgaagcagacaattttaatattattatattataaaattctacaccatttattaaacgataaaaattatcaataatttcttccaaatttataatggctaattttaagtttaactcaagtacccatcatcttactaattaaggacaaagttgctttttgaagtttaaatttgaataggaaatatcccattcctttcatattattattattatagctaaaagaacaaaaaaagaaaaacatgtgtcaaataaacaaatatattatttaattacaatttaaataaagattaattagaattttttagcctttaaattttaacatagattaaatcatattctccaattttttaactgttaaaaattatttataaactattaagatggttaaatttaagatttttgttcaattgcatttaaattttactaattcagtacttgttaatatactatatcttacttctcaaattttgatatctacaaaatcatgaacctcgaactttcacatgtgtcaaatcatacgctctgaactttcatcttagacttttcttattaaaattagataaaaattttaaatctaaccatctcaataattcaacaaaaaaaaatatatattttaccgttttcaaaattcaaaaaatataatttagtacatattaatcgagatacaaaaatactaattagcccttaaataaaatattaaaaaatgttagataggtttgttgaaagttcaaaagacataatttagtacatataatcgagacacaaaaacactaattagccttaaataaaagagcattgctataagtcaccagtggtacctagcaccttctcgacatgtcacgttgcgattggttagtgatactccctaaaactattatattaaattatataagacccgatacttagttggacaatagcaatactgacacatagaaaggtgctagacaccaccactggtgccctttagcatttctctaaataaaataataaaaagtgttagataggtttgttgaaagaatgaaattgaatatcttagggagagatgcattctgattctgtctgattcggagtaacaccccaaacctccataccccataacttcaactctctctctattatataacccctttctttccccttctcaatctcatctcatttccgattttttatcaaacactattctccgccactcccactctaaatatggtttctctttctcttctgtagttttgatccaaatgagcaagcttctgagttttaagttcg

SEQ ID NO: 325335 - DNA, 759 bp, Cannabis indica
atgggtctaaaatggtttgttcttttgggattttggattttgggaatgaggacaacatttgtagcattaacacccttgtgaatttttcctaaaattgaagaagtctgcaataaattgcagaaatcttcacccatagactcccaatagtgcttaaagaaaagaagtaacatcccatcagggccaggggctttatggttacccatagcaaagagagttcttcagatttcctcatgagtggggctcaagaggagcatctcctggtccatagaagaaattttctcatgaaagaattgattgcagttgagatcctgaccatcatcagaccccaagaatattccttggaaaaactcaatgaattcccgaccaatgagatctcgattggtgatccaaatattatctttgttcaagatactttagatagcatttctccttcctctaatagcagccgagaggaagaagaatttgatgcatttatccccatccttaatccaagaaatcatggccctttgtttccagtatagagcttttctttcgaaagatttattcaaggctctcctgatgtctcgttctgaattccaatcacgagtcccctcaagtaagctctgcataaagttaagtttttcctcaaattcttttgtaacagtgtcaaacctgccaaattaggttctatgccattgaaggagagcaacccgagtggcttcaatctttttgaagacgcgggcagggggccaagggtgggcaaccgaattccaggcatga

SEQ ID NO: 325336 - DNA, 745 bp, Cannabis indica
gcattgaaatccaggatagtcaaagctagcttgctaggggtcaagttaatgagatgaagacttctggcttcttttttacttggtctaataatcacgaggaaggcagtcgagtgtactcgaagttggatagagttttcactaatgaaagctggttagatcatttcccgaatacagaagccagctttagatggggggccttctcagatcacagttattgcctagttaaacacatcaaggctggtaaccgtgggaccaagcttccgttttgcaatcactgggtgttcaaagaggatttcagagagaatgttcttactacttggaagaagcacatggttactgatttgcagtcgttacaccaccaactgtttagggtgaaacacatcttgaaaaattgctatgttaagaagaacgaggatattattggtcagtacaatgatgcccgagacaagtttatggaagctcaagaagccttggccatcaatccgaagtgtcctacaactgttataactgaaaagttgagccgtgctaactacctagatgcccgaaaacagttttcagctatttgcaccaaaactcgaaagcttgttggttaaagtttggtaatgaaaacacaagctattttcatgcaatcataaaaaagaggagagctgagaaccaagtgtgttcgttcactgtcaatggggttgttgttgatgagtatgacaaagtggttgagcattttttaaaccacttccgcaatttcatg

SEQ ID NO: 325337 - DNA, 534 bp, Cannabis indica
gatgttaatgaaacatacttgttagtaaatctagattctggtaaaacatattccaacaatgtttccattggctccgtaagattctcaaacttttgcagagattgttgaagtctctacatagtttcatgaaaactttgctgaactgtaaggtattagctgcaaacatttcaatcagctgaatagtagttagcttttcactatatggtgcaacataaataggttgttgaaattgtgcattattatgttccatctgaatagtagaagccaccaaagtgtttagcagatcagtaagagaatgatcttgatcttgtagtgctacagtaggatagtaagaagttagttaaacatattgatcgatcccactataggaaggtctagaataatctctctattgttgattgtatgtgtaagtgttgtaatagagatcatattgatacacttgtggcgaaatataatatggatcacagtattgttgattgtacatcgccatgtttctaaagaaagatctaaaaattaaaaccacaactcgaagaa

SEQ ID NO: 325338 - DNA, 1737 bp, Cannabis indica
gggcataaaacccaacagggtgaacttattaaactagccccagttagcaaggtagggaataaaatacaacgtaaattattcctgacattgctggctcgcattatggtattaaagttgttgaggtgagcgaccggatctgtagtcccatcataatgattggatgtaaaggtttaagctcctcatctaagtcgtaatcaagcaatttcccatcttgatatttcttgaatttgttttctaactcgctgattcgtattttgattggatcctcttgctttcaattgtcataaagttgttggtgtaaatcaagaacattctgattcaagtgctcgcacaaattaggttgcctctgatttaagcattcacgaagatctggttgtcttcattcacagttgctcatggacctcatgtctgagtaacactcagattgactactccatgtaagttgatcattaccacggaaaggtctatcccctcctcatgtggatcaactgtgatatagggattgtgaatgtcccgagcttgaactttcctcatcacgtattggccatctcctctgggacaggtttgatacatgccccctactagggtttgtataagcctcctccctatcagtgcgagaagggcgttgacggtgtctcggtggtaacccacttgtcctaggttgagtcccaggatttctctcgttgccatgagggatttcctgttccctagtcctaggttgtcttctgtactcgtttttacgagaagactctggtaaatcattgttttcattcccttgggttgtgaacccccagagtcctcgaggcacttcttgacgaggtgcttggtcatttggttgtccatctttgggaacatccctagtttccgcaagttgctcctcctaagggttctgggggttttcttgagccgtctcctacctcctggttctcgaaccttgaggcctacctcgcagccttctcactctaggatcaggttggttttgtgtgttgctttcttatgttgccctggtggaggctgcctccctttccaactcagcattttgttggtcttcctcaaccagacgttgttagagttgacgattttccaactcaaccaatggtacttacctagtgggaccgtaggcaccctcactcatacgagtagaaccaccagcattagtgttgatttcctcattcccagtttttggaatttatcattatcacgttggcttcttcttgaacgagttgatcgtgaattgggtggtctctgtgagcccattggttcttttctaggatgacgattggtctctttaggacgattgttgtattttccccattattatccatggagaaataattctttcatctttggttaagagggatttttcagagcttttatcatgtaagctctcaatgaaagcaccaagatgttaacacagattttcattaatgattatgagcctatttttgtaatagattagacacagaaactatgagatattttagaagaataattgaaacaataataacaccgggtttttacgtggttttgcagttaacactgcatagttcacgagtctatcttatttagatatttctagataccgaattagggtttcctttttctttctaaggtttttcatccccttttttgtataatctaccctatttatagtgatataggtaggcagttaattacatttaagttcaaatcctataacaatattcctcgaaattgtaggctttaattacgctccac

SEQ ID NO: 325339 - DNA, 743 bp, Cannabis indica
aaatgaaaggaagacagatcttgatattcaatgaaacagacaacgtgattatgagaaaaattattaatgaccacatcggcctctgatttccaaagtagcataagaccacctccaagtcccgtacgaggaacctcaatgccattaggaaaatgtaaactattacgaaacttattaattctaccagcttgcaattttgtttccataagaaaaggcacacagggagcttgctaagagataagcaagcgtaaaaatctgaatgttgtggggttccccaagcccctcgcattctaacttacgagattcatggcgagtcacagtggagcatagcatccaccgcggaagaaccaggctggtgcaaggctgaatctgtagtaataccggaaacaactgaagcaggagagtgatcagtcaaggctggagacagactgattagtgttttaagaacgacagcgtttaaggaatttgcgaagagattcaaatttactttgtcgtttcagagtattatggtgtccgagaaagtctctatcaattgatggagatgcattgcttgaatgtatattaccaaagttatgggccaatctattggtaatatcatagaagggagttgtagtagaaattgactctgttatgacagccttatttttagaaaagatagtgttgtgagaagtatgatgaggataatgaaggttagtgtagggagggtaagtggtaaagggaagtgatgtatgttggaaattatttta

SEQ ID NO: 325340 - DNA, 1599 bp, Cannabis indica
aaataaaagtgaacaggtcttaacatgttcaacaactttttacagtgaatagaagaaatcttctaaatagaatctagaaatttgatgtacattgtcttaacaaatagcacaaaagagattatatgatgaattcttacttaatagtggaccctcccttcccaattatgccaccacaggagctatttggaacaactagtctcactttagttcttggatcaacttcattgctttcttcatcagcaatctatacaatgtgcaaacaagtatgagagcacaattatagatcatcaatttttttgtaaaagcgaaattcacatcataaagaatacctcactcagcaacttagcaagaacaagttccattgccttaagaacttcatttattgttgccgatatcataatgatcctatcagttgtgccagggaaaaattcatgattgcgtgacagctgaatacgtgctccagatgttgattgaaattcagtgattgttgccccaccctttcctataacagaaccagctgcagcatttgatacaagaaacctaatgtatgtaggcctctccaaagattctggcaaataaaaaaaaagtacatcataaataagttaggtatgaaaatcagcagcaaaatctgagccaataagtgataaatctatgtccgcatcttataaattgtggagagaattcacagaatagaaacctggaatttgcaattcaagcatttatcaactttcaaaaataaataaacaaacaaagatatatataataaataaataaataaattcaacaacagggatactgaagatgattttatattaaaactatctataatttcattactaacatcacagagattttaattggcgaataagtaaaaaatgtgtcaatgctggatatgatttcagatcgacatcttaacatcttaacctaagactaacccacccaaaatcaaatgggtacccagcacaataatctgttgaaaaatcataactgttaataaactaataatgatatcaaactgaattcaggcagctgggacattagttgtagggagcattgtcagcaaacagacaaaagatttcaggagtgaaactgaaattaagttccaatttattctatgagaaaaatactttaacttcgtcaaaataaagttatacatcaaatgacacatgcctgaaagaatatataactttttaatgaaccgttagaaaattgatgtaggacaataatgtatcgacttcttgaacctttgatgcagaaaagactgtcatgggttccgatacaaaacatacacaaagattctcttcaacaactatttcgttactaactacaaaaaaaaacttaatttcatcaatacattatttcactaaatccaatagatcgaaaagcaaaaaaaaaaaagtaacaaatccagagcaacagcatatacttccttacttttaaaaaccaatttaaacaaataccaattgcgcagcacatttgtcaatcacagaaaaaaaattcaggtacatacaatacaatcacccggaaattcaggatgaatctgtaaaatgtaccatatggtagcaggtaaaaaataaactaaaaaaaattaccgaatac

SEQ ID NO: 325341 - DNA, 1686 bp, Cannabis indica
ttatatttaaaagtattaccggccgattgatccgcagctaataatagtgtgagtttaatgatctgacactattattagcggcgagtgtgtcagtccaccactaataatagttattagcgaccaggtaataccagtggattattaccggtggaccccttcgtattactctttagtggcggaataagggattattaccagcggagtggtccgcctctaataaccataattgttgtagtgcattttaagcttctcaatctctgaccttgctttgctgaagatcagtatatcatcaacatagagtagtaaataggtttgattattgaaatacacacataagtcatacttgcttttagtgtatccaatatcatgcatataggtgtcaaacctcaaatcccattgcctaggagcctgcttgatgccatgaagaagctgtttgagttggcataactcatctaggtttccattttcaaagccttcaggctattacatatatattttctcttccaattcttcatgtaaaaaagttgtccttacatctatctatttaatctctaggtccacgtttgatgcctttgccatcatggctctaattgaagcttacttgaccactggatagaaaatctcatttaattaataccttccttttgagtgaaccccttagcaactaaccttcccttgaatttagtaggttcattccctgaaccaacttgtagaattcaggtttcttcacaacaatccaagttttattctttctaatagactgcacctcttcttggatggcctgcaaccatgttatagcatctttacttctcataatttctcaaaagctagtgggttctgaactgtcatcaacctcctctgtaatcataagtgcataagtaatgaatttagcataaccaaatcgatcaggggccttagctaactcatagctgtttagttcctcatgatcttcattatcttcatcttctgttacctcagttctatctggaacaacattagttggtgttgtaggagcaacctactccacttcaatctagacattctgatccgatataggttcattgtctttggaagtgctcttggttttcatggtcatttcatcttccttgaaaacgacatctccactaatcaagcacgtcttgaatccatgttctaagcaccacactctatatcctttaacccctttcagggtagcctaaaaacatgcatctcaatgctctgggctacaacttatcttctctaacatgcataaatgcagtacatctaaatactttcaagtgatctaagtttgagggtttacctgtccatgactcttgtggggtcttgaagttatttggcacagatgatgatctattgattaggtattaggttgttttaagagcttctccccaaaaggttctatctaaaccagctcctagtagcatgcacctaaccctctcaatcagtcttctattcatcctctgagcaacaccattttgctgaggaattttgatcacaattctatctctttagattcccattttggcacacaatcccttgaacttattcgagcaatactcaagggcattgtcagttcttaggaccatgagtttgtttctagtctagttttctaacagcctcttccatgtgtcaaaggttcctagagactcatctttgcttttcaacaaataaacccagactttcctg

SEQ ID NO: 325342 - DNA, 1365 bp, Cannabis indica
taaatttgatagtcagttttgtggaaataaataacaaattcgttaatttatttcaggtcgtaacgctcatatcagggaagatcctattatagtgaaaaatattccatactaaaaagccacgaagacacttaagaagtaatgaatttcatacctctataaaagctgaaaaattatgaggtaagcagtctgtattcgttagtttttataaattttacaaaacacatatatccctttgaatttttcagaaataaataataaatgttaaagtcatatattgtgacttattataaattattttcacattaaggataactatattataattatgtaaatattgcgattaacatacttttattattaatattaatctacttttaaataaaatagaaaatacatagcataaaatttagtatacatcggatctaactttttactaatttgtgtaaatggaatgataactggtggttatccttaagatcttgttatattaaaaaactaattaaataccattaagaaaaactaattaaatattcatattttttttttcttgcaaattaatgaagaaaaaagaaattattgaataggtcaaacttcaaacttcttattagaagccaaccttttcggctagtgatataaacttgtctatatttatcatagtatagtataataggaagagtaggatttagagaagtgacaccacttatttatttattttcaaattattagtattagtattcacttttaatttcatattaaattaatgattatagatctctttattaaaaataaataaataaatctcaagttgctatgctatcctatctctttattcatctacttggcattttcttttcttttgttcacactttttttttggttggggttcttcttttcacacttattgatatttttttaatatatatttttttaatatacattccttgtctcttgggaatttaaattattttgttttttattcactcaattattatggatagatacttttggatttctttttaaagttgtaaagaatataggactccacgtaagtttcttattttctattttaaaaaaattcatttgtataaaaaaaaatggttgggagaggcatatcatactattataaaagtgtcttaatgaagtgatagttttattgacatataaaccctttgattgatgatgtgctatttacataatgacatgtatatcctattcatatacctttagtttgatgatgtactatttacataatgatatatatatatatatcctattatattttagaatttaatgtgttcaattttctagtttttttttttttcttaaagttaaattatgtaaagtcaaatcttctttagtatgtgt

SEQ ID NO: 325343 - DNA, 796 bp, Cannabis indica
ggaagacctcgaggctctaggaccagaagacaagaaggaaactaagggaattccccaaatactcaagaagaataacctaggagtacaagggatgtcccaatgtacagaacaaatcaaccaaatcctaataatgaaaggaaacaagaacatcgacgagatgttccacaaacttcccatggatttgctaaccaagggaacgaacgaactgacatgccagaatcatctcgcatgaatgaagaagagaggcagcctcgaccagggaattagggatttccttgtgataatgaaagaaatcctagaaaccaaccaaggtcaagtggtcttccttcgagacatcctcaacgtccttctcgtgcaaatagagaaaatgcacacacgtacttgagtagaggacatatatctaatctcttccaaagaagaaggacgatgcgagatgaagtaagctcaagcacaagacaatcacgatctggtgggcatagtcggtcgagtagaaaaacgcgagatgggagtagctctcgatattattatgatgaccaggaaagcataaataactcacaaagttatcaatccgagagttacttggggagaagatctgtaagtaactatgaacaaaggcatcacgagcctaatttacacgagagattaaatcaaaggcagcctgaccttcgcgggcagctaaatcaaaatgcgcttgatttatgtaatcaactaaaccaaaacgcaaatcagcagccagtggatcccatccaattacgaataattcaactagaggataaatttaggaaatatcaagatg

SEQ ID NO: 325344 - DNA, 827 bp, Cannabis indica
aacttttattttgttaatttaatataatgtataatattttgaattaaaaatatagtaaataagtagttatttttgataagttgttaacaaattttctgaaatttgtaatttcaattgctcaggttttattttgttaatttaattttaatgtatattcttttgaagttaaaatatactaaataagtagttttttttttaaaaaaaatgaaatatctcaaattcaataaattaaactagcattctcaatgcaaaaaatgttagaatttataagtaatggaaaactcagaaacgttacaacgaggataaaatcgagaatgtctagcagcatgatgtgctactcgatttgttgatctttttataataagtagttataatagataagtatttaaaaaattctctaaaacttgtgatatttttttctccttccaagactttgaccatttaacaaagagaaattatagtaattagtaaaagatctaaaatttaggtaaatattctcattttaaaacttgtagagaaataattcttttacactctttattatttaaattatcttttgtcatataaaatttatgattgaaatctatataaaaaaaatatgtatgttttgtctcaaattactcatgcgtgcataatttgtgtgataagcaattcattaaagcaatagcaaaaataacattataaaagagatctctcctttacttttttttaacaagaagcatacacatacacctaaaatgttacatatacttccactactgagactattatgcaacataagctaggaaaatcaaattaaatattctactattttattttatttttga

SEQ ID NO: 325345 - DNA, 649 bp, Cannabis indica
tttcccacgcaggacgagcaagaccctgctcggcacgagtaaggcaagtccaggcccatttcctcggcttggtcgagcacgtacacgtcgtcagggcactcgaactcagtctccccctcgggtgtgattagcttcaccttgtaggctgccatggcagtcacacgccctcctcggcttcctgtgctggccttgagcccgaaaagtgcctgaccaacgttgggaagtgccctcaatgaggtcgtggtgggttgtctcctcacaaacgaggtgctcaccatggcactagacagagctgcggatgtagctgccattgttttaagtggttttttttttagtgaactgaactgaataacaagcaatgtttgatattgggatgaagatggatcgtatatggtatggcttgtggaaatagtgtggcatggaatcctatctgccacgtggcagcatgttgtggctacttgctttatcttttgttatcaccacacaaggccaaactcttttgcatctccacccatttctttgtgttttattaaaatatttattttgtaatatgcttatattttgaaagggaaatttgaatttccataactgcataactttataatttttttttcttaaatgcatatttattaaaatttgtaatgtatga

SEQ ID NO: 325346 - DNA, 1606 bp, Cannabis indica
caacaatcacagacaaaattagcaacgagggttgctacagcagcaaggtttggaccgacccgtcgggcagggtcgtcgaccacgtccggatgtactttgtatgtccaatcagtacaaaaggtagtgccttcacccttttctaagttcccagatgaaacgaccatatccgtcgccctaactctggtcgggatggaagtgatgttgcacctcgggttccggggaaggtgtgggttcactatttatttccatgtcttcaaagctagagtttgaaaggttatcactggatgaatatgggataacacggagacgaggatgatcatcactagggttcatctacaaaaggtaggagacaagaaagtgagagtaggtcggagaaacgaatgaaaaaaggttgaatgtaccgacaaggttcgattgggaatcaaaagcaaaaatttcacccaaaaatagaattttcaacccaaaagttcaaaactttgaattagaatttgattttcactaaacccctaatggatgagtgaaaataaatattataagattaaaatcaaagcgcaattaaaatcagacgtcgtggttaagtataatcaagatatctaaaccttaaacctaggatttctatggttatcctagaatagttcaagaacgggcaagattctctacatgaaatttagaaaattaagcatggatttcattgcaagtgtatgaaagaaagaaataaagaacttactcactggtttaaagcttattgttctgctctgatgatgttgtcaagagttttcctaggaatccttcaaagaatttgggagaaaaattcgcctaaaaactttttactctggtttctcaaagtaagaatgtctaaaaggatcacagaaggttctcgatcctattcataagtagtttagaaaagggaattaatcctttcaaaaatttaaattcctcaaattcccccaaaaagtatacattatgtactcattacacgcagagtaaccgtcagcacgcgcagacattgagccatgattgcaggcataactttcaactagcattaaatgagtcgaaattgaagagacccctagtcaaggtcacgtcagtttgtcattcgatcctaggacacgcgtcacccatccagacaagaatctaggctgagtgaaatccatgtgcgactaggaaggtcccgcacagacttgggggaaaatgttatccagttttttgcagcttgatgtggcaataggatcaaatgacttgtgtcccatattttcgatacctaggtggaggaaaatatccctagcagcctgcacatgactaatcaacatatataatagtaggttatctaagcatggttgtggagaagatacccaaccaggtagaagcatgttggtgccgagcaatgtacaagggttcagagattaatcttgattgtccagatgcaaagacaatccttataattgtgggattaagttagagagaaatggaaacctattctatttcctatttcgtatattataactatagaatcattttaatttcctattttgtgcattgtaagcaaaaggaaaactttcttttaattacattacttagtcgctttattatttgactcactatcgtt

SEQ ID NO: 325347 - DNA, 1433 bp, Cannabis indica
actgagtctagaacgttcatacattgaccataatatcagcatatacttggtactctagtcgtaccgttgtgatagcgtcaattagtacttatgccaaacaacattcattggtatccaatataactctatgtatactaatactactatttcaattgtaatctaacagacattcataaaaatacatactaaacatgaaatcacatatgcatataattatactaatcttatctcaattctgaatttaggtgtgccggtcaacctgagtgaaactgctgcttgacgatttacaggcccctaagtcacaatattcgtaaaactgatgagtgacacgctaaatcacttttcaaggacttcaaatcaaaactaaaaatttccctatcgatgaataacatggcaataccctaaatatcactaaaataggaaaatctagggtgccctaaactgccataaccggtaaatcagatcccaaccggaaaacttgtttttaagcgtgctaccaggggaaccagtcaaccggttccaagtgcaaatctaaaccggtcgaccagttcagtgcaggaaccactaaaaacttcacacacctcaccaaacaatcccaattcgtaccaaaccttttagagtacctaaacaatcgataaagaacttaaatcatgcaataaaactaggtaatagcctttgaaactaaaatcaccatggaagaacaaagtttgagctcttaggctcaactttgtccaaacatcacaacaagctcctaaccaacctcaaagcagctcaactatcctcaaaataacctctgaaaatagaatcaacaacaatttaaacctacaaaaacctatcttcaacaattgcatgaacacctaaactttaaatcacaaaattcaaaggaagagaagataacttgcttacaaagagttgttgcctccaatccgtaagaatttcctcaccaacaaccttctgaattactgaagaaaaacaagaaatttcccaagcttctacgacttctaggtgaccgacccccaaagagagaaaaattagttatatctcttttgcttatgcctttcttcatgggagatggtttcttgtatgacaccatagactgggtcgttgcataaattgtctctatgtcatctattagaactgagaaagcaataaagttagaggcattttccctgggatgttgtttggcgcttgcctctttttttgttaccctttctattatcgttattgaaacttttctcgtttaaattcgaactgttaggatattgtgaattatgggcagacgtactggctattgtggtatgctgctgactttctttgcccaatagtatcgacacaccgtaatgcttcctcgagcttaatgaatccatctactcagtctagaaattcagccatcaatcccatagttaatcttttgatgtccttccataactctc

SEQ ID NO: 325348 - DNA, 719 bp, Cannabis indica
cccagcactctggtactcaagacttccacatatatgtaatcagcactactctgtataattcgatttctaaatcatttgctaactttgctaatatattcgtgaaggcattctgatccttagggacatggtagatagtgtatcccttaaagttttgctgcaacactctcgattgagacacgtaagcatccatattttcaactttggcctggtactctccgaataatttatttaccactagttgggagtcactatgcactttgatattttgggcccctacttcttttgccaggtggagatcgataatcatttattcatgttccgctttattgttagaggccgagaatttgaaacaaggcgctttagagttgatgcccttgtggagaaattaagattacctccgctccaacacccttttcattcgacgctccatcaatgtagactttccaaatatctagttttggaactggctcttttggattgttagtcattccagtgcattccacaataaaatctgccaaggcataccccttgatggaaactctgggctgataatgaaagtcaaattggctaagttccgtagcccactttaacagtcttctagaagactccaatttttgcagctattggcaaagagggtgagtcgtcaataccttgatggcatgggcctgatgttgggttttatgccctaaataaaactctttacaatctgattagtaatc

SEQ ID NO: 325349 - DNA, 640 bp, Cannabis indica
aaagtgtactttggcagcactctatgcatggatttctatataggaaaaaaaaccattttgcttaaactttcagatattaattattattattattgttgttgttagttaaaataaatgagcaatggatatagataactagataagcactacccttttaagttttttaggggacaaaaaataaaaaataaaaaaaatgagagattaaaagtacaagaaaacaaaaagaaagggttacgtatctttttcaaatgacatcaacttcctctaaggaccataataagcttagaacattagttctagtctatgcttttagtatataatatggaagaatagtccgaaaaagaggaaaaaataaataaaaaaacaccagggctgctaaaagtgtcatgaaaacatttaaaacttgattgattttagctcttcatattacaactaagtattatcttaataattattatataatattactaaattatttttaaggtgtcacgttgtaataatgtttaacatagataagttataatacctcaaattttagctcatgaatacatctccacatttaattaaggtttatctcttagttaaatatattttctctatttttttgttgttttcttctttttctttcacattatttata

SEQ ID NO: 325350 - DNA, 2358 bp, Cannabis indica
gacccagcatgagcccatccttaatttagttgctacccaagcttcttgtgctaaaaacctcaataattggaaccatagaaaggattttaattttaaaaagcacattagcaagctcgaaaaggacctagagattgcccgttctaatttggtttgggatgataatattatccggagaattaaagagctccaatccaggcttgactctctcctgtacaaagaagaaacttattggaaacagcgagcaaggacccaatggctggcccagggagataagaacacaaaattctttcaccgctacgcctcccacagaaagaaaataaacaaaatccaaaagcttcacttggccagcgggggtatcgtctccgacgaggagggcattacccgtgaaatagaatcccattttaaccatcttttcacatccacgaacccttcggaggaggacatgaataaagccttggacggaatcacgtgctctctctccgagctggataaagccctccttgccgaagagttttccttggacgaaattaaaaaagcttttttccaactcccctcggataaagctcctggtcctgatggttttaactctaatttctacaaagcaaactggacctctattagaaatgatgttctcaaagcagctgccagttttctcaatgaaaatggggacatcgctcctctagataccaccctcatcactcttattcccaaagtcaaacaacctacttccctctctgaattccggcccatcagcctttgcaatatcatctacaaagttatctctaaggctattgcaaatcggctcaaactcgttctcaataatttgatctctcccaatcaaagggatttccttcctgatcgactcatctcggacaacataatcattgcccaggaagtagcgcactccatcaaacttaagacgaggggcaaaaaaggatggatggcagtcaagctcgatatggccaaagctttcgacagagtggaatggactttcattgttgctattcttcggaaattccacttcccaccccggtttgtccatctggtgttttcctgcatctccacgaccacatttcaattcaatctaaacggtagagtttctggcagtgttaccccatctagaggtatccggcagggtgatcctctctcaccctacctctttctcctttgtgcggaaggcttctcctctctcctccgccagaaagaaagaaacaagtcccttctgggtataaaagttgccaggcgggcccctgctatctctcacttgctttttgcggatgatagtttcctcttctgtcaagcgtctattaattcttgtaacgtcataaaagaggttctcgatgtgtacgaaagggccactggacaaaaagttaacttctaaaaatcctcgttgtacttttctcctaatgtggagttgagggaccaaactctgatctttgacttcatgaggatccctgttcgtccctcttttgagaaatatctgggtctccaacacattggccgaacgaaaaaacaattgtttcattaccttcatgacaaagtctggggccaccttcataattggcgaaacaaagtcttctcaaaaggggcaaagagactctccttaaatcggtcattcaagccattcctacttatagcatggcttgcttccgcattcaagtggccacttgccgctcgcttgaatctaccatggcaaacttctggtgcggaattaatgacaacaattgccccaaacactggcaaagctggaaaaagctctgcaagtccaaaaaggatggcgggcttggttttcgttctctggtccattttaatcaggccatgcttgcaaagcaagcctggcgcatcttaaagcaaccaaactcaacggtttccagaattttattcgcctgatattaccctcagtcttccttccttagtagctccacggggcattctccttctttcgtttggcgcagcatttgctgggggaaagagttgcttagcaaaggcctcatctcaaaaattggcaatggacagaacacatccacttcttctgattattggatcccgggtttccgtcaagttactcccttatcccccgtccctgacaaggtcgcctcatttataacatccactatgtcttgggacatagctaagattcagtcttgctacccggcccacgtggctcagaccattctttccattcccctccctcttaccccaacccaggatgatctgatttgggaaccctcaaactctggggtctatacagtcagatcagattatcacctcagtttttctacaactaccccacctgacatcccctcttcctcttccccctcgccttggtggaaaaccctttggcatctttctatccct

SEQ ID NO: 325351 - DNA, 974 bp, Cannabis indica
aattaaactaatgagaatatatatattgtatgtatgcacctgcagcagcggcagcaacgacatcggaattggagtctgtagtatgaagcaccagcctggtggtataatgaggatgatgatgagtttgagtttggtacaagtcagagagagctattttgatgcatttcagccccatccttcccgcccttctcttaccgtccacaaccacccccacttttactctcacaacaaccttattatttgagttttccgacatcgccaaatttgatgacaagataattattacacaaacaacgaataccataatcccaacaacatcattcatacatttcttcatcattaattattgcagagagaaagtaataatatgaataataagtgctagaaaaaagttgataaatcaacgtacgagactttatagcaaatcttgtaatttttttggcaaaataagatcttcaaggccgttgcagcttcagagaaatttcatatggaagagaaataatccaactagctagctactactatataattaatatatattgaccccacccaattcacaagtcaagtgttgaggttcaacctttttattcgaaaattatagcgaccacacatacacttggatgttaagtaattaagttcaatttatatatatgagaagaagatacgatgacgcatacgtgtgtagaaataagacaatcaatatataccgtataatttatttgattaaataattatagcgacctcacttacacttggacttaaggttttgttttcggttgataataatgaaagaggaaatagaaaaataaaatatatatataaaatctatgttttctaagctagtgcaaagttgttttagaagtgatgaaatagaagtaaagcgcttatctaccctttaaactgggctgcacaataccaattgccaattgataatgtggaaacggacgccttaagagtatcttttgctttgaact

SEQ ID NO: 325352 - DNA, 1594 bp, Cannabis indica
aaatctgattatatggaaatgagttttagttagggcataaaacccaacaatttacgctttggacatcctattttacggattactaaatcctttaataaaattcttcattttaatgattgtgactcatctttgtctccttgccatgtatgtcatttagctaagcaaaaaaggctaccctttaattcagctaataatatggctcctactgcttttgacttaattcatttggatatttggggtccttttcacaaacccagcatagaaggatatcaatattttcttactactgttgataatcacactatatttacttgggtttatatgcttaaaaataaatctgacgtcaacattattgtacctcaattttatgcttatatactccatcaattttctatttccatcaaaggcatacggtgtgataatgcgaaagaactaaacctgtcatcttttttacaactaaaggcattctcccgtatcactgttgtgtagaaagcatcaacatatattgaatgtcgctcgctctcttgcttttcaatctcgtttatctcttgggtattggagttactttattaataccgttgtttacttactaaatcacacaccatctattttacttaaccttaagtttttttttttgagttgttgtacaacaggttgccctcttatgatcattttcgcacatttagttgccttgcatatgcttccactttggacagctcaaggcacaaattttccccaaaatctcaggcttgtgcattcattggatacccgattagtatgaaagcttatactctacttgaccttgaaatacatcaaatatttcactctagagatgtcattttttatgaacatatttttcctctaaaaaatacatgttctaatgataatattgatgcacttttttctagcactaatggttcacctattggtctttcacaggctcctttaaaagttatggtcctcaggcctatacaccctccactgctacccgaacatgtagccactcccgccattattcctactgaattactgccaccaccagcggctattctagcccctacaaatgactccaacgtcaccacaatatctagtcggacgatcgttcgtccaccccatctctaagactacatttgtgagtattctacctcacatcccatttcaaattttatctcttatcacaaattttctcctaagtttcatgctgccattttaagtgcttatttagtttctaaaccaacttcttattctcaagcttctaaatttcccgtatgggtaaaagctatggatacagaaaccgttacacttatagccaataaaacttggaatgttgtctctcttcctgctggccatcatttcattggctgcaaatgggtatataaaataaaatataatgcccaaggtgaaattgaaaggtttaaagctcgtttagtagctaaagggtactcccaacaatttgggatagattaccttgaaacttttgctcccgtagcaaagtttaataccctcagagtcctccttgctcttgatgccattaataattggcaactatatcaaatagacattaataaaccttcctccatggtgatctcaatga

SEQ ID NO: 325353 - DNA, 760 bp, Cannabis indica
aattcatattaggatgttaatgaaacatacttgttaataaatctagatcctgataaaatatttccaacaaagagtgcattggccaatgatttcccaagcttgacaacatactgagcatgtcgaattggtgataatttttctcttgacaagagaagtagccactggtaaagcatcatttataactctccatgagaaaatttttactttcggaggaagtggtagagcccataaaaaattccacaaagaagatgccgaagttgagcttgaggagttctcagtttcatcaagcgatctagccaaatgatatcccgattggactgtgtaaatgtcggtgtgttggtgatgccatattagcctatgatcagagctgaagtaactaagtagaactgtgagaattcgttccacatcgagaggtgaaaaaaattgctgaagcagaggcatattccattggcggtctggtgtgataaattcgcaacagtaccatttagaggccccgtgtaacgaaaaggcaggaatgagctatgacctgggagccaaggatcagtaccgcttagaatagatctcccttcgccaaccttccaacgcagaccagatttgagaaggtctttaccccagtgaatagcttgccaagttaaggaaggggagtgaccgatatgagcttctaatactgaattatgtgggtagtatctgcttttgagaagctgtccaagtaaagagtctggtttttcaacaaggcgccaagcttgttttgcaagtagag

SEQ ID NO: 325354 - DNA, 990 bp, Cannabis indica
tgagtcgtgttgcttggttgtttggggtagtcttgtcacaaagtccatggctacatcttcccacttccattctgggatttctaagggttacaacatccctgttggtctttgacgttcagccttaacttgttgttatgtgagacatctggctatgttcaactacatccttcttcattcctggccactaatacaaggtttttaagtcgttttacattttggatgaccctagatgcattgagtagggtgtagtgtgtgcttccatcatgaactttcttttaagctctatgtcattggctacacacactcttctctcatacctcaacatgttgtttgtacctttggagaaatcctctgcctccttctctagcaagcatgctcttttcttctgtaagaactcatcaactatttgtgcatctttaagttcttgtagcagcgtcgagacaatggttacattagctagtttttgtgtaatgatctctataccacttctttggagtacctactgtagtggcatttccatttgagccaatattactaagctggtataattgcttctacttagcgtgtctgctactatgttggccttccctgggtggtggcggattttgcaatcataatccttaacaagctctagccatcgtctctgcctcatgttgagttccttttgtgtaaagaagtacttttagctcttgtggttggtataaatttaacatttcccctcatagagatagtgcatccatatttttagcgtaaaaagtactgctgccaacttccgatcgtgtgtcaggtagctttgttcatactccttaagttgtcttgaggcatacgccgctactttgtcattttccatcaacacacatcccaacctttgtttcgatgcatcgtagtacactacaaacgtatccttgttattgggaacacataatacatgggctattattagtttgtccttaagtgtttggaagctaccctcacacttctctgaccaga

SEQ ID NO: 325355 - DNA, 1767 bp, Cannabis indica
tcacaatttttaataattaattaatatattaatattaaactagttttagaaaatcacacacgtggcgttcctatggattagggcgttacataccccccggaggagcaatcccccaacaagtccctggatgacctaatggaagagtggacgtgatctctggtggaccccatataggagggaccaccagaaaagagttgaagcattatgctggggccataaaacacgatgaaatatgggaagttacccagctctcagcacaaagacctcggctcatggaccagcccattactttcacagaagaagaagccaagctggtgcgtttccctcaccatcgccaataaaattgtagcaagaatattggtcgataataggagttccgtgaacctgttgtttaaagaagccttcacaaccataggcctcacggacagggatttgtcacccagcggctcctagctcacatgattcaatgggacaacacttaacccaatgggaaaagtgagactaccggtcaccctatgcccggatactcctcagagtacttttaagtactacacctttgtcgtggtggattgccccactgcatacaatgctatccttggtcggccggctttggttgattttggagcaatcctctccatccaactcttatgccttaaattccctactcatgaagctggagtggggacggtgaggggaaatcaaggagaggcaagcaatgctacaatgttgcaacacacttgccggtactagtagtccgtgagggcagtgaagcaccattaattgaagatgagttggatccccgcgtgggatccgagaaaaccgtagaacatgtggagtacaacatgtggagtacaccgatgaagtgcaagtgtgcgacctcgaatccaccaacatcctctgtctaggaaaaaacctagagctggaggaaagaaacaaaattattgaagcactaaaggcggccatagttgttttcgcgtggtgtaagggggatatgaccggcataagcccttacatgattaccgatgtcctcaacgttaaccctggcatgccgccagtacagtagaagcagcgtccccttgatctagtaaaagcaaacgccctggaaaaagaggtagacaagttgttgactaacgtcctgatccgggacgtgtactacccataatggctagctaatccggtattgatgccaaagccaaatgggacatggcgggtttgcatcgacttcaccgatcttaataaggcctgcccaaaagatttcttccctttacctcagattgaccaaatggtagacgccacctcagggttcaagctactgtccttcatggacgcctactccggatacaaccagattaagatgcatgtggaagatcaggagtgtactagcttcaggaccgacaagggggtatactgctacttggttatgccctttggattaaaaaatgctggtgctacttattagagaatggtgaaccggatgtttaagggcctcttgggaagaaatatggaggtttacgtggatgacatgctagtcaaatccaagacatgcatggaccatgcagacgaccttacagagtgcttcgaagtagtctggaggtatggattgaagcttaacttgaagaagtgcacttttggagtcaagtcaggaaattttttaggatttatcgtcagccaaagaggaatagaggcgaaccctgaaaaaatttaggctttactaaacatgccttcccccaagaagcacaaagacgtgtaaagcttgactggaaaggt

SEQ ID NO: 325356 - DNA, 1251 bp, Cannabis indica
tcatgaggaccagaagatatttgcttccacaaatgaaatttttatggaacatgattatatgagggattacaaaccacacaacatagtggttattgagaaaattagaaatgagcagatttctgtaccgtcaacttcagttctatagtcatgaggaccagaagatatttgtttccacaaataaaatttgtatggaacatgattatatgagggatctcaaaccacacaacaaagtggttattgagaaaattagaaatgagcagatttctataccgtcaacttcagtactataagctgaacaaccaaccatggttgccatagttcctaaaaaggaattcccggtacatcatcgtagtgggagagttgtgagagagcctgtttgctacaaacatgaggcacatatttttatctctgacacaaacaaggacgatccattggcttacaagcaaccaatggatgaccctgacttagacaagtaaaacaatgtcatggatcaagaaatagattccatgcacactaacaaagtttgggagtatggaatgatatctatagaggtaaaacttatggggtataaatagatttacaagaagaaaagaaatgttgaagggaatgttgaaacctataaagcaaggcttgtagccaaggacaacacgggcatcaattatgatgaaaccttccctcatgcgaccatacttaagtccattcgcattttcttgtccatagatgccacatataattatgagatatggcaaatggacatgcttttcaaaatgaaaatcttgacgaaactatttatatggaccaacttgaaaggtatgtgcaaaatggagaagatcaaaaggtttgtaagttacttaaatccatttatagattgaagtaaacctctagaacatgaaatatcatttttaatgatacaaataaaacatacggtttcgaacaaaatgtagatgaagtttgcgtgtacaaatacatcaaaagtaatgtagtagtattatttgttttttatgttgatgatattttactcatagaaacaatatagaaatattatcagatatttaagatactatattctaataaaaatttaaaattgatattaattaagatatatattttaatctcgtttaaaaaatataataattaaattgataataattttatttaattaataaaatctttttattttattattaataatagtttgtaatttttttttatgaatattaccccaaaataatttacattttataacctaat

SEQ ID NO: 325357 - DNA, 1093 bp, Cannabis indica
cctagaagcttgggggtaaatattatctgtgtttttgagtaggtgacatgtggcataaaagggaagagataattttttgatctcactaattaaaaccccttaataaaacccaatgacatagaagcttcactaatttgggaacaggtcaatactgaaaggtacgtagaggcttacgtcaccttacttcaacttctcggatacggatgacatattactactctgaagcctggagtggtccaagctcacagattgcccaagtgatacccaggcgggtgctcgaagtgcttatcgcggatgctaaccacccaaaagagttacaaacatctaccttggatacaaacctggatcgcccagcgacggttatgatttttttgacacagaattaaatcttgcccctatgtccaggaatggtagtgcgtgcacctcttacacctttttgccatacgattattccaggtatttacttttaaaggttaaaccttttggcgactacatccactacgtacagtggtcccctattgtccagctacttcaacgcacgagcacaattccttccatgggggccaacagtcttttttgcatgtattttaccctattagtgggccttttgcaaaaaccctaggcggtcatggacatgtccatacccacccttagcctataaatatccttctatttctatacaaaagggggatcataaactaaatagtcgaagctctgctattataattctaagctttccctttcttcaagagaaacttagaatacagagttagggtttcttgtagaaacattgtaaaaacatcaaatgcgcccttagaggctaataagctgacccgtggactaaggttatataacacttgaaccacgtaaaaatctccatctcatatatttatgcatttgactatttcttaagctcttaaatacttagtttctgaaaatctctgtaaacagttatagaagttatagatgttcagatctatgattaacactccactcaattgcactactgagtttccaagatgtaagtattatgcctacgtgtaagctgtaatgaacaagtcaaagaacttgtgtaatacatttaagttagagc

SEQ ID NO: 325358 - DNA, 1147 bp, Cannabis indica
gcctttattgaattcttatgttaatcacaatcaaaaattttattcttataaacgaaccggggaagttcttgcagtcgctatatacagagcctaaaccacctctgacaagatcatcgtcaaatcctctgtcgtctaaaccacctcctcaaggtctccgccggcgaaagatgttgatggggtttccttggtgagttgagtaagagaatgaatatgaaataaattttttttattatggctattgtgtgagatttttatttaactttgcttgatggtcaatttatctgtgcatagtttatggactcaaaattgtacaacttagtgaagttgaagtggtgcatatgcatttttatgtagtattgtatactttactggttttggaaatggtagagaatcagagatatttcgaaggaaacaaaaagagtgaggttacagctgatggaagaaaacaaagaactaacaatattgatgtgaggtcttcgatgaacaaatttaagggattctaatgttgagtttcaccttgttgaagtataattacttttacacattatttagttgaatggtatttgcattctttctctgtgaagttttgtgtacgaaattttattcctaatttaacctacacacagcaaagaaagtaatcaaaagccaaggccaatttagaccttttaagtatctcataagacatttcatggctttccaatgctcctttccaggactagacattataaaggaggatagtttgttattctgttagagttagttactgtctgttatacagttggttagattaagtaagtttcttccaactgtttcttgattgtttttgcttgtatataaagctctgtaactctctctattggaatcaagttattctttcagctcactctttctctttctttcttcttctttcttcttctctgtttcatcttcttcatgtctagatacaacactatgtgtaacagacatgaacctgcttagcacactgattacataagcaaagtcaggtctagtactaaccatcaagtacattatggaccccactgcattagagtagggaacattagccatctcttcttgctctaacttggtcttagggcacatagaggtattggttggtaatcggttgtgaaacagcctttgaatcttt

SEQ ID NO: 325359 - DNA, 1473 bp, Cannabis indica
aaaatattcatttatcagaatcaataatattattttatttccttaattagaaatattctaatatccaggtctagcaccgaatctgagtaccgagctttggtgcatgttgctgcagaaatatcatggatagagtcactgttaacagagttgcagttccctttttccagtccttcagttacctggtgcgataatctaagtgctagtgccttggctgctaatccggttttccatgctcggacaaaacacatagaaattgatgctcactatgttagagacaaagtgctgcaaagacaactcgaagtgagatatatcccttcacacgatcaaatagcagattgcttaactaaagggctgtcaccatctcgatttacattccttgttaacaaacttggtgtaaggcatccaccccttcgtttgataggggatgtcaaggaatgagaaagttgcctctgcaatattgattttccctgctgcaatattgttgtggtcccctgctgcaataacaaaaacgtgggcttaactgtattccctttttgtattttgtcaattctgttatgccaaatcattatgtaatcattagggagatttctagtcagaatattcttgattccttttcattgtaattgtgacagctgtaattgcctaacggctattttatttcatcactctactatataaagaacccctcatgctcactgatatttgagctgagattcattttcatcaatctatatatcttatctggaattaaaattacaattatcagttcaagtgtcaatctttctctcagttcttatggtatatgtattcataccatatgtacatttattattttgtatatattaaaatcagtttcttctttgttctttcttcttcatccaccatacgtactgataaaaaaattaaaataaattgttagttataagttcgatgttctttatattgatatattaggctcattttcattaatttctataaaactttaaactatttttttcttttaatttttaaattttctagtagtgttttcttttaattttctaaaaatctacaatgtcttcttttaattaatttctattccttttaactacattttgctattgtactaaaacacataacttgaaaaatgaaaataaataaataaacatattaacaaagcatacatgcattgcatatatgaccatatttagagaaaataggcacaacataaattccattctactttactttttaaagtttttcccatttaattatgcctggatattgagttcgaaaatttaaagtataaaaactatacaattttcggaaaaataataaaaatagaaaagaaatacttcaagcaaaaatatcacctatctagattttcttttgactaattaattcaatttctaataatatatattttaaattcatttattttaaattaatcaattaaatgaaaaaatcattgattgaagttggcccaagaattaa

SEQ ID NO: 325360 - DNA, 1564 bp, Cannabis indica
aagaagagcatctatttgagacaaataagtaaggaagagagcatcgcaaagggagtgccaccaacatctctgattaatggtgaacaggacatttcgagccctttgctcaaatttgaattcataagtgcaaaaaaaaatccaaaaggggtgcacataaggtgctgcaacaacaacaaattcttgaagattgaagtgaagaaggatgcagcaaatgatgatcagtggttcatctttgcctcctccgaggaccccatagaagaagattcgcccgaacaaccatgtacttggttcgagataaaggaacatccaaatatgcctgaaaattactgttttacacatgttgcgtctaatcgaattgttgtacaagactacgacagtaatctcttgtatgcatcttcaaaatattacgactactttcgattcttggattgggaatcccttgtcatatttcccaaaaacaatactttggccttccttggcgagaacaacaaatatcttagccctaatggggataaccatgttatgttgttcaacaaggatgctgttactgatgacagtgtaacgcatcagattttcagcgtctatgatggttatatccgcattaagaacaattctactggaaagttctttaggcttgaagaaaacaactggatacgtgcttcatctgacgacccctcggccaatgacgacaatacacttttttggcccgtcaaagtcaccgacaacactgtggccctcctcgttaaagctagtgaaccgagaagatttgcgaagctttatactaatgaatatgagaatggtcttagcgcaattgatcccgaaatttcatctttcgcaaagttggtagttgtggataccgtcgggtctagaagtatctatggaatagagtttcggccagatgagggcaggatttacaatgtccaagcccttgagaaggctcatgcatcggcccaaaactatgacgaggaaaaggagaacactttaaccctcacgttttcctacaagacttcaagatctactacttacagcgtcagcggttccctgaagataggtgtccatacatctcttgaagtttctgaaattccactggttgcgaaagagagtatcggattttcatatgagtttaccacgactattggatgggaaaccactaagacagtcgaaactgcaaccgagtctacgtacacggttatagtgcctcccaagagtagaaccacagttactcttctagcgacacaaggaatgtgtgatgttcctttctcttacactcagcgcgatattctacgcgatgggagtgtcatcatccacaagctgaatgacggcattttcacgggtttgaatacattcaacatggatttcattgccgaaagcgaacccctgctaccaaaagatgataataatccatcattagttaaaaattgcattacgcaatattgatttgatagattcaaaaatatttgattcggaacttcatcgtgctatgtttaatttgatttccaattataaggtgattgtattctatttcaataaataattagccatccatgcatgcatgaagcatgtc

SEQ ID NO: 325361 - DNA, 587 bp, Cannabis indica
aggacccaattatctttttttttaagaccagtccaatcttataactgacccttaatgtttaattcaataatcacacataaaatactaatgtcccttcaaacttttaaggaaaaacttttaaggaaaggataacaagtttttaaaacaaatggcaggacgttgatggcaggacgttgatgacattggattgcatcttgttaccaagatttaattactcatgtgatttatttttcaatgaagtttccctactctaatgaatttaagatcattgttagaattttttacaagtttgtcatccagattttcaagagtgtccctaatctgtgttgctcatggatgctcctcggatgaatgaataacttgtatttggctagatatcatgatccgaatttttggtagatgtatagaaatatcgtgataatcatgatatgtatagtatttatttgataaatatgatcataaactagcttgtataacattattatattttcaataaatttattcattgctttcaaaaaaaaaaaaaatcacacataaaattgccatcaccataatgaaatgtctaaaaatgagggaaaacaaaacaa

SEQ ID NO: 325362 - DNA, 1288 bp, Cannabis indica
tgaaataatttttatttagggcacaaaatctaacatccacaggggtggtaacagcaactgacactcggacagcgaaaccttcatcctcaataataatatcaactttgtttgggatgacaacatccatcaagcatgctctagctttccaggccaaaagtctagccgattaacccaaggagactggtttgtccacttgctggaggccaatagaattagtcatagtgcagacaacatcatttgtcggtccatcagtctctataggcttgtccgaagacttttccgaatatagaatataattttcagcttgcaaagcacaccatggcccaactccatgagaaaaatctctaaccaccctcttaactcttctaatggctagaatcggcttgtcgccaagagaagtagtttcaaaatctaatctccgcttcttcacaggagtggttcgatcattaaaatcagacgacggttgaacaccaatatcgatactcggagcttttcttttgtaattttgagagttaccaatttcctcaagctcatgtaaataatcatcttcatcttgaaaatttttggacagagcacgattttcgtctaagtttgctgaaaaatcttgtcccattaaggagctacatgggacaccatgtcttgggttcaaagccaaaattgaatctgacccatcaataaaataggagttccctttcggcctaccaagagacaaaccacctttccacccagagacaatattcttcgaattaaattaactggtggcccaagagaaagaccagaccccacattagccaattgggccgaaccacctccaaggccgtgacccaaagagattaagggcaaaataatatcgtggccaacagatgaacaaataaaaggaggaaattagactctataccctttttatattgtcttcttttatttttactctcttttttaaaatctatcatttttaccttttttttaaacactttactaattttgcccttgtcactttaatatactctccatgtgactcccttatgtcagaaacatttaaaaagaggtatgtttcaattaaatataaattagaggtagatttggttaattgataaataaaaaagttatttttcaatttaccccaaataaaagagcctctccctcggccctccactttgcatggcccaacagacatcaggcccaaactagcctttgacccaccactttatcatacatccttttaccaccactttatattaaagtgaaaattacatgaaatatgggatttcataacaaagttagaaaaata

SEQ ID NO: 325363 - DNA, 515 bp, Cannabis indica
tttttcctttatataaatgattaatttaggcagccaaattgagccatgcatgattggaaattttttatttatcttttttaaaatagaatttatattttaaaaaaaataaactaattttatagatatttataacttcatataatacataatatgtagtttataatagatcaaactatttaatactagaccaaatgaatctagtgtccacggtttggtcaatccgaaccgtttttaattatatagtttggtcacaattttaaaattctcatgcccagtgcaaattaaactaaattaaactgcttaatttttaacttgtaattaataagattttttttattgaatattgatatttagaaacaatcataggcataatattaatggtaatttaatattgttttaagaatatttattttcattgttatttacatactataagttttaaaaagtaaaagaatgtagtaaatgttataaaataatataaaataatataaagtagatgagaagaaagaagaaga

SEQ ID NO: 325364 - DNA, 2458 bp, Cannabis indica
atatacgtaatttgggaaattagttaattaatgcaacaccctaacactcacgaacaccacatatgtagttttacaattaagggtaaataaaccgtgattaaattcaaacaaattaaaccatacatctttacattaaaactttaattacataacttaatattaggatgtacacatcattttgttaatattctgttaatgttagttaggattactgttatagttagttctagttagttagaactaactaattatctgcttgtatcagtcctctataaatactttgttcccattattattcaacataataaagatttgattacactaatacggtatcagatgaattcaacactctgatcctctctatgtaatttcttctttcaccatcttcaatggcgagaactcgagttactggttcacgaagctccggccaaactccattgccgaacaactcttccaacattccagatgctccacccaatcctccgatcattcctcaggtttcaaatgtcactggagacaataccacacgacaactcgttgcacaacctcgacctgtacacgaagcagttcaagcccttaattttcggggatcccctttaaaattctaaacatcttaattacaaaagtagggtttaatacaaaaatgttttgatgattttcaaaagtagggtttagttaagtaacttgattttctgtcgcttggaaatggtttattattgtgattataggtgttctagagcttgtggtgagatttagagttgttttagattgaattggaaagatattgtttttctgtagtgaaaaatggtttctgcaagaacctaccttttttactggtacagaacccagaaaaacggcgtgccgtttttttagaaaatggcctatcattttttgagtggtttctctgtttcatggtttttctcatgtttccttgatatttagggttttgccatgctatttatcgatagggaaacttttagttttgagtctagatccccaagaaggttttagaaagttgtttaccgttttccatgattgtgagatatggtcgtgtgattttctatccaggtcgaccgacacacttgatttcgaaaacgaggtaagtttagtatagaatatatatttatatgaatatgtgtgtgtaatatatgcatgctaattgtgattcctatactaccaacattagtacggtagcggtactaagtgtattggtatagtatatgatgtttaaggggtacgatctggtgatactaatactagtatggttaagtacgtagtgcatgtggtacaacactcaatagtgctcggggtacagttcaaccctacaaatactagtatgagacgagtacttagtgcatgtagtacaaaggtcgtacttttgttaagaatgttcttaatcatctgttaagccttgtggataggtgtatgtgtaccttaatataagtcggtaatataatgtatattatatacttttcttactaagtctgttggctcacagagatattgtttcatgtgtaggtaaagggaaggctaaagctgaacaacagtgagttttgagctcagagatgattgtacatgtcgagacgatgcgacctggaaagttcggtctcaggatgacttgggcttcatttttgtggtcactgtgcgacatgtctataaaaactatttcgaatgtcaagttaaaaaaaaaaaggaatttcaattttgtatataaatatatgtatatagtttaaagttaaaagttaaatcaaaattttaatttatcacacttttcaaaaaccctttaattaagaaaaatatacactctaattaaaaaaaattgcctaaacattacagcgttacaaaatcattttacaaaatgacattaacaatagtccaatttcatgagcttaaatttaactcacattgctatggtccttttcctatttactaggaaaagtaagattttatttttttcttaattcaaggaccgaatcaatctttattgttattagccaatttttattgaagtattagtcaatgtcttctcaaatttctcgaaaaaaaaaaatttgttttacaattattggagtgtcccatacacaatccattgagagttgaaacactaatgtaatctataacatgatgtaatttgtttgactaataattttataatcaaattaaaaagctgggggctctgtcaaagttatatgcatgttaatttatttttatttgataatcactaaatttgtttttcttcctcatccttttcaaaggaaactggaaaaacacaatgtcttttttaagaaaataatagtaaataatccaaaaatatactactatataagtaaatatttttattttaaaatttgtagagaaataacatttttacattcttttatcacataaaattttcatgattctcacattgttattcaatatatacaatttttttttttcatatatctatatatatata

SEQ ID NO: 325365 - DNA, 668 bp, Cannabis indica
acgggaaggtaagataggttcgattgtctgattaccatggataatagagtagctaacagatgaaacacaatgcatcacaagagaaatccatttctcagcaaagcccatacggttcataacaacctttagataacccaattctatacgatcatatgctttgctcatgtcgagctttaaagccataaaacctttcttccccttctgtttgcgctttaataaagccatcaaagttggacttcatgaaatcttttcagaccattttatgttaaacatgaaagagatattatcttagtccaatattaatagactagaaaaatatttctagtccaactgcgctggactagaaagtggaccccgcccaaataatgcaataaatttatattgttatgggaacctctatttttttaataataataataataataataataataataataataataataataataataataataataataataataataaataagtaataaataattcaaattcactaaataataaatgataagaatacaatcatcatgattatatgtttataagtttaagtcctcttgcctaaagttaatccagtgtacattatttaaagacttatcatgattatatatttaaaagtttaaagttcctaatgatttgtcagtacactggatttagac

SEQ ID NO: 325366 - DNA, 714 bp, Cannabis indica
aatcttacttttaattatattttaataattttggagaaattttcattctattatttatatcattatttttgtatcatttatttgttagctagtttagttttgttatctcttttaaaaaataatcaattttaattgggatttaatttattaagtttgattaatttttccaattttatgcatggtgcaagttatagtagctagtttgtttctactttggaagacttagctttaataattgcacataacttattagtttcaatggtgacatcatgcttcaaagataagtttttcttgttaaaatcatatttgcattttattcttaatttaaaaatttacagcattatcattatatagtgtgcaatctacttctctatatttatttattttgtaggtatttttggtctattgggttgtttacatcagatgcctcttgaaagtggtctcaagttattttgtctaaatttccaaaataatttagtcttatataagtcgctttgtttgtaatgactcatattctgactttgtatatctctagctagctaaacaattagcttcttgactaaaagtttttttgcgttatgattcttatcactctctcataaaaaataataaatttctcaaataaaactaagcaaaattgacctctttttttttttttatatatatatatatctactataaaatgctattgttttaaatacatttaattatatt

SEQ ID NO: 325367 - DNA, 2872 bp, Cannabis indica
ttaatctcaacaatttacccttctcgggtcataattaccaaaatgccctggctcaccaacggggtctttaacatgttacatttcatataatttcacatatattgaactatataataatataattcctcaattaactcataattatataattagggttttgctaatccttttcttaatcccgggtgttacaatcagccccctttaaatagagccaaaaatggaagtttcccattttttttactacaaaggccaagcaaggccgcaaccttacaagtgatttcctcttttcttcgcagtttcccatattctattttctactgcgatgatcgatagtattttggccataactttctcgatataactcaaaattggaagattcaagatgttttgaaaagataaaagagagatctagaatttccattcagaatgtttttcctaaaagtgaatggatcatagtcaaaaattagcttgaagtttttgactttattttcagtcacaaacggagcatgttgaatatccaaaacttagaaatttcaatttatttttgcaaagtgatcactattgactagaccccgaaattaagagcttaaaatgcagtctttaatctattttaagaaatgggaaattactccaagccaaaataaatttcctttcttcaatatattttcttatttttgctcaaaaaggcttgcagaacaccaaaattaccaaaattaaagatctccaaatatttttcctaaaataaaattaaaacaaaatccaagcataaagttgcacaataaaataataaaaatactaaaacacaccctaaattagactataaaaaatgcattaaaataaatctaacaaattctcccaaacttaaactttacgtaccctcgagtaaagaccaagtgaaactaacaaaaaaagaaaataaaaacaaacacacaagtatgccaccattgttatctacattagattgcctttttcataaaatcttaattgcaagttttaaccagattttcagctcaactgcctgaaagatcaactttaaagttcaacggataggtttcacaaatgaccacaataatttgaactccaccatatatgctcaactcataccaaacaaaaccacaatccaaattttttatatgcttacactatttaacctgctccactaatgtcgacaacaaatgctttgaaattaaaagggctttaaaatgttacaccgttaggcttaggtaagggtagataaaaaaattatttaggctcaactataccataagctttttacattccaaccacctcaattttattacagaactatcccattctccacttaatacaatacacttaagagatttatattgttgcaatcaacactgagatttatttatatatatttctttttttattctcttttcttttattcttcttttttcttgttcttttttttctttgtaagagaagaatataaagaatcaaagaaaatgattacaacaaattaaaacattctctctcactctttttaagtgttctcaaaatacaatacccaattataattttcccctaaacttatgtgcaaagtcatggaatagttaggacaagggaaaatagtaaatgggtaaaaaaaaaaaaattagctcaactagtgtgtattatagaaaacaattccgtttaaggcttaaaagggttaaactagggataattacaaaacatgttagcttgaaaggcacaaacgttccaaagaaatttcctaaatcattttttttaaagcataagtcatgaaggatttcgtctcaaaggtcaaataattcaagttctatcaaattcaaaaagtcataccttcaaccctaatcaagcatatataataaaatccaaaatattgcatttatgaaatatactaaaaatttctcataagaactttttaaattaatctcaaaaacagttgaaccaagcacacagtcattagcaatttactttttacaggcaaaaacaatgcaatatagataaaaataatggcttacaaacaaacactaacacaacaataaaaaaataactaactaaaaaaaattaaaattataagcccctcccccaaattaaagattcacattatccccaatgtgataataaaaacaaaaagagagaacttacctcaaatataccccacatcaatgagtggttgacgcccataataagcatcatgcatgaccactcgaaagtttccatcatgaatgtcctcaagattgacatgatatgagtttgtaccatgtttagaaccaacaacacaaaatttgaaggatgagcttggagagagacttttggtagctcgtagaggatgtaatatggtgatggtggtattgatggaaaatatagatccatcggtggtgtataaatcaatgtcattagtgaattcaaatcaatgataccaggtgcttcctcatctttcaatttgatatttgtttcactttcatctaacaaccattctttttgttcttcactcttcacttggctatccataaccttgcttgtgatttcatattcaataatttcatgatcatggatggaatttacttcatttaccacactgcatgcattatttgtcaagtaagaatccaatttagcgaaatcttgaaatagtaccacttcaaaggggtcttgatcttcaattgcagactcaatctcttcttttgactcaactaatggtacttctactttattcaaacaactctcataatcttgattatttgagtcattgtccttaaagcactccacattatgaaccattaaattatccgttagagatcttaccatacactccaattggattattttttctaaaagtgacggtgtatgatcttcctcttcaattggttgggatgagtttgga

SEQ ID NO: 325368 - DNA, 777 bp, Cannabis indica
attaaacttaaatatttattttttactaaaaattaaacttaaatatttataccgtaaattaatcttatattcttagcgttttgaatattttgtacaaaaatattttattttgtgtagtttcacatgtttatatatttttctttgtttatttgtgtatttcttatgtaattttctattttatataattaatataattactgaatttttgtgttagataaaaatatatgtttttggcacaaagagatatgagccacgagtattcttttttgttttttggtggtggatgatgtcatattcttatatttggttaagggaaggacataatgataataatattacataagagaatatattattagaaattagaataaaacaagggacatgcccacgtgacggtctaattgaagaggagtcacaactaaatcaaattcaatttatagtactaaaaactgttaattttagtgataattttttactcacaatattatttttttttatcaaatataacttttagttacaataaaatattacttgtgactaaaatataacatttagatacaagttgtcattaatttagttttagtcataatgagtattgtgactaaaaattacatttagtgcacaacaaatgtaatttttatgactaatacttttagtcacggaccttttagtcacaatataggaatgataatttataattagtcacaactttttcacttttagtcacaaattttgttgtgactaaaagtaagatttttttatagtggtaggaccctt

SEQ ID NO: 325369 - DNA, 2112 bp, Cannabis indica
ataccatgtaaatttccctaaatattttgttgcacacgtaacttttttcttatacaaatagttagtatttgcttaaactttattttcagcattaacaagttaaatactattttagaccctgtattttgtaaaagttactaatcagatcctctattttgttaactgacaaaataaaccatatattttccaaaatagtaaaaataggattctgagcttaatttttcaacaattttattttttaatataaccaactttaagacaatttctaacacgaacatatatagaaaatgtaaccaattttgtcataacatctttagattagattataattaagttttattttgataaaaaataagttcaagattctatttgtacaattttgaaaaatataaggtctattttctcatttaacaaaacaaaaagtctaattggtaacttttacaaaacacatggtctaaaatggtatttactttttaattattcattttttttttgaaaaattttcaagtgatcctcaataattattgttatcatatttccgacaagggacacgtatcgtagaattcccataataaatacagctcaaatacttaacgccaaatagtaggcccaattgagataactaggctgaatctataaatcatcagtccttctagatgaataaggaacaacttgtccagtcgagattccatccaggatggtcagtagctggaagacataacaccgcgtaactgaatgaagctttcagcgtgtaactggaagcccaatatggtcttccatttactattagatcgcgcaagatcagaaattaccttccaaaaatctcaaacagaagatgatatctttctaaataaagaaagatagtaattgacaatcaagtaattaacgtgtcattaattttcacgaagatagaacacgattttaacaaccaacatcgtgatttggcatccacatcgacatacacaaggtgtctcatggactgggcttcaccaaataagcccaaaattaatattttatttattaggtatctataatatgacttcaatgctctataaatattttcacaaactctacatgcaaagttcgaaatcctttactcacatgcccaagaaaagagagagtgctcatatcttcttgtaatccctaaggtttctagcctctcttaataatattgactcgtggactaagattagttaacaccccaattatgtaaaaatcttaagtgttcttatttattttatttttaattatttttctttggctcttacatttaaattttattagttttcgaaaaactcagtaaacaacaatatacacgatcatgaaaaaaataaattaaaaaaatttcctgccgaaacatataaaaaatatactaaaacattcttttagagagataccacatattttttccaataatacttaatacttgtgtaaattatattattattagtataatttgatcttacataatttaattaattattataaaatattattaactatttccaaagcatattatagatacctaataagactactaaatgttagattttaagtacttttgcacatggattctaattaatcaacaagtatatattttatttattcacaatggaagattataattaaaactttaaataatcaaattttcttgttttttcctcaaccgttgtactttatagttgtacacactacacaccaatggatctaaattggaattggtcaaacacttaggtttgtccttggaccatgcaacaattgataaacccctattttatttgattggttcaccaaaaattagttttgaaattattaatttaaatttagtattcaaactagaataaccatagacatagcttagtatcccaagttcgaatttctcttctttaatttaaaaagaaaattgttagaataaaacaaatattaaatgagattcatagtattttaaatttgaatttaatattaatttaactaaattactctcatttaaatataattaaataattaaattaatttttttgagagaataattaagaaatttttacattaaaaatacaaaatattaattttattaccaaaaaatacactacacggttacccaaacatttatac

SEQ ID NO: 325370 - DNA, 948 bp, Cannabis indica
attctattatttattaatgtaaaaaagtgaagggcatttaatttgcatttatttatcaattattatccaccactttacttattttacaataaaattgaataaaatatgatggaaagactatgttattataaaagttatattttaagtagtattattaataaattgtataatttaaagggaacaacttaatactataaaagatttagggtaaaaatattacttgttctatatttttcttaaagataactatagactatataaagtcaaaacaatatactaaaatttcttttgcattgtttaaagcaccaataataccttttttccatcaatgggtgataacttttaagcttatatatgtggaaaaagtatacttatagggatgccatttattgtaattattttagttaatttctatgtttatacaatgttagttagttttgtttgtgtagtttttaagagctgatggtcatgaagatgatgattttattgatagaattgtagaaagagtgtatgttgatgttgatattgaaatttcaaataaaaaattcatcagccatagtttcattttttaaggttaggatattatattgtatataaaagagataagttgacaactattattttttattataatttaattaaatataattataaattaattttaattgataaatattttctttaatttataatcaaagtattaaatataatctcacataacttattaaaattagaattcctaatacacataatataaatataacttatcaaattaagtataaatcaaagagtagtaattaaaaaattaaaataaaaaataaaaaaataaatatacaatataatttcttgaaatatgtgaaacaacaataaaaacacttggtgcatgtttggcatcataattaaaaaacagttttttgtttttaaaaatagaaaattgttttttgaaaa

SEQ ID NO: 325371 - DNA, 1002 bp, Cannabis indica
agtagtgttcgaaaatagagtgcctataggccaaatgtaagaacatgaaagccttgaggctgaatatgaataaaaaatcaattcacatgcataaggccaagatcctacaaggactgtatagctaaagaagaaccgggcagagttcctataggaaccacatatcgggctaaggctaaggcagagttcctggcaggttctaagccaaaaggcagagttccttgtaggttctaagacatagacaaaactttaaacaactatacccatgggtacttcccagaccatgtcattgtacaagcctgagtatcagcgaagtaaaagtctcaagtgtaacaacttggacaaatgttgagtcttaagttgagcattagactataaaagactcaccattaagtttcatacatagtttttaagggaaccacgtatgagactaaggttgtatatgcctatagggccatgacaggattcttgtcgaagtcaaaagaggatagaaagttggccacctgcttcaaaccaaggcccaggccggccagggttcccaagccttgaaagggttggatagggtcccatgactcagccaactggccagggtcaccaaacataagcatgaacaggttatctttataggatgaaaccctagggctagtcaactcccatgattaagtcctaggaccggtcaggtctcaagcaagacctccaaggccagcaaaggttagtttgaatccaaatgtgtgttttttcttcaaaactcgaatatgtacctcgtgttctttataactcaaagagttaagaatcacaacaaaagccaaaattgaatcttttccatgaggaagtcacgcatcatacattcaaaaactatcataaggatcaatatacctaaaaaaaaataaaactttaagataagaataaagaagttctaaaaagcttaaaaagactttgaacttatcaatggcatgttcaaagaagagaagatgaggtatatgtggagagagaagatcatgttgg

SEQ ID NO: 325372 - DNA, 1592 bp, Cannabis indica
attgttcttattatttccatatgagcgtgtagaagtaattaaatgtttaacaatttctttgaaaaaaaaaaaaaaaccttttacattaacaaaaatacaaacctaccacatatttataaccgattgagctagtctagaaatacataatattttttattttgttatatacctatttgtgatttcattaccatttcttctgttttatgttttctcaacaaacacattaattttatattaattgagagaaaaacgaaaaataaaaatgatagtagaatgtatccttttgataaattgaatgttttagtcgtaaaaataaactacaataaagtaaagtaatgagtatttatggtattaatttatatatataattaacacattaaaaccatattgttgtaagctttaaaaactcattgccaaacagaaaacagataacatggaaacaaatgaaatttgttgaagcctttaaaagctttaaatggattccctttgttttggttggaaactagttttcaagcaatgaacaaacttaatcttaagcgagtttagagttagatatttgcatatttcgtttcatgatatttagacttaattgatatacttttaaaaattgtttgagcaatttaattactaatctgatatgggtcaatacgattttagatcctgtcttttgcaaaaattattaattgtactctctgtttttgttaaatgataaaattgaccttatattttctaaaatggtaaaaataggaccttaagctcaattttcaacaattttattttttgatataacaattttaagacaactctaacacgaacacatataaaaaaatgtaaccagttttgtcataatatttctagatcagattattattaagtattattttgacaaaaaatcaattcaggattatatttgtacaattttaaaactataaagtctattttaatccaattaataattttttataaaaaacagaatctaaaattgtattttataaagtagacaaaaagaatacctaaatatattaggttattattaagtgcattgcatttattacgtgtattttaaaacttttataaatttaaaaaaactacttatataagatcccaataatgtcagtcttttttttccatgattggtcacacaatggattatagcggttggattttttttgattcaagcgtttatatattacatcatgttttacctgggattcgaacccaggacttccaacactcacacacccacctatgaccacttgagctagccccaagtggttggattatagcagttggatgagtgtccttattctttactatgtgatccaacagtccattctttaacaaataaaataatttatacaaagtttttctttctttcttttttaaaaaaagggtggggcatttaaggttagagtaatttgtggcgtaaatatctaagttttataccgaatagcagataaatacctaagtcatatttttagcggtaaaaataccttctgttagggtcttggaacttctgtaggtacctgaacgtcaagtgtcaggtcagtacctacatggtgttgggttttatgccctaaataaaactcttt

SEQ ID NO: 325373 - DNA, 1172 bp, Cannabis indica
attttttttaaatgaaattagattttgtgacatgtatactactctatcgatatagaattccagcaattttctaaattttttttttattttaaaaaaaaaaaaatcaggattttaattaattaatggaatggatattttaaacttatttttttctctgaaatagaaacgaggatccttcagttcaatccacccaaaatatagttaatacacataaaatactctactttactttacatatctattttttttaaaagcaataaattatgagcaaccctatttaatgctttcaaatgttcttttattgatgtttttagtttttaattgttctttataattatatttaaaatgaataaaatattttataaactagaatatttatattttgtttagtgataattaaatggggaattaccccatatataatttttttttaacttttttttttttcaaattatacggttagggtttctagagtggttgcagagttagttgcaataggagtttctatacgatgttttgttacttgcagcgctagttgcaatagggatttctatgtagaatttcgtaaaaatgtaaaagaaaaaaaaatattttgaagtgtaaaaataaaaagcccctaattaaattataaaagaagattaaatcttaaaatttaatattttttttatatattttaataatataagtaataatttagtagacttttatttttttcaatcttaataagacaaaaaaaaataaaaatttacaaattattttaaacctaataaattatactttttaatttattaatttattattgctatattataatttttaaaatttatattgtttgaataaattaaattgaaattcaaaaagtatgtataatataacaactaataattctataaaaatttatatgatttcaaaactattgttatcatcaaatttgatgtagttgccactacagttaaagttactgtcatcattgtatctcacttataatcgtcactatcattctcaataagtttgctctgtatacaaaataaattaaatattgagttcgctactcacttttatacataagtaaacctttaaaagtatctaatcaaaattaatgttattattattagaatatttttatatggtaataaatcaaatattttatttgatttaatttataaaatata

SEQ ID NO: 325374 - DNA, 1085 bp, Cannabis indica
agaggaagagagagagagatggggttgagttatgagagatgtatttttgggttttagataaaagtgtcatatttttattagtttgaaatgtattggtttaaaaataaaatattaagattttttaagtataaaaaatcaaatttctcttagaataagcactttgttaatggagagatcatgatcctctttttgctcttcttctttgtcgggactagctaggattattcactataatgagatttgaattctcagtcaataaaaacacggattcttcacttcttctttttcttctaggttttatactttactaactcactgctcatttattatattatattaattaaatatcaataactggttaccatgcactctgaaactgaaactaagaaagctagttaccgaattttttttaactagttattactaaaaattaagaaagttggttaccagtaattaactctgccatccttttcgaaatattagtaaccaattatcatgcactctcattagtggaaaaattggtacaagttataatcaccacattatggtttggttggtgctaataatccaaagcatgaaagcaaggtttagtaatgcctataaggctaatataagatcaaaccttcaagatgatgtggcctaagagaccacctccacaaagagtagatggaactatattctaacatagttaaagttaatacttgttatttaactattttgtctgattaattatatctgtaaaaaagaatggtaacaaaggtcacataaggttgtcatgcacaaattaaaagaaagtgctaattcttttattaaaagaatgattcaaacaagtgttaagtttgtcgttattgaattcgataccaactgtgacaattgacaaaatgcatattgaaataagtaaattattgactataagttattattatgtagaataagatgatatgtactgtacaactgtacattttgaattagcacatatatatgataaaaattaattaaaaagagttttttgaccgtgaaatccctcaatttggcgttttcgctcaattcttaaccaacatttttgacttttgaatgacattaat

SEQ ID NO: 325375 - DNA, 752 bp, Cannabis indica
agcgcttctcatagttcttacagatcaccggagcaaataaagcatccctcccagcctttgcagcctccttctgggtccactcccggaactcatgcaactccttgagctcaaaagacatacttgcagtagtttctgagtcggtctagtgtagcacctcaagagtcttgagtttcgtggagagtccttgaatctcctctcgagcgttcaggaggtccttctggtttaaggcaatggtgtcgtccttggtcttcagaacctctttggtcccactccctgagaaccttttatgctagaacatcattgcgaagagtctccatcatgtcctccgactccctgagcttcctcatgacgccatccattgcacccagctccgagacggtaaacccctggtcaattcatattttagaaagacgaccgacctccgcagcaatctgacaactagtagaatgaggttagacctttgaaaagtaatatcgaaaaaaatatatataaatatataataaataagaagcctaaaaagaatactcacggcgataagggcaacgctcatgtcttggatttgttaaacgagattcgaggaggcacatgctactgatgagtccatatttatcttataaatatgattaatttatttattaatattcttaaattgattctttaaattattgattagtgtgattttaattttttaggttatttttaaatactattcatttatttagagtcttttggagggatttttagcatatttt

SEQ ID NO: 325376 - DNA, 779 bp, Cannabis indica
ataattatagtaggtatattgttcattatcgaaaaattataagtaatatgttactgaaaatgtaatttaaataatttattgcacgtatacctactttattttatatgcatgtaactaaatattttgaattttattttcaatatcataaattatttaaaatttctcgaaagtgtacagattgccgactataattatagtttatactgacatcaaataaaaaaaattagaatacaatttcactaagtgccaaaaacagaaaatattttacaatgggaggaaaatattataattagataatagacaaacattctaataataataatattattaattgtatttgtacctgaatacgaaggtaatttttcgtgtgatgttgagattggaagatagttgatacaagaaaatcaacaacatcagaactagcattagcaaaaatgtcaatgatgggtgtggttccattgtcaaaaatccaattaatgagaccccatttggaggcaatggaagcgttgtacttctcttcatgcttagcttcacctgttcccaatgacaacactagcattttagttccatccatcccaactttttcttcttcttcttctgatttgttattattcttctttgctgtttctctgatgatatggctaattgccaacatagacttcaacaaacaaaataaaaatgtgccataattagttaccaataattgtatatatatataaatatatattggtccaaattaaaattgaaaaaatagtatagagagtaggtagctagcttac

SEQ ID NO: 325377 - DNA, 901 bp, Cannabis indica
tttttaaaaaatttggccaaacaccccctattagattttgaaagttgttttgtgtttttaaaaactaaaaataatttctaagttatgaatccaaacaccctttaggtttactaagttaatattttattttcttagcaaaatatatatacgatcccaatttctgcaagggtgacgtggcatccaataaagtgacaagtggagatcattccaagacctagacgggttgtttgcctccaaatgctacgtctagaagagtctacactcaaagatggttatgacaattctcagcaagcatctagactagaattatgcttaatgctcctgccagaatgtctttagccatctaagtagaatcctccgtgcggaaggatgcggtgaatttagattctttaagataaattccttaaatatctcctcatttatagcatggttaaatctctatatttatgagatttattctgcacagccgagaaattataggaatttagtctttaatttcccatttatttcttactatttaagtaacaatattagttgtatcttccttataaacagtggagtcattccactatttagggatccgagttcatatttcttagggagtacttatgctgtcaaattacatataagctttcataagattgttaagaaactcacttggtcagctccttgtgattttgataatcttcaaagtaatagaaatataaatgggggtttgttgttactataatcacagggctgaacctttataaaattccttgtgttcatattactcgttattattatgttatttttacttatgatattattgctttaaacacttaggtggcgtttagttagaaggaatgaaaacataggaatgggaatatgaataagaatggaatagaataaaatttaaaat

SEQ ID NO: 325378 - DNA, 975 bp, Cannabis indica
ttttggctagtttgagccattttgtttggctattttgtaccatattattggatttgtatgttgttgcgcatggaggcaacctgaaagaatcacagataagttttaaatcttgcttttaattatattttaataattttgaagaattttctttctattattttatatcattattttcttattatttatttgttagctaattgagttttgttatctcttttaaaaatagttaattttaaatgggatttaatttattaagtttgtttaattttttgcaaggttatagtggctaatttatttttattttggaagacttaattttaataattgaacataatatattagtttcaatggtgacagcttcaaagataagttttttttcttaaaacaatatatgcgttttatctttaatttaaaaattcacagtattatcattgtttagtgtgctaatccacttctttatatttttgtaggtagttttggttcatttggttgtttatatcagatgcttctagaaggtagtctcaagttatttgtctaaatttatgagataatttggtcttatataaatcgctttatttgtagtaactcatattctgactttgtatatttttggctagacaattagcttgttaacttaaaatttttctgcgtcgacgattgtgataggtgattcatatcactctttaaaagaaataaaattaaaataagtaaattaatattgaattataccaataacaatatgtcattttttataatatttgctaccttaagatataacttatcatttctctattatctttatcggcacttatatctattttaagttaattaagatttttatgtgtagaattttaacataaaacatgcatctaaagttttttagttaaaaattctcaaaaattgacggcttctatttaattctattcaattttaagaatgtaaccatttttttatctcaaaaaaaaaaaaaaataa

SEQ ID NO: 325379 - DNA, 1119 bp, Cannabis indica
aaaaaaatacaagtcattttaatcaattagtaaaaatacagcatatatgtcaattttcccattagataaattatttaatttttaataattttattattttataacacacgttcttttggtattattttataatttttattattcttacagaaatttgtggtataagtacccaaagtttagagttttttaagagtaatttgcggcataacttccacaagtgcttagtttattgcaactaatccccaattctaaaattttggtagtaaaacttcctaaacctatattttgttagcacttagccatttttatcaatttttaggtgttaagtgtcacgttggactatccatgtgtacacagtatgttgtttacatggacacagtgtacacatgtcacaattttattagtccacataaataattattttaaaaattaaaaaaaataataaaaattaatttaaaattaaaaaaacaattttaaaaatataaaaataaaacatattataaattaaaataaaacaaaccaaaaaatacattgaacaaaattataataaatttatgtaaacttttttcttataattaaatttagtacataaataaaagaataaacctaaaaaaactaatcaaaaaacctaatttctctaaacctaattatgcatactcggcctcccactctcatccccaatcttcaccttatctgacccacacagtcgccggtgacgcaaccaactggctccaaaatcaactttcctccatagttcttactgtttctctcttgcacacctctcccaccccgaacaaaacttagaagtgattcgcttgttttgttccttttctctcccacgagcttcgtcggattccaaacgaccaaatagacgaccaaacacatacgtttatcttgtcttctcagatatggtaccaattgtcttttagatctcatcttctcatttcagttcccatcttctcatcttcttgtatcttagatctcatcttcacgtaagatttgagatctgaacgacaacaatggcgagggtttgctttgcacctgatcaagatgtggggtcttagttcttgacccttcagtgagcaagcttctccactatctcacctctctctctctctc

SEQ ID NO: 325380 - DNA, 656 bp, Cannabis indica
tctatatatatatatatctattgtaaggtataaaattttgttatatggtatataaggacttttgtccaattttagtaaagaaagtctaacatggacgaaagttcaagggcatgatttggcacatgtcaaagttcaaggaacatgatctagtaaatataaaagtctggagagaatgatttaatacataaagaattactgaattagtaaaattgaatgaaattgaacaaaagtcctcaaatccaacaatctcaatagtttaggagaatttttaacggccaggacaattcaggggacatgatttggtaaatgtcaaaatttagggggcaaaaatcattattagcctttttttaagaaaaaacgaaaggtaaatttgacaaagcccaataaatgaggatatagttctagctcgacaataggcatacctcgctataaataataaaaatgaaagaaatcctaacaaaaacctcaactaaaagtccaataagccaacaagaatcaagcattaaaagaactgtgaagtatactaggtttttaatcccagtgaacatctgatagagtccacctaccaatagctatcaaccaatggataaaactgacctaaaatgttgaatggatcttatataagaatatttttatttaaggaaatatatttctat

SEQ ID NO: 325381 - DNA, 1381 bp, Cannabis indica
aacaggacaacacataagacctaaattttagattatttggtctggacgaaaatatgtagtattagttacttccaaatcttttcccaataaatttaaaacggagtctgtactgacgaaaatagagaaaaattacagttttacaaacatttggtacttatgccactaaaaaaatcattgggtttatgccgcttacaaactcaaaactttaggtacttatgtctctatttacccaaaaagatatgttaaaagacacatagtgcctagtactctccaatatcatagtattgatataaagaataattcttactgttttaactttgcttggacttaaccttcaaaatttaaattttggcgacaaaacttctaaaaccacgatatcgttagcagtttactacttccatccaattttgacggtaaactaccatgctggattattcacgtgtacacagtatacacgtggcacaattttattggtccacataaaattttataatttaattatttaaataatataaaatttattttaaaaaattataaattaaaaaaaataagactttaataaataaataaaaaaactcatatttcctattgaaaaaaacgcattctctttcttcttaaaaaacccaaaacgatttcatctctctgcctcgctctctttttgccatggtgagctctgcaagggtggctcagcctccagatcagtttcttcgttgtcagaggagacaacaacatcttctggaagatctttttcagaagaaaaggacttaattttggactcagagttgtcagaagacacttccatgggttcttcttcaccatcagaactcgtggaggctgagggaggattcagcttaagctttttggcagcagaaataggtctgtcatggcgccttttggtgtgagcttccttctcaagagaagcttgttcggcacgggtccgagaggaagggccctttggagttgattccgtagaagcaacaccagttgcagcaggaggagactcagtgccttgataaggagattcattattagtcgaagatgaagacttcgaatcggacctggacaatttgggtaatcggacgggtctcactaatttttgagctacgattttgggagccctttttctaaaagtggaaatggaagaagaagctttctttacagccacattctttgattcacgccgaggaggcaatgaatcctctggagttgaagcagttgcagcagcacgaggtgattttgaaggcacatgtgaagcatttcagggagcagtttctgaatccaccattttgcttggatgccctaagttctttgtcttagccatgaaattttgaaaaagaaataaagaacaaagagataaaaaaccaacaaagagggatcgggt

SEQ ID NO: 325382 - DNA, 1762 bp, Cannabis indica
tcgcacatgaggtcgcattctgatgtatgtgttttgctttgtgtggcaggtgtcttgcttgcttcggtgtagtttactacttcacagtgacctttcaaacttcatgaggtattgtgtttactccttttctctttgttttcattgttcacgcaccatgcttttagatttcttgtggctatgctctgttggttatcttcattatagtcgtaatttactagttgtctcacatgcgctctacttagggcatatacctccatgtgttatatttagtgaacttagtacctctatttctcttaggtaagggcgttaaggtgttgcgtctcattgaacctgttcatccctgtccttatttagaggagacctcaggaaaggatgtctttggtggccgatgttattgatatatcgtcttctgactttgagggtacttgagagaacctatatgagaagtatgttacagagggcatctagggcacattattaactataaggaatgtgaagagagggtcagagatgaaatttattaggttttgagtggagagcaagattgtatggttactgactccagagtgtacctttgtaggcttagggcatcacttgtcgaaatttaaagtcacctgaggtaccttaagagcacctttcccccagagcctggtaccccgtcctcctccgaggttttcgtatccactttggatgaggagcttgaaatcacacccatttttccttccctaccacccatttaaagctctgacgcacaagaattccagggaaattgaaaatgcaaggctcgcgcataccatcatttttgtgtatttgcaggtatggctcctcccaaacaatctgctcctcctgttactctatgcagacgttctgcctcttcttcatcgaagctaaatattcgtactttgcctaatgatgtatccttcgtctatgcgagtattaggagcactatctcaattgactcaagccctagccgaataagtacgtcgtccagccccataaagggaaagtggcctttagtgcacacatcatgctagtcgacacagttctacctctccacccattctttattgacatattagcctacttcggaattgccccacttcagcttcccccaattgcttgtgtccttttgatgagctttgccatcgccttcaagggggtgaatggccgtttcccttcggccacaaaagttcattttgtttataacatccaacattccactaagtttcctggaacatatcattttgccaggatccactctaccaagatccaaggtgttgccaggataccttataaggttcacttcaagctttctgcatttttcgttgttgggaacatgcccgctggcatctttaagttcaaagtcgtattgctttgttctattttcacatcacattttacttcatttgatgtggcttctcaccttgctttcttagcgactgaagatgttcccgtgctcagctctgagtctttaagcgccctatcaagttattattgttagccaaagatatgttttcaagaagagggtgaattgaaaatgtaaactaatttcggtaaattaaaacttttaacacaaaattaagcaattaaacacttaattaaataaatgcaagtaatatggcaagcaatatatataacaaatattcaaacttgtatagtaaagagtttaagggttagaaatcgcaaactctcgatttttacaaggtttggtagaactatgccaggtacgtccttggtcttcaaagctatggacctagctttg

SEQ ID NO: 325383 - DNA, 616 bp, Cannabis indica
ttttaatttttgttaaacgatctactaatcgtgttacttaccatttaactagagctttataattaaatgttagttgtacatattcaaattttacgattctaagtaatttacgtgatgttataattttaaatgatttgagttaataaaattacatatttttatttaaaaagaaggatgttattgtttttcatattctttaattttattttttaaaaactgtatttttaatcactaatttatatttagtgattttttcttcaaaatttaatatgaataaggtcattgattataattacttcccatgcataagttttttcaaccaactatgtagttgccaattgagaaagaataatacattgcaatttttaatatttttttaaaaaaatctcatgctaaattgaaatattattagaatctaattaactactacaaaaatagtttttcctgacatctttaaacaaccgtttaaagtattcccgtcggtctctataatcgtcccagaacgagcaaaataggcaacggttaaaaatcgttgctaatatggactttccgacggtttaaaactgtcgcgtataacagggtataggtgacgattttaaaccgtgccctatactat

SEQ ID NO: 325384 - DNA, 1045 bp, Cannabis indica
aaagaacattcataatatcaccaaatttcgaattaaaaccaggggagaaattgaataatgaaagttttgttttgaaagtgatgttgaaagttgtaagtattaaaataaaacccagcaaaagacaaatcattaaattgaacagtcagtgtgtgtatccctatagtataaataaatataaatgaagaaagacccaatttggtaggtgactactactgagtataccaaaggtattaatgggagttttgttttgtggctgagaaattagacacatgacatgaaatttccaaaggcttataaatcttaaatagtctgacctctcatcccatactctaatcaatcttaataatcattaacacatatttttttaatctttagattaatatttatatatatttatatggttgttcaatgtgtttgataggctgtctttatctagtgaacaaccaaattggtagtagtatatataaccgtactaccataacataaaatattttatggttgatcagttttctttttaggattttatagttaatagtttggtagaaaatattactactcataatattttaatatatatatatatttatacaaatactacaaattagacttataacattgtgcatgttattcagtttttctctctattttacacttttggatctattttaaatcttttatgatcatgagagtattgctgtaaaaacgggtcaaattttttgatatgtcatgaaactacactagcatgaccatgcatgacaaaaaaatatgagtttgcgcataatacgatacgatgttataaaatagtacgacacgacatgaaaaatatgtgattaagcatggcatggaaaatataaagtaaatatttaaattttaataattttaaatagtttttatctaactgtttgtaaaatattgttgaaaaattacataaatataattttttaagggttacataaatatagttaaaactagagatgtgacagtcagtagtcccgtgatccgtaaggggaaataccgggtaagctgtgcaatcccacatcgcctg

SEQ ID NO: 325385 - DNA, 800 bp, Cannabis indica
ttaatatataatatagtttggcccctcctaaatttttaccctggctccgaccctgtgtatagctgactatggcaaaagctatgagagtcaaagaggttcttagctggattaaacataaaagtctttttaaaattgtaattgaaattgattgtcaagtagttgcttaagcaatctatcacactctctaaatatcttctccatatgagctaattatttctgattataaacgtttaattttttattaaacaatgcctctattatttttgttaaacgattgacgaataaggagaccaattgtttggctcatgttatttattctttttgaaattgtcgatttagttgggggtttgtctcaactaatcttcatataattttgttaataaatttgtatttttttttttgactaactggaaaatttcattaatcaaagaccaaaacaagctacaacaaggccacacctaaccgaccccaaccaccaccagctgcaacaagcagccactacaacagaaggcgtaaaaacatgcctttttcagcttgataaatcttcctattctttaaactatacaacctgtatttaactaattctttaatctcatttacaatcttcaatatagttaaacaactactattatgcacacaaaaattcctatttttccaaatcatgtaaatggtggcagcaaagagcaaattaaccacaccagaaatcttgctagaaaaccagcagtgccacctattgtagtccagcgaccaggcaacaacaccacaccattcaaaaatctgcttcacaacctccctagaga

SEQ ID NO: 325386 - DNA, 661 bp, Cannabis indica
aaatgtaaaaaattaaaagaaaaataccatataaaattttattaagaaaagctaccatatttttgtaagacacaacaaaaaattccatgttttatatagtttccaaaaataagaaatgatacgacccaatataggccctaataaaatattacgaaattactctaatatttttgaaaagttgaaaaataattacaaaaaattgctcatgagtaatttgtagtgtttatattgcatttggaagctatgaaatcttaatcttatgatagaattttggtaattagataaatgttaaatttggtgtgatttataagaaaaaactacaaaaaatgctatatttgtaacaattgtttacgaaaagatctatatttacaacgagtttgctactctatttgcataagtcgtatttttctaagttatggggtttagtgtaatttaagagaattgaactcaaaaagtgtacattagaaaatgggagaagttaagaatacccacttattttatacattaattagatttatctttaaataaaatttaatttaaatatatatttttttatgactattgtactcaaattatcctcacatacactaagagataatttcacaaatacacaaaacaacaaaaaaattacaaaaatacggtttcacagaattttaaacat

SEQ ID NO: 325387 - DNA, 1151 bp, Cannabis indica
ctttcttctagtatatatatatgatatcatttaattttataatcatttaaattatttatttaactaacaaaaataatcctatccaattcaaaatatatatcaccatttatgtataagtctaaaactaaaaatatatgtatatctctctttttattttcttctaaatgtttctcttttttttttttcatagccactttctttccttttttatatcaatattaactttagaatttatacttatgttaatcaatatcaacttatgttaagttaaaataatgattgagatttatacatgtgtactttttttcaggtcatcattccatcattgaaaattttgttaaaggcgagaatgagaactattgtaggttgctaggtttgaatagcagacacaaagatttcagtagagcaccagtgttgtgactgggttttatttatctactgcctaagaaatttggtattgtatttgtttttgttaagtagtttggtattatattttaattttagattttctactagttatttgcactactgctaaaagataaagcttctataatgtacatttaaaaaaaaaatgcatgattttttatttatataaaatattgtatgataatctttttttctttttaaattttttagagtttttttatataaattattttttttaataaatatatattatttataaaaagaatatgcataaaataaatttaaaattatttgacactgatttattatttaattaatatatatataataatttaactgccgcacgcgaaacgcgacctgtttactagttagtaataatccaaaaaaaaaatgcaaaagtgagtatggaggtcatcatccgactataaatatatatatatatatatttaaattttcggtgtctaacttttatatataatgactttctcgttacaaattgatcttttatattttttttctagataaaattgatcttttatatgagtatttgaaatttattgaaggaaaatttgtaccataaatactatatatttttaatttttatatacttaaatactatattttttggggggaatttaataccaaaagttgtattttaggtctctccgttactactattttattagttttgattaggtgtacacgtgtaaggctcagattaaatc

SEQ ID NO: 325388 - DNA, 1593 bp, Cannabis indica
atttgttatctaattatttcgacgtggctttgagctagtccagcgagaatgaaaatgacattaaaattgtacgaatttatttgtacatgcttatatcagttgaatggcctagtcaaagtcttctcttttgtcatgaaagtatttcagaagttgtaaagttaaactaataagttaaaaagatttaattaaaaactgaaataaaattaaaaataaaaaggaaagaagaaaaaaagagagtgaaatgatggattgattgatagaagtcaatcctagacctaagcaacaatatataagaaactagctttacaattaaaaattaaaaataaaagaaaagaagaattgttatggaaaaaaattaaaattaaaaactgaaaataaaattaaaaattaaaaataaaaaataaaaaattaaaaaactgaaataaaattaaaaataaaaagaaaagaagaaaaaaagagagtgaaatgatggattgattgatagaaaatgaaaaaagagagggaagagagtaggatttgattgatgatggatggaatgatgactaagtggtatttgtgtaataaaaccaactttgtaagtaaaaatgtagacataggcgtgtagaggtatttaggtaataaattgtgcaaaatggatttttcatgtaaaaatttcattaacttatcctccttacaatagaggattctaagctgaaaaagaaaactctttgacccctaagtttcaaaaaaaaaaaaaaaactaactaactaaatttagttttttctttaaaaagaaagagaatttagtcacaatagggcgatgaattagtttctttagtttagtccactttctataatagcaatagtaaacaatgagaacaataaggtacgaacgaccacctttttcttttctttaattaaactacgttctaagacacactgaacactccgtcgaatcatatctcgaaactgactcatgatacttcacttgtttaagtcccatctttttactttgaaaagaatagtataattaatatgaaataataaaattaattagtaatattaataattagatatacattacttttacttacataataatgggttgataaagcaagattctcttcttcttatatcttcacttctaggtcttaccattgccattctgataatcattcctattctgatactaaaaaggcaaatttagttattaagcaaatttatgagaattgtgtagaatatctaattaataattgtgagaataatacaagggaattttcaattttttttaaaattttttaattataaaaatattttcgtaaaattttaaaattacaaaaatataatttgctcaacaaaaagtttaaaaacaacgaaaaattaatataaatcaacttaaacaataatataattataaataaactataaaataattaaaaatcagtttattatttttattaaaaatatatttttgtaaataaaaaaatttaaagtactaaaattataatactaaatttaacttcgacggttgaaattggtttgagtgaggttcatcaaatataaatatatatatctttatatattaaaagtgtctatctaacggcatttcttggt

SEQ ID NO: 325389 - DNA, 1708 bp, Cannabis indica
ggtaaaataaatttccaacacacgtaagataagataattaaattttggaggcttagtaatcaaattggatggaaaagtacaaccatcttacttgtgtttttcttttcattttatatgctattttggattggatgaagtgtgagaccattaactaataaattggattgaaacccaacagttattacccacccattagtcattacccaactaccaaattaatactttatggttgttgggcagattttgacaaatttatactagaaagaacaaaattatccaatttagatgagaaattgaaaaaattatttatatttataattccaaatattatagatatattttattttaaaaatattttgtataacatttcattctaactaatgaaaaatttactactctaaatatttaattctaattaaaaataaaattaaatctattttttgaaggcttaggttttcttaaaaagaaaatgttaattctttatttttgacaaagtttaaaattttattaattgttatagcaatacaatagtaaaattttcttgatcaaaatattgtttaaaaattataaaagtttatattaatttttcataaatttaaatttgaaaccttgaaaccaataaaaatatgtcacaaatttgcaaatagaaatgaagttgagaaagtattgccacaaaaaaaagtaaatgattaagtgtataaaaattaaaatataagagaattttgtcgccatttactattataaataaatatattttgtgttgtgattgggtgctaaggttcaaaccccgattaaatgattacatgtatagtatatttattatttagttagtgatgtagtttagggtaataatagtttctatttattgaaatttttgaaaactaaattaataaaaaattaagctaagaaaatatgattttgaaataaagaagacaaagatatttatgtggttgaggtgttaatgagtcttagtcgacgagtcaatattattgaagctttttgactatggagtattttacacaaacgttcttgccaaatttatgtggattttctaacaaaattcgtaacctttgcatggaagggtaaagccttaattattggttgaaatttgggttttttttggtaaacccgaacccattagggttttatacatgaaataagttcactaatagggtaaaatacaatataacatggactttgaacctggtgggggatgcggatgcccaattgagggataatcgcggtccttacagcatagtactatttgatgttgacaggtggtcatgtgccgctgatcatgtataatacaagtcgaaagagtagacgttagacaaaaaggtaggttttttgtgttgtgcaccttttcggatctgatgtgggggacaaaaccctaattctatgggattgtgtgttagagacatgccacatcggagtgaaacaatgccgtggatcgagaaatggattccatgcgcaccaaaaaattatgggaatatgaaactgcacctttagatattatgcccatagggtgcaagtggattttcaagaagaagagaaatgttgaagggaaggtagagacctttagagctaggcctgtagccaagggctacacacagcgagaaagcgtcgattatgatgaaaccttctctcctatggcaatgcttaaatctattcacattcttctttccatagctgccacttatgactatga

SEQ ID NO: 325390 - DNA, 632 bp, Cannabis indica
tcagtgcctatgaattgtatgcggttatgtcaatttacaggccctatactatgaatattgcccagttttattgacccaaaacacataaatacccactagcatacactcctaaaaagtcttcgaaaaaaaaaaaaacccagaaagtaaaagcgcaatttctctaaaaacctatttttgtaaaaacggtagaccatttctgcaaattttccaaacatctaacttctaactcaaaactactccaaactttgtaaaactctccagaacacctaaaaacaccatatatgacaaattctaactgaaaattgcatcaatagaaccatgtgtcaaagtttgccattgttgagcaagctttgagttcaaaaaactcaagcttgctcaatacatggcttagccaccaaaagggtttcaaaactcaagtttgccatataggtgatgcagctatgtgatatatgggtgccaggctgtggcacgagcttgtctgattaggcaatgcaatataggattttcatattaaagcatcgacttgcctaattaggatgtgatgtaatgaagatggttactttatgaggtaacatatatatgtaaattatatttttaaatgaatatgattcctattattggtataatagttt

SEQ ID NO: 325391 - DNA, 1847 bp, Cannabis indica
attaatttttttatttttagtaaaaaataagaaagccaattatttctatatgtatgaaaaataccaaatatgcttatagactaagaaaaactttaaattaattttgttaaaatagtaatcataaattcaattcttactatttaaactcaatattattttaatttttacttctattcatttattttgatctatattaggtttggtttctgatataaaagatttataatctgatcaaataagtttacaataattttgtattatttgaattgtttattgaattcacttagtaatcctacaaaaaaaaaatcaataaccaataatttttcaataacaaaattgcaaacaatgaaaaccaaaattgttctaataattaattaatccttattgttttataacatacgtgtaactgagtttgtagagtagttattccaccaatttgactcatcttttcattctcaacatcacaattacctgtaataatatagaacacaaaaaaaagatagaaactttaaacacacattaacctaacaaaaaaaaaccatttttttcatcaaaacaaaataatttataataaatatagatctataccaagatactcaatatcatcatcatcttgtttcgaacacacatgaaaaacaatagagtccgcaaacatagtcaacaaataaccaatacacgcgatcatataagcatatggatactttctttcgatcaatttctcaaaagcctcgtttgcttctggtaagaaatgtgtaaaagccgttccaagaaaaaaccctcctgagaattgtgtaccgagaacaagaaaaccctcatcccatttgaaaaaatatggggatagggccgcaaagaaagtcccaacaaagatgacaatcagacactttagtttggccaacatcaaaaactttaaataaagagaagttgtcgacgatgcttgttcttctgtttcattgttctcgctactttcctcatcgttgtggcgaaaggccacgactgtggtgaggaagaggagaaaaagaaaaagaagggctaatgaacgaagcattattattattattttgatcagtacgtatggataatatcatagtaagaagaatatgcatgcatgcatgcatgggacattttgtttaaactattttagggtttggttgtgattttggtttggtgtagttaattatatattaattgtagttaattgttgtatagtagtgcttttgctctaggataagaccaatataacaagagtacttatgtttgtttgttttgtcactacaaaagtttgaattttctaaaattggctttgtttgtttctatatacaccaaatattcttttatttttggaaattatatgttgaaatatttgttagaatatgcaaccaattaaaattacaaggcttggtcacaacaataacacgagttaatttttagcttaatttaatgctacttgagataatttaaaaatttatcagtaataacaattaagttgtttaattttatcaatttgtagtaaaaatatttgtttaaactttaaatgtacatacatatcttctaggtttccttacatattaataagtttctatttttaaatattattgtatattaataagttgggaaattttatttatactccataattaatttataagtacatgtagaaaaattacgattaaaagtgcggaatcaaatcaatgaaattttaaacagttaaacaattagcaatgacaatattttcaaactgagcacaatatataattgacagaaaataggagcaaacagaatatgtaacgtccatgtttcaaacttccattgtgcccttacacccatagaatgatggctcttatacacga

SEQ ID NO: 325392 - DNA, 1366 bp, Cannabis indica
cccacgccgatccacctcctccaccgcaccgcaccgctcgaccgccgcaaccaccgcaccgctcgacgccgtgaccaccatgaaaacagaccaaaacaaaaacccacgcgcgatcggccacctcctccaccacgaacccatgtctatcgaaccaccgggtccgatgcagtccgattcagaccgatgctccatgtgaatgggttggggaagacgaagacccgatgggtccgatggggacccacccgatggggtccgatggcacccgatgctgagtctgatggggttgggtccgatgcttgtgttgagtgatttttcaaaaaaattgtgttgggtacgatgcttgtggagtcaaatttgaatgagggggtaatgtgagaattaagtaaatattgtcctattttaccaatataggctattttaggtttaaggaaaaaatttccccttaatgtaaggataaaaaatcaaattttcctttgtaattgatttttagttatgtgtcaattattttttatattattttgtgttattcttatgtgttttttttttcttgtatttttataaaataccataaaatatttaaaaaaaaaaactttgaacataaaaatgtaaattattttacaaaaattaattatccctttaatttttgagatattttcataaatacctagcaaaattaaaacaattacaaaaatgaggtttattgaattttgaatatttttaaaatttattatgtttttatttacaaagtatgaactaataatgttctcgttctaatgttgttttaatattgtaattttgttattttcttaaagatttcaaatagtttaaagtattaaaaataaagtttatgatattttaatttattgtacatgttaaaaaaaaattcaaagacaataaactattcttaatcttttaaaattttattgtgatgatgttttaacataacaaacatattaaatgaaaagaaatatttcaacactttcttaataaagaaattgttatagaagattctaatcagtgcactcagaataattttacggtttataagtttttatttacacaactacgaactatttatattttcatattatttttgtgttgtaatcttgttacttttttttaaaaaaaaaataaaaattgaaaagtttatagtatcgaaagtaaagttcctaatattttaatttatcgtgtgtattaaaaaaaattcaaatttattttcaacatctaaattttctagaattttttaaaaatttccaaaattaatattataattataataagcaccatcataaaaaatttaaagaaaaaatactaattctgacatatattttcaaatacataaattaagagaactacttataaatat

SEQ ID NO: 325393 - DNA, 442 bp, Cannabis indica
ttaatcaacatacttgtgagtagatctaagatcctggtaaaataaattccaacacgcataacgatccctggtgataacatctcaaatcgccaacaggagtgtaaggagagtattggtcgacaatggtagtagtgtgaacttattatacatgacaaccttggagaaaatggggttaagcgtgcaggacctacaacgatgcaccaccaatttggttgggtttactggagatagcatagccagcataggaagagttactctcccattgacactcaaggaggccccaaaaatagtcacctgaatggctgaatttgtggtagtagaccaaccgtctccctataatcccattttggggagaccggcagtgtacacacttggggcagttacatcaatcaagcatcaacagcaatacagactattaatgtttttttatttttttattttt

SEQ ID NO: 325394 - DNA, 1143 bp, Cannabis indica
gtaagtaagtaagtagtagtagtagtagagtaggagggagggggcggggggggcgcgacggccaccaattgtataaggtgactccgcccctgcacgtgtgactgttttttttataggcatggtaagtaattatttgaatcttattttttatattgtacactatttaaaattttctaaaaatttataggtgatcctaaataaatacaaaatacgcgattatgtaaaaatattagactaaaaaactttttttggatcacgtacatttgtaacgtgtgaggacttaaaaattaaaaattatgaattatgcttggtgatatgtaactaagagagtaattgcatatggaagttatatattaagggctcgtttggtacgtcatattgtattatattgtgttagattgtactgtattgtattgtattgtgttggattgtattgtattgtattagtattatttaatacaatactatgtttggtattgacttgtattaatagattgagtaaagttataatatattttcaatacacttgaccacaatactaactatgggtcgggtcaggtccgggtccgatcccaggttcgggttcaagttcgagtctgggtctaggtctgaatccaggtccaggttcgggtctagttccaggtctatgtatgggttcgggttcgagtcatggtctcggtccaggtctaggttcgtgtttaggtcccatgtcttgggtccatgctcgggtcctgatccagatctcgggttcacgtccgagtcccgggtctggatctaagtccgactcccaggctcgggtcccggtatgggtctaggtctgactctctggtccgagtccaggtccgagtctcgggtccaagtttgggtcctggtccgggtccagcttttgggtccgagtttgggtcccaagtttgggtttgggtctcggtccaggtttcgggtctgggtctgagtccgagtcttggatctgggtcctgggtccgagtccaggtctgggccctggtccaggtcctgggtccgggtctgggtcccgatcccggtccacaaaggcaagattgattgaacctatgacaacacggttgtcacggttggaattattttaccaggatctagatttactaacaagtatgtttcattaacatc

SEQ ID NO: 325395 - DNA, 2012 bp, Cannabis indica
ctataaaattcttctggtttgaggtatattttcttattattatttcattctttctttctttcaatttcagtaatcaataagctttaagatatttttagttctgaaaatggttttaaatatatcatcaagcttgctttttataacttggctggcacatccacttgagattttgggagcctaagttttttttttttgaaaatgaaatatcaacttcattaaaatttagcattcggagtacataagggcttgtaaatcagccggagcattatgatcatgattgctacaaccagaaagaaatcgagattgcctagcaacatagtggacaactcgatttgttgatcgttccacaaaacaaagactaacattgtttaaagaggaaagtaaaaactgacaatctttatcaataagaccaaagacagatgacatagtgtgattattacggattgcttgtacagtaagcatgctgttagtctcaacctcaacaccttcccaagagttcctcttcacccaactgagtgcttctctcactcccagagcttcaattgtctcagccggataagtaccaccatgatggacagctgtagcttctaggagtttgcctgaagcatccccggcaacgatgccaaaatcataactttgatcctctagaaataaggcagcatcaacattaagcttgattttattagtagctggtttaactcaaagctcagcaccatctccatttgtccctagagacagaagataggcatgttttatcttgagctttcttccattgatcaagcattgtggagcctaagttaagattacatattggagaaatgagcttccctggctatttacttgccatttatcacctttccctaatcattattaataggtcattacattacagaattaactaatgcttgtcaatactatttagtattactgtttacatgagttaatattattttatgctcaaaatggtttacgggaattggttaaatcctcatggttatgtaagttatacattttgttgtgtatgactatgagccttccataagtgcacttctggaagtgaaaggcttcagcaaagtttcaatatgaatggcaaggtttaaaaactgaatcatacattgctaggtaaaatgtcaaaacaagaaaatgtggctgaaaacaatccaatctcacttctgagatgtgttgaatcttaggccaatctagtcatccttataggcatatttgttttagcaaggggcactccttgattgatgaagtggtaagaaaagtggtaaggatttaagggatgttagctgttgaaaagcctttcattccaaatatgagactctatgcagatcccatatactaaggctcttttgattgtttcccatatctttacaagtgactccaacaccacatgaggacagttgcaaaaccttcattccttcacaatcacagaaagtgagatgctgtaagtatggtaggtagataacaaacaaggtcagccaacattaaggtttggacattctttattgaggaataacaaatgaccattgtttccacagcaacatattttcaattgctaacctttctaaacaaccaaacagaggaaaagtgtgatgcttctctatttgagagaatgcagttgtctagtccagtttgagaatattggacctctataattctcaagtttgtatggggtataaaattaaaattgccacatttacttgacatatgagctgagaattaaggatgttattaacttgcaagattaagatgtaattaagattataatgcaaaaatgatattgctgttaaatggttagtctcgatactcccacatggattacaagctttaagcagctcatgagtgacttataaaactcttggactttgaacaaacaaatcatacctttctcggccttttggctaagatcaagtgtagtatctgttcttatcagtttaatatctgatatgtgggccaatggctcacacgatattaaattaattttttaaggggaagagtccaccaca

SEQ ID NO: 325396 - DNA, 610 bp, Cannabis indica
gagtttctctatatttcatacaatgactgaaatttttagtctatgtgtaatataaatcaatgccacaaattcagacctagataatattctacaacaaaaaaccacattactgtattttttggtactaatatccttcatcaaaatagcaacaaaattgaaactcaaggactctaaagatatattatatcaatctatatgggaaacaaacaaatacataaaaatttataaaatcatatataatttttttatataaatatcatataataacattatacattaaaagagaaaaagaatttaataataactttacacaaagaggatttttttttttcatgcttagttaaataatttagttattcctagtataattttgtgttacatgtaatgcgagaaatgagtaatatatatatgcacacataaatcacacaaaaacatcacacaccaatgtggtaactaactttccattggtagaacccatctaaacaaatgatcagttaaattagttaccaattaccaataaatgtgtgtaagtttgtgtgaattctgtttgcacaaatcattttacagctgagaatgaataaaaatataaactaaaaaccagatataatac

SEQ ID NO: 325397 - DNA, 836 bp, Cannabis indica
gcgaattccccgtcgcactggaacaggcagcgacaccaatcttggtttttcttctcgattctttcaccacttttcctcaattcttgtacatactttctttaaatgctcgaggacctgaaaccaaagaatcaagcgtaatatagccctaaaactagaaacaaagaatgaaaactaaccaaaaatatgacccgaaacttagactaattttagcctaacaattacttatcatgttaaatatatattttgaaaaataaaattaaaaatttaataaaaatagtataactaattaaaaatatgaataattataaattgcacttaaaccgtagtttcaaactaaaccaaaccgttgttaatggttttgtttggtttggtttgaaaaatttattggtctggtttggtttttaattcaaaaaccgttatactggtttggttcgaaaaatataaaaatttgaaccaaaccaatccgtgaacacccctaacaaaaataacggatatgcttactacaaatttttcatagctaaaaaaaggcaacttaatcaactaaataaaaaaaactatatataattatggtaaaaaaaacatatgagcttttgaaatgcattccataaaacgggtgcactgatcattcttatctatttcaccattcaaaaaaaaaaaaaattactctaatttcttttatagccgtgtatatttaagaaactttgtcatatttattcaaactattatgaattttttagagaaatttaaaataatttacaatacgaaaagtaatgtttaaaaagtttattcacacacgtaaaaattaaaaagtcaacgtgtgttaacaactaacttgt

SEQ ID NO: 325398 - DNA, 1545 bp, Cannabis indica
gatttttatattgaaaaaaaccgaacaaaccgaccgatgctcagccctacctgaggatcttgctcccagatttaggatctttttgggacctttccaagcaattttttgggaaggactctttttcaattgttatcatggtcaatgcaatccaagttgatgaggtggagaatctggaataagaaagagccaaagcaccacaagtagtgtataattcatcttaatgggagatggatcaacacactgataaattcagaaattatggggcactgtgggcctacgaagaggagcgcggcctcaaaatatatgtggcttgttttggaataggctttccttgttaggagaatcacctggcaagtgcgagaatagatttggtgtctggagctgggcacacatggaagtaggggcacatcttccactctggagttactttgcacgtatacgtgcagaagtaggtataacgcccttccagttgattcccccaagtttacaaattattggtgggacggttcatcctgtgaaaggatctaaaggtggaggtttcaagactagaaaaaattctttacttctaccaagtgaagtcaaatcccatgcggaagaactggattaaggttggtttctacaagctggagaaacggtctaaggtgatgatttgtccaaatagtaccttaaaatacacccatgactttcagcaatactggttcttcaccactgacttcccttttaaaagaattccaaccctgtcgttgtagttcaacattgcagatgattgatgccacttttcttcttcttttaggatttctttcaatctctaataaaatctaattaggcctcctttttttatttctttttagacgatatctctcatccacaactcgctcctttcctgctggaaagagaagctttgtacaaaggcctttcccaggaaactttgagagtataaggtttgatcatcaccgcgaacctcatgcgtgttggtctaatcgcccttcattgaagaagtgatgcctacaaaactcgcaacgtccacaataattttgttgacgtaaaagaagtcatcacataaatcttcacgaatgaggcaaagaaagccataaagaaggataaatgttggttggaagaatggacccgattacattcggaaccaatgaatgaagagacgaaactggaagtctttttcaaagtagtcattccaaatggaggccctctgagtgctagcacattcggaagaggtaactctctcttccgtctattatgcactctacgtttggaaaaaaataaatcacattgatcagaggattcaatccctatttcttagaattaaactatctcagatacctcatgattcattaaactatccaaatcattttctttcactttttcaatacgttagtagatccttaatttcattttaatgaagattctaaatttcttaatatatgtacataatatatatatatgttaaaaaaatgcacttcgagtataattaggtggcgtttggtaacacttttttaatcagtttttcgtttttaaaagtagaaaaatgaa

SEQ ID NO: 325399 - DNA, 871 bp, Cannabis indica
ttttgaatagaataatataacgtattattttgtgtttgttcataattctcatattattttaaaatagaatggaaacttaggttacacaaggaaaatcaaaagcagtttgggattcaacagcatatgagaaatggattgatttagttgagagttggcaatagaaatggatcacatttaagaaaattaggttggaaaaatttaataaaatttaatttaaagacaggtagaaattatgatcgaaaataaatgaaaaattattgggataatgtaaaaaaggagtggcatctgtgggattcattacttagaggagatattggacttggatggaacacgcaaaggcaaatagttgatgctcttaatgaatggtgggaggaaaagttacaagtaggtttttgtacatacctcttataattatgattttatatatataacaattatattattttattttttgattaataaatcaatcaacataagtatcctgatgctgctaaatttcgagtgaaaggcttagaatattctttcaagctggatgagttgtttaaggatgttaccgctacaggggctagagcttgggcaccaacttctcgttcacttcctcctttatacatagaggatcataatgatatagagattgatgagaattcagagaaaagtaaccatgaaagaatgagtcaacaaatgagaaaagagaataatttacttgacccaaataagaagcatttaagaagggaaaaagaaataattctacaacagtaaagttgtccaaacaacttgatgaaatttgtgaggcaataaaaaataggagctcatacatacgtaccgatcctcctcgatatattgttcaagaagtgatggatatattagctac

SEQ ID NO: 325400 - DNA, 1565 bp, Cannabis indica
atctattccaaaaataataacaaagaaaaaaaacaagaaaaacaaccagaaaatgtgaaggctaaaaatagcctaacaaatcccaagaaaaataagtttttagagtcgtttatctttgttttttttttattcattttttgtctataaaagaagcggacttcaatagttttcaacaagcaatcaaggagtacgaatttcagagagcaaaatcaatattgaaggctttctctccaggattttcaacattcttttattctctattttcttcttctaatataaattaatatgtgtgaaattgctacgatgaacatgagtagctaaacagttcattagggtttagatggatattgtttgacattgatttttgattttaatacgatttaattttccctcaatttctacgtattttattttattcgtttttaatttcttttaattgtctgaccatcaattaattgtttatgagtttgatacaaaatttgagaagtgagtgtcaattatgcaatagtaaattaaaactaaatttcgatataggacaagggtacctatatggtttggatgtgtttaatgcattttacatatttaatttatcacaagagtagaaaatttacatgtaattgaggtttatatatttaaaaagactataaattacataagtaaacatgttattgcatagaatttggtaatatgaatagaatcatgttaaaccataatcaatagatgcaattgaaatcgaaaaccctaacttttaatcatctttaatttccttattgatttacgtgcttcttattttcattatttctttatttgttttctacctttaattttctcttaataatagaaataaaaattaggttttaaagtacttaactacaatcattgtggaatcgacatcactctttgtgagtctataacttgttaacgatacgtacgtatatttgcgtgttaaaataccacaaataccacaacaatgggtgcgagtttttccactaaaaacatcaccgacgacaaagtcatcattaatggattgatacttcgtcagtgaatagatcatcaatgacaactttatcgtcagtgatgttagggcggaatgaattctaaagcctcactctcttcatcattttatccatttcatttaatttatttccatctttttctttgtaagaatcgatccccttcaccattttgtcaatttcatttcattttattttttttcaattccaatttggtagttactcaataatattacatgtgaaatgtaactaagagatcttgacacggggaaatcgaaaattgggttcctttggcccgttaatgattggtgaggccaaattgaagttagggaaacctcggctccggtaaaagtcaaacaaagaaagagaaagagatagagagagagagagagagagtttgcgagagagggatgaaatccttgggttcgggtttccagatgctgcgagcaccttggtgtggtttgattggaccactgtcactcgagaaataactatcgttgcttggcgatgccaccaagcaagcaacaacacacaaagagagagagagagaga

SEQ ID NO: 325401 - DNA, 979 bp, Cannabis indica
gtaagaagagttttgtgaatgtagtagggtcaccattttcattgaggatatgcagaacaaccgatgaaaccagatttcccacaatgtgccagtgatggtggtaaaacatggccgacataccatctaaccccggacttttatcagatgccatggatttcaaagcagagtagacatcttccttagtgaagtcacgaaggagaaaatcattttggtcctcatgtatggtagtagggatagtagatagtacatgtgagagagcccaatgatcttcctcagaagcagtaaatagatcctggaaataatgagaaataatgtttgtaatcccctcacgatcagtaacaagattaccattagtatccttcaaagatttgatcttgttggtagaatttcgagcactagctttggtatggaaaaattttgtgttgcgatcacccgattttaaccattcaatacgtgacctttgttgccaatattgttcctctttagcaagaagatcatccaaaattgattcggcagtggtgagattatgagaatgtaacaaatcggtagcaggagcagaattaatactgtgaacccgagattgagcttgagaaatatcatgttttaattttccaaactttcgggtgtgccactgctgaaggtttgctgcaacattttgcaggttgatgtgaagattggaggacaaatcacagtcggattgcatctgccaggtagtggaaattatttcagcacactcggcatccgaaagccacattttttcaaaccgaaaacgagaccgtcttggttggataggatcagttgtagctgaaggaaaaggattgaccaaaagagcgcgatgatccgaaccaaaataatcaaggtgaatgagttttggcatagaaaaaacatcagtccattttttattaatgagacaccaatccagccgttcctttaaagctgtaggatttttccgattcttagcccatgtgaattcatcccc

SEQ ID NO: 325402 - DNA, 1348 bp, Cannabis indica
ttaaaatactaacataagtataattttttcacctaaaataatataaatactactacatattggttgcatcatcatcaatatcatcattgccttggccatcattatctccacctctgtccgactagatccaacatcattaaactgcagtggcgagaggtctaactgaaatcctggaatactcacaatcaatttctgcaccaatgcccgcattattaggtcttgattgacttgattttgcttaagagcttgattttccttcataatggtttgattttcctataaaattgcctccacatcgatcgattgagaacctgacatggaagatgaagaagttggtacgcattttcctccaattgccttaagcttaggcaacggcccaaatcctttcacataacgtgaatgtggtggaccaagaacttctacaactatatccatatcggatgggtactggctcgaatccccagcaatgcacgaagcagcaaatgatgcatttgtagatgtagaaccagatgcaagcatgggatatttttttttgtgtcatcacctcctacaaagaaaaaattaaatcatcaataatgtaaacaaatataactttaaaatttaattaatttaagtatcaaataataaacttttaatgtaattacatatttttcttttgcagcgtcactcaaccactggctcttgtcattctttttctccaaacgtgtcaatagcactttcataggctccagttgttgggttaattatctacaaaaaaaaaaatgattaaaagaaatacatattaaaagtaagatgatttatgaaacttttcttactttaacatgcatatgtcccacgatggtctttgaactgtacgcccctaatattggcattttggatcgtgccactttattttaatttaacttttttcttgttatattatttctaccgaaattttgacagcataacgacttaaaattcataaatctcaaattttaaaacctatgaataacataaacaaatattcttgaaaaatatatcactacaagaaaaccttcttttgccagcgcatttttgcgccagtaaaagtacactaaatgcgccggcaaagctttgccgccgcaatattgcgccggcaaaacttgtctgggaatcttggtcagtaaaagactttttaccggcgcgtagactaaatgcgccggtgaactctgttttatcggcgagaaatcacgccggtgaaaaagaagtgccggtgttataaaatacccttatccgctatgaacctgctttgataaccttttgttgacgccaattctcagattggcgccaatagttttgtcggcgctatacatgcaccggcaaaactatt

SEQ ID NO: 325403 - DNA, 776 bp, Cannabis indica
ttttttttttttgagataatttaatgtcatagttaaatatactaataaaagagtacaaaaacataaatataaatgaaaaaagtagtgcatttattgtggtgcaaattttacatcatagtaaatgttgtgctaaattttacacaaaatttgctgtatgttaaatttacatcactttttggcacactattagagcacatttttttgtcgaatgagttatattttagcttcccaccaatgagttatatttacatcttcattggagatgctcttaaggaagttttgccacaaaaaataaataaaagagttaagtgtataaaaattaaaaagataaaagaattttgccacaaattactctaaatgatatagatttatatagggagaatacccttagaaaaactaaaaaaaattgtcattattttctgtctatatttataaaagctaagattaaacttatcaaatttttgtaaattttctcgagaaaatacgcaaatttattatcttgttggaatttgaaattgactcttggttttttcaaatcttaattttattttattttttttttgaagaaaatcttaatttttcattttcatgaaggttcatttctatctaatttgtagaggaattgtaaagacaaaaatgtatatttcaactagtatattttttaaaaaatatttattataactagcatatctattctatataaagtgtgcctatataactgaattcttgtttatgagaaattcatgggtgactttttatttatatttaataaaata

SEQ ID NO: 325404 - DNA, 1376 bp, Cannabis indica
ctcttggatgaattacatggtgctcaagtgttctctaaaattgatctgcgctcaggttaccaccaaatcagagtgcggcttgaagatgtccacaagacggcatttcgcactcatgaaggccactatgagttcttggtcatgccatttggtcttactaatgctccatccaccttccaatctcagatgaacacgcttttcaagccttggctgcgcgaatgtgttttggtgttctttgatgacatcttggtttatagtcccgacgaagttacacacttacagcaccttgagctcgtgcttcaaactctcctcaaacatgaattttttgctaataggaagaagtgttcttttgggcagcgacggattgagtacttggcacatgttgtgaggggccaaagggttgcggtggatgatacgaagatcaaagccatgttggattggcccctccctacttcgattaaagctttacgagggttccttggccttacggggtattataataagtttgtcaagaattatggttctattgctcgccctctaacagatcaattgaagaaggacagctttgcctggtctccggcagccaccaatgctttccattctctaaaaacagcaatgactacagttcccgtgttagccctccccgattttactaagccatttgtggttgaagcggatgcttccgaatatgggttaggagcagttttgatgcaagaagggcgccccattgcttactacagtcaggttctgaaaccgcgagctcaacttaagtccatctatgagaaggaattaatggccattgtgttggcggtccttaagtggcggccgtacctgctaggtcgccgttttattgtccgtaccgatcaacaaagcttgaagttcctcttggaacaacgattggtcactccggaacatcagaaatggttggtcaaacttttggggtatgattttgatatccactatcggccgggggtgggtaaccgagctgcggatgctttgtctcgagtgcagcctctagaatgctctatccttactactactacttggttggattggacggtgattgaacaagaaattaagcaagatcccttcctctctcgagtagtggcagatttgaaacaagggaaggatgtcttgggttttaccttcgagaagcaacgtctgttatatcggaaaagacttgtcttggctgccacatcatccttgattccacatttcctacgggaatactatagctctccaatcgggggtcattcgggagagtatcagacttaccttcgccttcggggagatgtttattgggtaggtatgaaagctcaagtggggaactttgtgcgagcttgtgatgtgtgccaacggaacaagcacttggccatgtc

SEQ ID NO: 325405 - DNA, 1900 bp, Cannabis indica
actaaacaagggcaaaattgtaaagaaagagtttctagggtatatttgttaattaagagactttggctagtctaattaattaatatattaaatgaaaatatgagatgtagaaatgataaaacatcaaaattgcaaaagtggggcccaatatccaaagcccagtccgaccactattgtaggtttttatcatttattttttcaataatttaatgccaaataattctaacctaaccctaggtggcatactataaattggtagtgatggcttcagaaaaagatgttgcatcttattccttcagagaaaaacctgagtgccttctacctatacctagccgcaactctcccttctctattcttaactattgaaccgaaccccttgagtgatagagtaactgcccacacacatcaagtggtacctcaatcatagtgtggaagatcgtgaagaatccaaattcaacagaaggacattcggactcagatcttggtgatactctgcgacaaaaaggatacaagggttagaaatcttagtggaaggagacatattattctgctgcaaccactgtaaggtttctcatactttatatgtgtttatttataatcgttttagaagttcatgtttaagatgttaaacaacatacttgttagtaaatctaagatcctagtaaaatatttctaacagtaattactcttacacaataaatggtaatgactgtatctttacctcaatcataatcgagtcataaacgttgataattgttctcacttaacatgcttggtagtgaaaataacttttcttacctcaatccaatatcaggtgtgcatgctaacctgagtggaactatgctcgaagatcctgggtcctatgtcacgacaatgaaattcgataaataatttatctaaactctagattaaaccctaattccataaccgaacaactcaaactccccactagatagaaataacataaatatcactaaaataccctaatcaaagctttgaaaaacaccccaacccaaaaatcaaattcaaggaaaaaccctataattccccttgttggccatacgcttgatcagtttactagtaacctaaaaatttggttgaccggtttcggcaggtttgggaaatcctgatttcacccagaaaccaatcccgagctcctccaatcctgctcaaacttttcagaacactccaataacataaaatcaatgtaattaaacaatataaactcaacgactcattaaaattctcaattcaccatgtttgaatcaaaattaagttcttaaactcaattttccaaaattcaaatcttaacagccaaggaatcactcaattctcataccaacaatctcaattaaacgtagaaattaagcccaaaacctatctaaactacaaccccaaatcacacataaaatacaaccaaaacttaacctaaaattcttaaaatcaaagagaactagaaagagttacctcaaagctttgagctgcacctagggttagctacttcagccaaggattgcttgattagtagagaaaaattgctggtttagttggtttatacgactgtcgaagaaggaagaaaaaaggagaagcttgatatgtgatcatatttgattttttttctcttttggaatataacttcaattatctaattattttttttgctattctgacctaataataattctaattcagcctagaaagattcacttaggacaaaatagtctaacattaataaaagaccattctactcttcaagactactaagctaaaaacattacgtaggggcattttggtcactctctaactaccctgactaaaacgaccacataatattctaaactagtccagtataattccaacataacacaactcttattgccgtgacatttctgaccactcc

SEQ ID NO: 325406 - DNA, 1072 bp, Cannabis indica
ctcttgtgaggacaacactcatagcatgttctgtgattgctaggtacacgcctagctcttcattgtctaggggtttaggcaacacaggtggttcagccaattatttctccagctcctagatcacaatttcacattcctttgtccactaaaattttttgttacctctaagaatgttgatgaaggatacacatgtttctgtagacttgaacacaaatctgcttagtgcagcaatgcgtcatgtttggcgttgtacttcattgatggttatgggcgaattcatgtccaaaagagcttggatcttgtctgggtttactctaaaagaacatttaagggtgttgagattcatgtctaggttcgccacatgcccctagctcttttggacttgacaagcatgttgaccacatacacttctataagatctttataaattttgtttagaagcctctgatatgtggcccatgcattcctcagcctgaatgcacaaacttgtagtagtataggcctaagtttgtcatgaagcttgtatgctcctgatctggcggatgcatctccactttcttatcttcggaaaaggccaagttgtaacagtgacatgcagattgttggtctcctctcaaatatcctaccccatgccttgttgggagtatcgggcagaggtggtagctggatgttttcgcctttaggtctagggctgatttgcctatcatggcattgaaagccaatagaacatcgattacaatgaactgtaccatcaaagttctggtggttggattttctccaacagtaaggggtaatctgagatacctgattgttagagaattcatatgattatttcagtgttattaataaataaaaatatcacctgtagtttattccagtctgaaaaaaaaaagaagtatttgaaagaagagcgcgcaagacccctgtctgatgatggaaacggtgaaacacataaaataagtggttagaaattgatgtagtaataagcgtaaacaataaaagaagtgaaacctgctggaaatattttaccaggatctagatttactatcaagtatgtttgattaacatccta

SEQ ID NO: 325407 - DNA, 1329 bp, Cannabis indica
tttcatatataaaaatattttaattacattaattaactaataaatcaacaataaactttattttttaaaagaaaataattctttatcaaaccaaaatttaaaatttctaacaggcaattaaagaaatcaattttgttccaatttattattaacaataaatcactaatttctatttgtttcaagatatatgtaactcaatttttttttattttatacatgaataaattcaacattcaaattaattacagaaattaaataattaaacaacaataaacattcattgttatatatttttttaaaaaaaaattcaaatcaaatatttcaatcattagcatgcaatcctcaacatattatccaattaatctatttattaagtagtaactcaataccttgttattttttttttttttttttgtaatttgatagggagctccgatcaaaaaaatttcaactcattctagtatgatttgcaacatttaaaaaataattatatgttatgtagtaaagatctttctctgttcattttgagttttatgcctctgtcttttcatacctgttttcaatatgaatttggatttagtaaggagctttgatcaacaattttataactcattcttgtatgatctgcaacatttaaacaacaattatatattttgtactatagatctttatctattcgtttcgaattttgtggttctgatgttaatacatgttttcaatttgaatttgaatttagtagggattttcgatcaacaatttctcaactctttattgtatgatctgcaacattcaaatgacaattttaggttagatagtgtagatcttactccgttctttttgagatttgtgttttgaatgtttgatacttgtttttaagcagatttgttctatgagattttgttgttgatcaattgacgtttgttggtgtttgttttttgtttttgtcaacctgaataatcgaataggtgagtttttttaggatttttcattgagttgttgaatttttgtttcagaatgcttcgtcgagggaacagtggctactctgaatttttttttcttgggaagagactgtcgaaggtgtctaagatgatgacaccgtattttatgtaatttaatatagggatattggcgggtaaaccacttgaactttacggtttgtaacagctaaccacaaaaactaaaattttggcaacataactatctaaaccctggttccgttttgctctgtatccctccacccaaaaatcacagttaagtgctacggtggattgtccacgtgtacacacttgtacacgtggtaaatttttagtggtccacgtaatattagtt

SEQ ID NO: 325408 - DNA, 2004 bp, Cannabis indica
atcatgggagagggagatctaggagcaggagtagaccttaatagagccagagattgcgacatgagcttaatcaacacatggaggtggggaatgagaaacagaaccagagtgagttaatcttagcaacaagagaagagtaacttactaaagagtgatcatgggcagcttaagtctgaagcaagtataggtactagttctgcaggctcagcctatggtaatgttgcagttacatcttatggcggctcatggttaattgtagttaccattggtgaacctgggtgtgttgagtagagacactgaacttggatgtcgatccaggaatgagactagagaggccaattgtatttcttgaactgttggtgcaactattttaggtttattgaacaaaaagttgtattcatcgaaaaatcacatccctaaagatgtacaacctgcctgcaggatcaaggcacttgtatcccttgtcatttgaattgcatcctcagaatgtgacagtcagagtcccgtgatctgcaaggggaaagagtaggagctgtgcaatcccatattgcctggggaaggttaagtgtgatgattttgagattgtgtaggtatgagactacacagttaaagaaggcttaaatggattaattggtactacctatatcaacaagatgcatcttcttttcggtagcccatcatgaaagaacttcaaagttaagcgtgtttgacctagggtaatttcaagatgggtgacctcctaagaagttttttcgggaagcgtgcaactgaggacaaagcacgccagaatgactagtgttggtctgcagggttagtcgtacattccatgaagaagccaagagtgacgtaccaatgtataagagtcattagtccgtgggtgaaggcccaatggaggtttgaagtaaagatgttacaaataatattagagccttaacctagctgaaagtgtggttgatgaggatgttgaccctaaagggggtgattgtaacagtcggagtctcgtgatctacaagaggaaagactgggagctgtgcaatcccacatcgcattgggaaggttaagtatggtgattttgagactgtgtaggtatgggactacatagttaaagagagattaaatagattaatatatcaacaagatgcatcttctttttggtagcccatcacgaaagaactccaaagttaagtgtgcttgacctggagtaatttcaggatgggtcacctcttgagaagttttcccaagaagtgggtaagtgagaacaaagtacgctggaaatactagtgttggtctacagggtcaatcgtcattccatgaagcatccaagagtgacgtacttgtatataatagtcattagtctgtgggggaagggccaatagaggcttgaagcgggaacgttacaaagaaagtacaaatgctagagctaaaatgaagtttgcgtttgttatatggctattattgggataacatttgtagccaaagattttaaaccaagtatagtaagacttttgattaacaaaatgtccaaaggacacttactttgcaacacaggagtaagaagtctagtagggtgattgaaaattgtcctaaaggcttcatcaaagaactttaagggcatagtggctttagcaagcaaggttaggccattttcaacaatatgtctgtttttctcagctaagccattctatttgtaataccctattggtataggcgtgctacagtgctttcttaattactctgaaaccttgctaatcaaagggtttaaaaaaaattatttaatttgaacttttatattaaatataaactttacaatttattttcaaagtctaggatcccatatctaattttttaaacatgtatgtaacaaaatatgagcacattttacctcaaagatccgaacacataaacattcgataaataatattagtgcaactgggagtatattgggattttatgtagtttatcatgaataataaaagattactgaaatcttcactaagctctaga

SEQ ID NO: 325409 - DNA, 2873 bp, Cannabis indica
actcttatgtgtttatttcattgttttagaattcatattatgttgttaatgaaacatacttggtaggaaatctagatcctggtaaaatatttccaacagaacaaccagttcagatccttgatagaaagaaaaaggttcttcgaaataagaccataaccttggtcaaagtgttttggaggaacaacaaggcagagggagccacttgggagttagagtctgacatggggactcaatatctagagctactcaagttagattttaaggatgaaattctattaacggggggacaattgtaatgaccgcattttagaatatggattagtaaagacaattagcgttaattattgatattcttataaatatttatgaatttatttagttgtgggtcccatttttttttagaaatgggcattagagttgtaatttctcaattttggagattttactaaactctagatgtattatttgtattatataggaattatgcttgtttttataaattttgctcgacaacagcgaaaaatgcgatggatggccatttgagtcacatgtgtaagtctagaacctttttttcttagtgggataaatatttgagatagatagaatgtcgggtttgagtggcgttgtggcttttgaccattttacctctagatttacatatacctattttgaaggaccaagggcatattgggtattttcatttttggaattaggtggcactatactaggatggcagctggccatattcttttattcaacaaggtttaatgttgaatttaggattttgaagaaagtcaaataattaaatgaaaaccaaggtttatctcttttatcctcccatctctcttcgaacaaaacctgcagctagggtttggcctttgagcttttcacttaacctggattcaagggctcttcttgtgtgggaaaattcagtggtagcttgaggtaaaccctaaacctttttatttcaagttttcttgagttgtaagtttgattttagtatgtatagttttggattattagctgcaagggtttgaatggtttttgattatgtttctaagttcttattgagttgagattgagttctaacagttggtttagatgagttttgttggaaatgatcaagtttgagttgaaaacctcaaacttgagtcattaatggaactttcttttgggtgtaattctggattttctttcttggaatatattgtttgagattatttgggttacctggtgcaaatgggttaaccagtttcacaggccttgtaaaaccggtgaatcggatcagaaaccggtttcctgaatttctttgtgttgttgactcgtgttatttccttgatacttagggtattggggtattagttagtaatggtagaacccttagttggagtttgagtatcccggattagggttttgacgtgttatttacccagttatgtaaatgtggcttagggcatccatccagtatgaggttttccgttcaggtcggccaactaatttgaattcggaaactatgtaagaatagtatagaacattttttatatgcgaatgtatgtatgtgtgatatatatacatgttgtgttgtgattgtacatgatttgggtgatatcatagcggcacaaccattgtgtcggttcggcaatacaatcatcgtactggttaagagttgtactcatacaagaaagtattaattggtgctatcatagtggtacaaccattttgtcggttcaatagtacatgtatcatactagttaacattggtatcatggccaattatacttttgggtactactgatgatatcatagcgttgcgaacatagttccggtctcacaatgcgatcatagtgctggtagtgggtgatatcatggtctgtactaccaattgttaagaatgttcttaagtcatctggtaagccttatggatgtgtgtatgggcgcctaaacaacagtggtgattatatgatttgttgtatgcttttcttactgagtctgttgactcacagatgctactttcatgtgtagctaaaggaaaggcgaaggctgaataggagtgagctctgggcttggatgaaaattgtacatgttgaggcgacgcgacctggagagttcgatctcgggacatttggggctttattttgtagtctcagcacgaccagattataaatatcttttaaaaatattgtaaaagtttaaatacgagatcccgacttttgcaaataaatatatgaaattttataaggtttagcaattaaatcgaaagttttaatttctcacgatttttaagaaaaatcctttgattagtaaaggttgcacagtagttggaaaatcactctagcgcgcctaattatcagggcgttacaacgctagtaagaggacctgaagaggtagtttttgtgaaaagagtacgagtaaacacatcttataaagaggagacatccgaactagagagaacttgtgaatttgcagagtttaattcagatgagagtcctaaaagaaaacccatagtagccatctgccctcgttggcactattgaaccttcacatctggactaaagaaataacacattgagctcttcatatgttttttaaatgccataaagtaatacataagagactgatcttgtttttccgcacaataaaaagctttgcaaacatcatatatgcgagatacattgttttttcaaaaatatagaaactcttagtaatccattagttctttaaccaattcacaatgattaatcaaattaattacctcattattcatagaatttcgaatttgaaagaataagcgagcatgctcacggagccatatttttcttgaatcgtctttttcttttggaggatcttcagtcaagtgatcatctttgtcaata

SEQ ID NO: 325410 - DNA, 1478 bp, Cannabis indica
aatcctccaattggcatgagagtactctatatatattaatgtaaataaaaacaatgaatatgcatgtagtgattgatgatcatggagacattggaaaatggtcatggccccatattttgacctatgtaagaaccaaactctcaagctcaaccactacttctctctatttataccaatgaaaaacccaatccttattgattggcattattatatattaatattcattcttaattaagattatgttatggtttttatatattatattttgatgtgaaattgtttttggatggatccaaagaaggttgagttatacatagcccgtgaaatgtgtaaaaggccaaaactaataataatatggtaaaactaaaagacaaattgtctcagaaaaatgataactcatgcatatttctaaagttcacgagacagaattattgtgttgttttgtgagacttatttcctccattaccttcctcttcaatcgagatataatatatatttgtatagtaggtccaccaccaatcccaaattttgatccatttttgtagtttaatgtgttatagtgagaatttttcgcttagaagtacgagtgcaatctcgtaaatgattgacacgtagacctagtttcttatggaaaaggatgacatgtcaataaataactctagaagagctaacctcacttgacatgaacttgtgagaagatgtgattgagataggatctagttccatactatgcctcgtaagtctgaccctggtcatagacagattaggcctgtgtgtagggcctacctagcttaggagcccaaaaataatttattccttttaaaattacacattttttttttcaattttaataaaataccacattttttctctaaaaagtgcgcaaaaatatttttattcctatgacctactaaactaagctgaaatcattactaaaagtggattaagtagtctaaattttgagtgaaccattataattctcttatcttttcttatttatgctttttgtacccatttagtagcctatatagtctgagtactgtacttggatatctgcaattgagtgttctaattatctttgattattcgcgtaaaattggtatcgtttaaatttcttcgataatatttgatgctgtctataagaatctaaatatttctaagagttttggaggagaatcaaaatagctatagatagacaaacatgaacaacaacaatagatcttttaattaatgttgggcctctcaatgttcccattttttgaagaggagcatactcaattgatgctgtcataggaggagtagggcatactaatgtgactcccctcaacctgtttcctaattttgcaggatatgctagagaaactttcacaccaacagctacagtggggcatttttcaccgatcgataatgatgatactgtaaatcgtacatattttcttattgtagtttttggagttttaagatctcacagtgcggtt

SEQ ID NO: 325411 - DNA, 1240 bp, Cannabis indica
atcaagtttttttgcagtcagaatgtcctatgtatttcatctaaattacacatttggtgtaacaacaaatggtactaacattataacaaaacaattacaaaaaatttacatagagatttaaatgacaattaaatggctatataaggatttttaccaccaaaaaatatcataaaatttaagtgcaacaatgtgaacaatacaaaattcaaaacccacatttttacaaaatacttaaaacaatgcagttaaaatttgccaaacagggctgtatgcttcaacaatttatattgttcatacaaaaatattcaatcttacttggattggagaggcagtcccaggtctagtggtgaacatcaattgccagcgtccttcaatcaaatcagagcttgtctgtaatttcgtttatcattaaccacataacaatgtatgtatgacaaataataattacacataaatttatcatacacacataattgcagattcgtatatgtatctaaatttataaaaaagagttaaaaataacgaaccggatcaggcacaccttttagatcttctaaaaccttcactgctcgctccacatcctacagaatcaatccataagtatcatgccaatgctgtatatatatacatacacatagacatatatatatatatatgtaaatgtataagaattagaagaaaattatatgatgtatacagtgagttgttgaggagaagcagagcggcctcgtccttgggttccaactagagcttcaattagcgaattctcttcttgagtaaacgaaacctgatcttgttcatccaccaaagcaaatcgacgagtctgaatcagcttattcctccggcgaccgattgctccgatcatcacgaccgaggaacatttctccaagcaggtgagatttgagaatccagtaatcggagttggtggtggtggtagtagcagtgtggatggagctgaagctctgcagagaagagccatagctgagttgaagagagagaaaacagaaagagagagagagagagagagagagatgggtttgttgtgtgggtttattcaacataagaatctcttcatttatctaaatctttattatatataactgcttttttccttttggcgccatattattctatgtacgacatgtcgtttttcaattatgaaagtaattaaacgacaatcaatatggatttttgaatactcaatagacaatagtaccattttagatgtttttttgtaaaa

SEQ ID NO: 325412 - DNA, 1352 bp, Cannabis indica
aatcatcacaacaaacaattccaaggcatagtattccttcagcaaatgaatcaactcctacagcccctaacctccatactaatatcataactacatcagcaaataacaatgacaccataactctccccattccttcttaccttcaatcttcattcccatttaccacttatcccccatcttcatcgaccattaacattactcctcctactgtccatacgccaaaatcactaaactctactttattcactacccctgcttaaattcccaccttgccaacaaacacagtaaaaaacaaacagcctccacgagataatggtaaaggtaaaagcattgccattgctaatgatgacaaagagaagcaatcccaataagatgttcaaaagacaactaaatgctgaatcacttcgatcagtcctcaagcgttgtcgatccaatgatcctaccactcgtttgggtaattcaggcctgaatgattttgatgctcctcatgtttctacttcctcggattcagatgagcttttcactgaaactttggcggatgttgctcagcaacaccgcccccaaccatgaattgtataagttggaatgctcggggattggggaaccccagagcatttcgatatcttcgcttgcttattgctgagcatgcgccctgtttactgtttatcattgagtctaaattaaaagctggtagtatagatagatttcgacattctcttcgttttccgcatggtattgaggttccaagacaaggccacggtggaggccttttgttactttggaaatcttatgtttctgtcactcttaataatttttccaccaatcacattgactgctttgttgagaataatgaaggcccttcctttcacttcactggtttctatggacatccatgcactactcaacgacatcatacttggactatgttgaagcgttgtcatgatattgcacccttatcaccttggcttgtactaggagatttcagtgagattctttccaatgaagacaaagtgggaggttcagttaggaatcctactcagattgatgcttttcgtggtactgttactgcttgcaatctcaacttgttgccttttgatggagatcgtataacttggacaagtcaaggacaaggcaaaggtatcattaaggagagattggactatgggtttgtcaatgatcactgggactctacttttcaatccagtactcttcaacatctcgactattataaatcagaccatcgggctttaaaaatagtggtgtcaactttgaatgaacaaccacctgaaacaagattcaagtccaggtttcgatttgaaagaatttggcttcaagaagaacaatgtgctgca

SEQ ID NO: 325413 - DNA, 801 bp, Cannabis indica
aatgtggaaccaagcataaataatttctatctataaaaaatacatgatattaaagatgaaagaaattattttaagaagcgaaaatcataagcatatattgtactgagaatcaaaataaaaataaatacttaattaaatacactaggtttcatcgtcctccttaataataagggaacttagaaacccataagaaaattaacaaataaatgcggtaaactaacactacgctctttgagcgttttttctgaaattttctgtctgaaactcgaaaactgtactgaattctaaaatcttaaacttctatttattgaagggtaaaatgactaatatgcaattaaacttattgcaaattgcatgtggataaaaatataaatacacaaagttactaccggagtgccacttgtcactctctcattggttgcatgtgacacgtggcggctgcagaataaaggagaaaaaattgcattttgtggtttggggaccacggtgaaattaggctcaatcgcgggcctgggatgtggcgcgcacgcaactgccagcagaagctggtgagctgcacgcgcgcgtggaaagtgagggggacagggcgcctgacgccggtaccagcgaacgaatcccagcttgccatgtggtggtgagcatgtctgctggtagagggaattgggctcttcttgggccgattttgggcctttcttccttggacttttggcttctaaaaatgccattttcatgtattttgggcttcacttttatcatcttttttttttatttcttttccactcttttcacaaatgctatttt

SEQ ID NO: 325414 - DNA, 1509 bp, Cannabis indica
ttgacccggtcaacccgcaacctgcaacccgtgaacctgcgaacccggctaacccgaccacttcacgggctgggtccaggtacaattttttgaacccaaaacctgcaacccaaaacccaacaaatccacccaatgttcaaccctatttgggagtgcctatgaggcctagcaagtgaaaaaaagaaaagtatgatgttctcatgaagaagattaagttgcgaattcaaacttgggctagcagaatcctttgttggtcgtcctcaattgattcattcagttcttctttgtctctgaaattatttgatgagtaatattgtgctctgataaagtcttgttaagaaggttgaaaggtttttgtcgtaaatttctttgaggctaaactggtaaccgaagcaaaatacatattgcttcttggaaaaaggtctgtttaccaaagtttatggtggtactggttttcgggatggctcgaaatggaataaagtaattactgccaaatgtttttagaaaaacatgatgacttgtgggcgaaatgagttaatgccatttatctcaaggtgtcaaatgcgtggaattatagccttcactcagattctagctggcactggtgaaatctttgcaatttgagaaatacttttgacaagaataaaattgtagttgctagaaagaatggaaagttcaaagttgcagttttgtataataaatttatgccggctgctcctgttcattatacggaggaaatttggtgtaggctaaatctacccaagcacaaatttatcaattgacaagtcttgaactcttcacttttaataagagatttgctccctagattctatattcctattgtttcatttctttgtctagtttgaagtttagtgaatgaaaattatttttatttgttttttggttgtgcctcttgaggaaagttgttagtttaatttttgaatggcttggcatttcggcttggcctttgggggctggaaggcttggttaggcactaaaagaacaagaataagagttgccattactgattctactgcagctgctacaatttatcatatctggttgaattaaaataaatgtatttatgatattttttcttcaactgccttgtatgtccaacaggaaatcaagagaattctttagtataaaatttacaacgaaaatcatagctattatagtatacaaaagaaaagatttgtttgtattttgtttaagggtctctaagtgttgggtgttggggttgatgtttaagctcccttgtttttcggtttgtttggttgtaaatgacttaatttttgcgttccttaaacaaaacaaggctgtttactgtgttgctcacgactctcatttctactcaaattgtatttttaatgagagttttactcccgatatattttatcgaaaaattttataatgcactcccttaagaggatgtaccaatacatctatgcattttaatatccgaaataattttttagtcaaattttttctcatggtcatgtaaattat

SEQ ID NO: 325415 - DNA, 1040 bp, Cannabis indica
tatacatatatatatatataactctgacccctgagctgatctgtctatatcgatctatcatgtcattcatatatatatacattatatgtaagtttctagctacatgacatatatatatacgagctatatgtaatgtattaataaatatatattatagccattaattaattatagtttaaaagtatttaaaatggcacacacgcatgtatactatactataaataaacatagagatatgtacataaataaccgaatcaacaagagtttgtggcaaagtggttccatacaatttaatttaataaacaatataaaaaattgttaattaattatgaagcattatatttatgtagtagtgaatactttaagatatctaataacactactttatctatagtaattaaataattatatattaacattaataaagagcttaatttgtttttaagtttaatttatatggtgagagatgtatataaatatatatatatatataatataataaaatgtgatgatgatggagtagaggagacatgtgtgagacaaaactacatgtcgaaggagattaatatattattaatttgaaagagatcatataaactataaagagagatataaaatagagagagattatatatatatatatataagacaagtggaagtggtccttatattatattatatagggaggcaaggtgagcatgaaatcctccatatttttgaggagtttgatggttttgttgaggggaacacttacacaaccccattttttatgttatgttactaattaatattcatataatatatatgatcctaattaattaattaattaatttgaaaagacagggacacaagaatatacgcttcttttcttctcttccaatatcttaacatctcttctaacatgcctttgcttgtgttgtgtgtttccactcaataaacacatataatactattactaggtagggtacaacaacattatattattattcaatacccaggggcggacccacattgtagcgagggggggcgagtcgcccccc

SEQ ID NO: 325416 - DNA, 858 bp, Cannabis indica
atattcaacatatcttaatgtttgaatatttctaaatatatcgagcactatatatagaatttatgtatggcatttaaatcatacaaatcctaattaattgtaatgataataaattttctgaataaatataaattaatacaattatcgtatgataataaattaaatgtaaattctataataagtagttaattatgcatttataaccatataatatcttaaatatttaataataaatttgtataaataaggtaaatatataaattagtacaatttaataatatgaaaataaattaaatgcaaaatccaagaatatatacttaatggcagattatcaataaattgaatcaataaattacttaattggtaaataaatatcataattgcacacttattgtagaatattcaaatattcacattcttaaaatatcacaattattataattacatgtaaaaataaagcacgtaattaatttaccaatttaaaaaattttccataattttttcttactaaataagatatatgaaaatatgtgttaattaaaaatagaaaatttaaacaaatgtaatttaatagactaaattaacaaaaataagaaaacaaaataaaattccaaaataaatctaaaaaataaatttttggaatttttcttaaatttttcaattttctttgaaaaattgctactgaaaaacgacatgtcgtgttttttacataaacagaaaaatgacacgtcgtacagagtcggactcaaaactcactactgaaaaatgacatgtcgttttccacataagataaaaatgacacgtcgtttgtgttgagttttatgaccctaaataaaacaatctgattagttatcaata

SEQ ID NO: 325417 - DNA, 963 bp, Cannabis indica
tggaatcgcaccttttgatagggatttttggattggaatcgataacaaatttagagaagaatgatagagaaaaatggttaacgatgattcgattacagaatttgtgcatttgtgcaattctaagttaggccttgttgttgtgggtctttgttgttgtgggtcttcgtgattagtatcaaatatactaattaacagtgttaatttaaaactgtattttgttcttctccgttaaagttaacagaatattcttttatttttaaagtatattctgttaaaccaagaattgccgttagataggcacttttaatatataaagatatatatgaggtacatgtaagaatattttttaatattagaattgttaattatattaattttaattgattttattaaaagtcaatatttagtttaattgaaaatatattttaaatatgatcaacattattaagttaccaatttaaatttaatgagttacaaaattttattttcacattaatatgacaattaattataacagatactttaataaaatgtttcacatatatgttaatgtgatactctgtttaaaaatagtattaaaaagttgttgagatatttaaatttaagaattatattattattttatttatttgtattgttagtagcgtggagaaaaatttgacaatttctaaaaatagatattgtattaattgtggtatttctaaaagttaaataatcatttatcgtttcacttgcagttaatcctctaaatttaaattttggcaataaaacattttaaactattgaactgttagcaaatattaagtgtcacctgcttaattgttactatgaactgtttatgtatacgctcttttacacgttagcacttttatattagtacacctaatatatttatttaaaaattcattttaaaatgaaaataattaataaaaataaaaaattaaataatttaaaaaataaaat

SEQ ID NO: 325418 - DNA, 622 bp, Cannabis indica
tatggtattcacttgccaccctagggctcgggtcatgacatatctgatatttccccaccatgagttgctgagcatctgtaatagagcatacctggtttttcagagctactaattgtctccaataccagctcccttggcatggaatagagtagctccaccaattatcttctttgatgtatatactgtgaatctacttgacccacaaattttctcctttctttgctatggcccacacatatttgatcattgcacctttattccattctttgactcttttaaacccaattcccctaatattttcgcttggcaaacaatgtcccaaacaatggcaccagcaccttgaaagtgttgcccttttcataagaaagccctacaaattgcttcaatgtctttaataactttcttgggtaggatcatgacttaactccaataggcatgaatgtaaacagaacataattgatcaagacaactctccctgcaaatgacaaatgccaagtactccatgttctaattcttgcagtcatcttctctgcaagtatggcacattctttacacagaactaaatgtcaatgttactataatagaatattttataaagacaagtgagaatgtaaatctcctt

SEQ ID NO: 325419 - DNA, 2020 bp, Cannabis indica
tcatttgcacttcctttttcacaggtgagcctaatggcggagagcaatttctccatggtcactcagctggcctacgagcttgatgtgctgagggcagaacatatcaatgcttaacgaaagagggatgaagatgtcgatgctctagctgaagccaatgccagaatgaaagccatcgtaagggaaagggtgactgaatctttggacaacgccccaactcacaaaaagaaggagaccaagatagagagggagcttcagtagagggtgaaaaagttcaccaaactagagggtgaaaattcagacttaaagggaaagcttcagtaggtaatcatggaaaaaaaaagagaaaaaagcctagaccaccaaagctttggaacaggcctttgtctactcattgtacactatctgtcagcaccaaaaatttgtaatagatctcttggatgctgaagataaggagaatctgatgcctaagatcttggcactagaggaggtggataaagctaaggaagcagctcaaaagatagaagcagtcaattcagggactaccattcctgtaggtgagaacatggacgactcttctctaaaggcctatggtgttcctgtctcgaccaactgtgctatcccagaggtcttgcctgatgttccacacaaagatacacaattgctaaaggatccagcccagtcttaaccattcttgccttttttcaacaactttgtatttactaatttttatcttttggggaacaatggtccccctttattgtgtgtgcagagacaatattttataaccttgtcacagggttttcaagtacgttgaactgtttaatcaactatttagatattttcactttaatctatagaatatgctaagttttaacgcttcgagtctcgtaaggttctggttccaaaggcctgaacccttagattttttattaaatgcttagatttacatatttttcttatttttagagaaaaatatttgaaggtgtttttactgaaaggtttctctgaaacttaaataactaattaacctgagctaattaattactttataattggacctttcttggtaaataccacttatgtttagggctttttgaacttaaccatctaattaacttgaattaattaatttatttaagtagcttaaatattttagttgtgttaacatgagttaaccatgaagcttgaacttctattataagttaacttggtgttaacggtgagaactcgtcaactaacttgtggccggaaaaccaacttatgcttaaatttcaaaaatgagatgaaaagtaagatgaaatataaactcaaattgctatcttgaaatggagagaataatggagaattttttattgcttttaatatggttttacaaatatgattttccaaccccctctcacatctaagaaaggggtatttataagctctaatggcctggtgtacaaagtggtcccaaagggacaagacgtcacttttgtgctacaagtcgaaagttctagagatggcttttcaccttgtacccttgtttggtgtcaagtggtccccaattgtaggagggtgatggccaattgcaggcatgtggtccctggttgtaggagggtgatccccagttgttggcatgtggtccccgattgtagggtccaagagagtggttgcaacatgtggtccctaattacaagttgcaggagagtggttgcaacgtacccttggttgggtacttaaactttgcagcttcgttgtcgctgctacttgtacctccttactcttagagttctcagaaggcatggttgaacgctttctccttgcacacctagtcagtgtgcattcatctctcaccctgtatttataatccttagaacatacttacacaacacacacaatggctcacatgtgagaccccccatgcgctcgaatacaaacccccaacactcagtacacacacaacactctccccattacagaaacacagcttgcatgcgagccccgtacactcgcacacacacacatctcaccactcccc

SEQ ID NO: 325420 - DNA, 841 bp, Cannabis indica
ggtgtgacgatgcgctgcgtacggtggctgagccgactgttgtagtcgacgattcagtgaagggcttgaattcggagatacaggggacactccgtctccttggaaccagttgggttggagaagaccataggaaatggccgagatagtggaagccaagcccaaaggtaattcgggcttttggtagtgggccgagtaaaggagtaagcccaatctagaaataaacccattaaacccaactgggctcactcaaagcaattttgatgggctgagtgggtcaattaataaaagtccttcttcccaaaataagcacctatcgtgcatcaactcccaacaaccagagaagagatttggagataggcaaagggtatcgaaggttaacagagacagaggtgtaagagaaaagagctagaggagtttgcttcaagtgtgatggaccttggacaaggggacatcagtgtaagtctcctgagttgcaaattattttggtgcaagatgaatgtgaagaaatggaggaattgacagccatggaggagttaggagataatgagcaagaagatttgacagaggcacaagtggtggaagtgtcactcaattctgtggttggattgacttctccaaaaactatgaaattggtgggtagtgttcatggccaagaggtgacggtacttattgatagtggagctacccacaatttcatagctacaaccttggttaccaaactcaaccttcccatctcaactacagagtcatatggagttcaaatgagaacgagacaagccgtcaaaggagtgggaatttgtttaggagtgccggtctcattgcaaacggtagaaattattga

SEQ ID NO: 325421 - DNA, 726 bp, Cannabis indica
agttaaaccttgtgtactgataaatctaggaatacatttaatcacacaatcttgtttactttccactgtgttgacaacacaataaacaagaatatcaatgtgataagggtttggatgaatttattaatcaaataagtaaataaatgatcacattaaccaaataacacattaaacaagtaatgaaatcaaatctgtttctttattgataattgaatagaaaagattacattgaaatagagttttatttaaggcacaaagcccaataggcgctagatcctggaaccgagagttaaagaaaagaatggctcttaatgaagctcttaggcaaaaagctattttttggcaacaacaatctcccatttcttggattaaggatggtgacaagtgctcaaaattcttcttcatatcggccaccatccgcaacagacaaaatgcaatagagagtatcttgaataaagacatggtttggattacgaaaagaaaggacattgataaagaattcttgaatttctgggggaatatttactagcccagttcagggccctctaaagagtttgcattatctgatccatgaatgcttaaccctcgtggaacaggctaatttggagttaatcccagggcacgaggagattagacgaccgttgttctttatgggaagtatgaagtgttggaaattattttacaaggatctagatttactgacaagtatgttggattaacaaccta

SEQ ID NO: 325422 - DNA, 1141 bp, Cannabis indica
gaaaactgaagagcgtaagggggtatggctagaagagcttgcgcaagtgttatggccatacaacacgacccaccgatcgacgactggtgaaactcctttctcgctctcttatggatgcgaggccatgataccagtcgaggttggggcaggtttcctataaagagatgttttcaacattgcacagaacgaagaaaaacagttgctttacctcaaccttctagaagaaaaacacgatcaggctcacctaaaaaatgcggcttatcagcagcgaaccgcgcggtatttcaactctaaggtcaaggaaagagttctgcgagtaggagatttggttcttcgaaaagtaatgccaaacacgaaaaacccaacacatggggttttcagagacaattgggaaggaccatatctcatcgtagagaaaattagtaacgcaacataccgacttccagaactcgatggaactgtaattcgaagagcctggaatggcgaaagcttaaaattttattatcaatagtactcgcattgtatcatttgtactcgctctgtgtatatacttagtcaatttatttgtataaatgctctaagtatagggggtatatgacctactatgtactattgattggcgtattgtgtactatcaatttctcataataagagttatgaatttctagagctctcaaaaaatgttgccttagcattttttacaccaagctgtaattggaaaagcaaatgcagttaaaatgttgaaatacaataagtaccccatgtactgcgaaaaacatatagaataacataaataaatatccccgaagggatatgtgttgttcgtacaaaagaaagaaaagaaaaatttttccaagtacaaattgcgagtacccttataccgctttaaaaaaaaagtttgacaaaagtgatattaaagtagaacgctaagcattgggagcattaggggcagttggaggagtggattcatctacgactttgctggcagcttcgtccatgacttctccactgtcagcagcatcagcatcctcggggaaaagatttcctccacctccttgagtcggcgtgggtgacatggctcgaaaatcctcatccatcttagccgcctccgccccaaggatcgagaagtcgaagtctagaa

SEQ ID NO: 325423 - DNA, 794 bp, Cannabis indica
gactctgtcctggtagactcatacgacctcctagcctttttggctccagagtagagagggacaagtgcatcagaagattatcgggctgacattgatggagcaaccaacaagaaagagctagaggtctgcttagatgatgttcgactggaagaagaggaagccagactgtccagaatcacaacctcttcctcttaagatgaaggagcaggaggttgagctaagggcaagcatcttttagatagaggagtaatttcctcatgccttgggactctagcaggagactcatgctcggaggtaccctcttctttcctcttcttcatgcagaggagcatcttggctaacatagctacaaagaaatagaaagacttagtcaaatataaacaaagttaaataaagaatgtagatcaaggccctattatttgtacccctaatctctagaggggcatcatcatgaaggatgatgttttccactagaggctcctctttgaccaccctttttcacttactcttaacaacatgcttaaggggccaaactacttcaactgctactcaaggtatgttgatcaaagtgggagttggacggactggaggtattatatcagattggacagactttcccttatctgatacggtttgacaagaggaagacttgtcctggttttcttagaggtatttttgtcagacttagatggataaaggtatacgtagggtggttatttgatcacatcaaatggatttggacccaaccgaatccaatctaatattattagatattagaatctatcatctgatcc

SEQ ID NO: 325424 - DNA, 1063 bp, Cannabis indica
gttttaattataatttattttcttaaaattattttatcatgtgaaatttttatgtttttcttaaaagtttgttactaattcttttttagtgatgtaatttgtagatattcttttagtatgataaagaaagcaagatgagtgttttttcaatttttttaaagttttattatccatttcttttcatgcctttaagatagacaaaatatttattgtttggaaaagatacatatgccttcatgatttggtgctatattattttttcaaaccactacaatagaattgacaaaaaaaaaaattacatccgtattccttttagtttataacatgttcatcataggagtgattcgttcatacaaaattttcctaaagaaagaaattgctattgcttatgctgtttttctttttcgtaaaaaaatgtttcaaaatatcttattttattttcttttcgataattaagaaatttattgaacaaatgatcacaatattgtacattaagaagaaagaagaaattcccttcaattaaataagttttatatacacctaaaaagacatgcacaagtactaaattatgtgcaatttgttctttataatttgggatggttttagaagattggacatcaaatttaaataatctacaaatgatcttaagttatttaagtatagtatcctcaaaatagctcaacctttacggtctgctaacccaaaatccttacaaaaataaaaaacaaaccaaaataatcaaagaacaaatttatacaagtttagcttattatttgattgatggagcaattattttacaacatgcttaatttaaactttataagaccattaccgattatactgttcagggaggttaggaatgttttttataacaaataaaaataaaagacaaaaaaaaatataaggtacaattttcactacttagaaaggttggcccaagaatttagtcagcctttcgcaagcccatgaatacaggccgaaagaccaacccaaaaataatataccaacatgaattaattagagtaaattagattctataccctttttataatatccttttttt

SEQ ID NO: 325425 - DNA, 914 bp, Cannabis indica
tttttttaccgatggaacaatcttagcccatatgatataaaaatgcgagatttttttaattagatagaaaaattaagcataaaaactcaaaaatttctaattttacccattcatggataatacccattaaaagtgcaccgaaataaaaatatatcataattactcaattcttatataccatagtatcatatttttattttctaaaaatttgttctttgaaatagcattattactctttgatgttaatttcaaaaaaccttttagttattctttttagaaagtgccatttttccttttgccaatttatttttgaaattttatatttatactctagcaaaataattttacatttatattttttcaatctaatttttttctattttattattttttacttattacagcttcaaaaaacaaatacattttctcttttttatatgtcattggttgagttttttttttttaattaagttgctgatatttttttattgttttttctttcttgtttttttctctctatttctcttttcatttctttctaattcactctttttttttatctcaaactcttttttttttatctttatacataagaagtgtacattttatatctcgtttttttaacacttttgcattctctcacaaattttattttattatttttttaaaaaaaaattaaatagaaacacttagtttattttttttctctctctttttctttttcttactattctcactgtaactattttaaactatttttctttaattaatcacattttataaattatcttaattaattttttttaacttttattacaatatgattcttttatttttatcttttttccatattatttttaatattctttctctctcttacaaaaaatacaaaaaaaattaagagcactcctata

SEQ ID NO: 325426 - DNA, 780 bp, Cannabis indica
aaaaagaaagattagattaagcccttgctaagtacaatgtcccatacttaggaggagcttagccactgaaagagtaccacaactggggcagcgtcccactcctagagggtttttttttcgatcaattagaaaatctcttttggatgcagcattctgcttctagagagctttttgtaattaatgatgtttctctttttctttttgatttttttgattggaggagaaatacttgcactaacacattagatttataaactcgatcattatattcttgtgacaccttaagcatttatatcataataatgcttaactctggtgtgtaaatagtctatatgtgtggttgtttcaacttaatgaacttaccagcactcacactagcatttcaagattaagaaaataaattactagggataacatcaacatttgattaaaccatcaaattactaactcaggcatgtgaaatgccactgcaacccctagctctcgtgtaccaaggtgtatatgacatacatggctctcgtgtaccatgaattctttaaattttcatataatgtgaatagcttccgtatactatgtcttatttgccccttgagtgatcaaagaaatgcctttattggtcactttccatattaaatcttgttaggctttcttgatcatgggtctcagggagttgctacatatgcgaccaatcatccacttatatgtagattcgtgagttggaagtgtttaactcactaaaaaaaataaccacagttacctcaagaccaactctacaagctt

SEQ ID NO: 325427 - DNA, 681 bp, Cannabis indica
ttttcggtagcccatctcgaaagaactctacagttaagcgtgattggcctggagcaatttcaggatgggtgacctcccgagaaattttaccaggaagcgtgcgagtgaggacaaagcacgctggaaacactcgtgttggtctgtagggtcaatcatcaatccaggaagcagtcagagtggcgtactcgtgtataagagccatttattccattggtgtaaggacccaatggagtcttgaagcgaggacatcacactaatagaagttctagaaatatactttaggtattaaatccgtcaaaagttaaaattaaatatttatctacaatcagaaattaaacttaactatttatgtcgtaaattattctatttattatttgtaatatccaatcaatttcaattagaaaatgtaattaatagcttccaattgtctctaatagtttatgtgatgttcttttaaataatttgaattaatgagattgtatttttatttgaaaaaaaatagcttccaattacctttaattatatgatgattaaatacttaagtttaacttccagttagagataaatacataagtttaatttttaactgtaataatatctaagttatatttagagcaatttgcggtaaaaccccctcaactatcaatttacttgcaaaaaaccatccaacctcatattttg

SEQ ID NO: 325428 - DNA, 676 bp, Cannabis indica
tttttaaaatgtttacaattgctaacattttaaaataaaaatgacatgtacattattagagttctttaaagataaatattttttttttcaaaatgtagcattaatatgaaattgtcaacaaaatatattattgtaatgagttttagagatatattatttgttcaaaatgtaatattaagtaaatattattatatcttgcgttttgtgaaaattaccgattagaccatttattatgttaaataatttataatattcaaaatagaataaaataatacattgagttggaggcatttactatattttttgtatttctttgtgttagaaacttaaaaaatataaggtctaaattattattatttaataaaatagaaagtttaatgagtaaattaataaaagttatagattattattagctttatttgcggcataacctcttaaagtgggcaagtttttgcagctaaccccctaatttaaaattttggtggtaaaacctcctaaactcaagttctgttagcacttagtcccttccatccatttttggctgttaactaccatggtggaatgtccacgtgtacacagtgtacacgtggcacaattttattggtccacgtaattattatttaaaattaaaataaaaaaattaaaatttaaaaatttaaaaatttaaaattaaaaa

SEQ ID NO: 325429 - DNA, 482 bp, Cannabis indica
aaaaaaattaaaaattaaaatttttaatatgtagtgtaaaaatcctaaaataatatagtaagagagggtagcagtataatatcctcaaatagttataagcagccgaatattatacattgattaattaaatttttattattattacacccatttctaatacatttaatttcattagctactacaatacttgtcaaatgaaatttttgagaaattgattaatgtgcactctgcactgaatttttgtttccttatagaaacttatcccattagagtcatattttgttttcttatgagttagaattgaatagttgtaacagattcatttaaaatttgagatgaggttgggccggtaagagactttaaatcatatctatatttagggacacatcagtatgtgtatggcccttttattcaaatttgatagctaatgacaaaggtaggctgacgaaagtactgataccttattgacttcattagctgtc

SEQ ID NO: 325430 - DNA, 1620 bp, Cannabis indica
gcataaaacccaacacaatgcgctctgtaccataaccatacaagtgttggtagtgtaacaaacatataagcatgcatattcatattacattatatacatagttcttaccgcctttccagattcaagtgagttggccgacttgatctcgtgctggatggatgccctaatcacataatataactgggtaaatcacatgccaaaatcctaatccgggatacccgaacctacaactcaaggttctgttattatcactgggaactacaataccttaggaaacagggaaacacccaactaagacaccaaaattggcaagaattgggaaagtgagttgttcggggaatttgcctaaaccggttaacttattttataggacctggcaaactggttaaccgatttgcaccaggttttcccaacaactccaaatctcactcaaaaattatccaaatgccaccaaaaccttccagaatacctaaatagggcatatacaacatattccaacaaataaatctaaaaagcacacattgagttaaaatatgccattaaagacctaagtttgggtttccaaacccaaacttgctcaatttcatcacaacacaacaaaatcaacaaccaaaactcaatactaacttaaaataaacctaaaaactgaaccccaaacatgtctaaccctaacatccaccaaaacttaaaatcacatctccaaaccaccaacaaagcttgaacaaacaaagaacaaatgatctaggggttacctcaacttcaagaacacttgaattcacagctgaattccaaaaatatgaagaagaaaaagttggttcctccttggttcttgctggttcgaagagagagaagggaaagagagtgaatttcttaaattttttattttctcttgaattccttattttccttaatgaactaaaatactagctgaataaacccttaaacaccagctgtcatcaactaaaatagcaaactaagtctccttgacaaaatgaccaaaatgccctcatagcctaaacttaggggtaaaatgctcaaaaaccataacccctcttaaacatagtattctatttttcctcaatatacatcccactaagaaatgagattctagacttacccatgtgatcaaactatctatccatcgcattttccgttgtcaccgagcaaaaattgtaacaataacatcgttcatatataactcaaataatacacctagactttaataaaatctcaggaattgagaaatgataactctaatgcccacttttaataatgggacccacaattaaataaattcataatttattatagaaataccagtaattagtgttagttgcctttgctaatcaatattataaatgcgatcattacaattatccccccattaaatggatttcgtccataaaatctaacctgaacaactctggatattgagtcttcatgttagactctaactcccaagtggctttctccacctagttgttcctccagagcaccttgaccaaggcgatggtcttgtttcgaagaactttttcctttctatcaagaatctcaactagttgtccttcgtaggataaatctgactgcagttcaagggctttgtaactcaagacatgagtc

SEQ ID NO: 325431 - DNA, 592 bp, Cannabis indica
cacagccaaacaagctcttcatctctacaaattggacgaagaaaggggtcgagttggacaacgacaaaggaagttggatgacaacgtaaggagagtttgggcatggagatcacactcttcttttgctatagatctgagctcttcacaaatgtcttcatagattatggagtttttcgaaaagacaattgattcttagctataaatctgagttattattgatttttattgtgtttttggatagaaaatagagagctattatgtgttgtttgaatgttggatttgagtgcctcttaaatagagtttggaatttggggcttagaagtcaaatctaggaagaagaagaagaggagtttggtaacgtctttttttgataatttaattgtcaaagtattttttaattaatgtaaatattgattgatattatgaaatattagtattatgtaatattataatttagagaaagaaaatagagaagagatgagaattttctgagtgttttattccaataggtgatctcttatttataaacatacaagagtcaaatattaagaaactaagagaaatggaaactaagaaaaagggaatgttgatt

SEQ ID NO: 325432 - DNA, 1226 bp, Cannabis indica
cgatggacttgaccccccgaacaacgccgagaaacggtttcacttacatcactctctaatatcttcgttactttctgatctataagctttagctttatttgatttgttttttctgagcattttgtagaaatagtgattatgaaaatttttgttatcaaattaatttctaaaaaagctaactaggtgttttccatgaactttatcatataacaaatttttcgagtagttaaaaatttgtcatatagatccttgggattcaaggacttttgttcatttgtattcaatttactaatgcggcaattgttttaatttggtagatgtcaaagttgatggtgataaaaattccaattagatccaaaattttgttagagaccatacaagtatcattatagttgttttgtaaccataaattttcattgtgtaatcggtaaatttatgtagttattttgctaatttatcattttttagtttgaccaattttctgtattttatcttaatttttatttattttttttttcttatggattgggcagggatgcgaaagcacttcaggagaagctagctagaaaatctgggcaagctggtggaggaaataatggtgttcttggagggaaaaattagtgtttataggttagatttatgagtattgaatagtcttggtttttagtcatataatttatgtcattcgagatgaacaattgattgtattgttggccttgtaaggcattgatgttaattggctattaactaaaacttttcagttcttataataatatataaatataatttggaattaaattccttttgtgtctatattctgcatacctctttactttcattcataccaattatctttaatgttgtacacttaggaatttgtcattctatgttttatggtaattatagtactagaattttggggaagttgagaattcatatttgtagggctataaggtgtcttgaggtgcgggtagtgtggcttctgcaattttttcacaccttgatttactagtgtcaaataattcaataattaaatattataataaaactttagaagcaagtgattattgatttggtgtaatataatggtgttagatattaggtgtatattagctgtaagagagttagatatttagtagatatttagtagatatttagtctcctaactctgtatataaatatgtattattctttgaaatcaacacacaattcgaatcactattttc

SEQ ID NO: 325433 - DNA, 736 bp, Cannabis indica
aagctggaaaagcaacaaagacctctagggttgaaaatacagagaagacagagatgacacttaaagccacttgaaggtgcacccaaggcggggatgacattcacctccattttagggaaattgactgaggagttttttcgatcgaggaaacttcccctcaacatgaaagatccgaccaaggttgtcaatattggaacaaacttgatggaggctttgagcgagaagctcatggattgcctcaggagaaatcaagacattttcacttggtcgcatgaggacatgatttggattgacccccaggtaatctgtcatgcccttaacatagacaaagaaaaatttagacttgtacaaaaagaaacacatgttccttgacaaagagtgctccaaacctttcaaggaagaagttgaaaggctacgggataaaaacttaattagggaagctttctaccaagtttgggtatccaaccctattctagtgcctaaatcgaatggtaagtggaggacttgcatcgactacactaacctaaataaatcttgccctcaagactattttcccctaccacaaatagatcaactagtggacgtaatagcaggccttgaactcctcacattcatggatgcctattatggctacaatcaaattagcatgcacgcaccagacaaagagcataatagtttccaaatagacagtaggctttattgttacaaagtaatgccctttagagtcaagaatgca

SEQ ID NO: 325434 - DNA, 1667 bp, Cannabis indica
atatatatttttttttacatttttctctttcctatatgtttttcactttttttttttattttttacttaaaatttaactttctaaactataactacaaaatttatttctctcacgagtcaacattattttttcttatatcaaaattgtaaaattttgagtttttgtacttaaattgggttcttatgaaagcttatgataaattaagttagaaatttattgatcaagtgctttttggttttggggcgcctaaaaaatttcggggttggatctcccagtgcataactattacctccctcaatatttgccttaatggaggataatttggtaagattacgccctcttgtggtctacgccagggcgaccccttgtctccttaccttttcatttgggttacagaaactttgtcaagactcttggtcgatgcccaatgtaagggcagtataaagggtattagactcagtaggggctataatttctcatattttctttgcggatgattaaatcttggttggaaaagtgaatatggaggaagttaaaggctaccggcaatgccttgagaggttttgcacttggtcgggccagcaagtcaataaactcaaaacttctatcttctttagtaagaatacttccaatggcatgaaaagaggaatcaagtcggcactaggaattggatcccctgaaggtaacatcaaatacttatggttaccttttattcgttctagacaaaaggaagttaactttaattttatttcgaaaaacctcacatcaaaacttcagggctagaaagctaagacactgtctaaagcgggtcgtgtcactctcataaagtctgtgggcttatccttgcccatgtatgctatgcaaatgactaagctctcgagcagcattgttgctaagattgatgtcatggttcgtgatttatggtgggggtgcgaaaagggtaatcatggtctacacctaaaagcttgggataagctttgccaatggcatgaaaagaggaatcaagtcagcgctgggaataggaacccctgaaggtaacatcaaatacttagggttacctctttttcgttccaaacaaaaggactgtcaacttcaattttattctggaaaacttcacgtcaaaacttcagggctggaaagctaagacactgtctacagcaggtcgtgccaccctcataaagttcgtgggcttattcttgcccatgtatgctatgtaaacgaccaagttctcgagccgccttgttgttaagattgatgtcatagttcgtgatttcttgtgggggtccgaaaagggtaatcatggtctacacctaaaagcttgggataagctttgcttccttaagtccttagggggtcttagattccgaaaaactagagaaatgaatcaagcctttctggtgaaagtgggggtggaacctcttgattggcaaccaatccctttgctatcggatcttggaagctaaaaaccttaaaggaaagtctttccttaattttacatccaaagattcagattcgtggtttttagaaaaatgtagttagaaccaactctatcttaagaaatgagcttgcaagttggtggcggatgggaaggatactaatatttgggaggacccttggatcgctcatagaaagatttcttccctcgttctaatggctcctcactaat

SEQ ID NO: 325435 - DNA, 812 bp, Cannabis indica
atattgtaaactaggctggcaagagcaactgccatcactctccttttgaatctgctcattcacactctctgaatccacctagttatacctgtttagtcaagagtcgaactcctccattgcagccagtgtgccacacctgtaaaacactgtaatgtccaactacaattgaaaaataaatgctcctttgattcctcatgattgcagcagagaacacaatcagcattatcaataatgccaaacctatgcaatcggttttttgttctcaattttccatgcatagaaatccatagtatgacactatgtttaggtagattaaactaccccaaaccagttcctcaatctctcctggatatgacaaaataaagcataattagttgctatgttataagtacgtgcctcgaattggtgagtgtccaccaggaagcgaagttgattcttgagtgccactaatttcctccagtaccagctcccatatatgggaattgagtagcaccaccaatttttttcttagatatagattgtaaagctttattatgtgaattgtctaatatttctatttattttggtaaacggtcagtaggattgctcatagttttgctagatccgctgttttataccctgatcgtcgttttagtttggagtctgttctaactgatttgttgattgatttgataacggagtttaatggttaataaagataaattttccattaaaaaaataataataaaatagtttcttaggtgaatatttattattggcaagtgtttattaatttatatttacatgtgttataaaataatataaagtagatg

SEQ ID NO: 325436 - DNA, 1536 bp, Cannabis indica
aaatatcgggaaatttgtgggtgtacacgtcgggaaatttgtggattttgaaacaggtcaaagaccccaacactggaaattggcacacattggccgaaaggtcccaaatggaggttaaaggggagacagcggaagtatctgtttggaccggcggcactttggctcacaacggatcacaaacggctttttggaccggtggcaatttgggctcacaacggatcacaagtggctctgataccatgttagaatttgaggataagatgaatgaggttccatcccaaaaccaattggcaatgggaggagtagcccattcatcttatatatcacaatttatttccacacattagcaatgtgggactaactctaatagagaccataagtgcatctgttttcacaattgatattggcagctgcaattgaagaacccaattaaggctgagaaacatagctttagcatccatttcatgtgatgaaaaatcaccaacagtaggcattgagaaggcagcaacaacatgacctgagaaatttcttacaacaaccccaacacttataatatgcctagtttcatcaatagcagcatcaacatgaagtttcaaatgtcctgagggtgttggctgccatatagcaggagcagaagcaggagcaggagtaggagctgaggccgaaggcagagaagagattgccttaggtttcctgtatttctgctgggctgcacgataattgtgcaagtacgtagttggaagagaaggcagcaagtgatgcagcagttcttgccgatattccatgaaccacttagtttcgctctgtccaaatgcaccaaagagtacgaaagatgtgctccatttcaaatttcgagtgtgtagaagagagatgtttcaggtagtctcctttatataaagcagcagccatgttccaatcgaaagttaaatgagcacaacgccaaacaacccttgcatatcgacaccgaaaaaatacatgtccaattgactcccaagcatttcgacaaacggagcaagtggcatctgtgatgatcttctaattttgaccaaagatgtagccacggggagtgcatcatggataacgcgccaaacaaaaatcttaaccttttctggtaattgcagggaccaaaagaatttccaccaggatgtagtgtcatttgttgagcttgatgataggttctgatctgttagttttgttgctaagtggtagcccgattgcaccgaatacatgccattagtactatggtactgccagatcagtctgtcgttactagggaagaaatttaatggaatggtaagaatcctttcgacatcagcatggtggaagtattgttataattggaaaaatctttagtattccctttaatctacgaatacactatttagaagaattttttaatatttttttaatatatataattgtataagttgtagttattttaaaattattatattttaaaattttttaaataatatatattgttgaaaataaaatgtatatattttgttgtaagtacatatatgtttattttgttat

SEQ ID NO: 325437 - DNA, 624 bp, Cannabis indica
acatgaatatagaaaaaaaaaaaatttaaatttttttttctgaatgccgaaacaaattaagggtgcatcagtacatctcttttaagggggtgcattgtagaatcaccttatattatatatatttaaaaaataattaatccaataaatataatcattgggcaatttgaattttcattaggttattcaagttgtttttttttcttttatagtttgtaaattttttgaaaggataatagcgataaaacttcttaagtagttcagtttataaattataatacttaactctccatgtaaaatattcggtggcaaaattatttttatttaaaactttattgcaattcatgactccttcttttatgttttgtgttaaatttaattaaaatgacataaataccatattgatcacaattcatgattctcttatgttaagtgttaaatttaactaaatagttttgtttaatttttaaatttacaatttaatttttaaaatatttaaaacgtaaaaaaattaattgttttataacaattgttgaatgaaaattatttgggaaatttgattttctatacttattaaatttaaaaatttgttttttaaacctaatacattttacactataaaaaata

SEQ ID NO: 325438 - DNA, 574 bp, Cannabis indica
gtttttctatttttttttttcatgacaatatttattgtagtaaaaattgacttactcaagttttaaaaaaactctagagtaggttaaattgtaaaaaacagagttcaatttattgcttgtgtgcttttgttgttttattattattattatttttttagaaatgctaaaggtatttttagtgtctaatactattgtgatatgtaatattgctattagtttaatttaatatcgggtctcatatatattttattgtaataaaaattataaagaaccgataactaattataagatatcacctcatagtgatatgcttagaagacgctcgatcttcggcataaacggtctatgactatacctagagtttacttagtttatagacttaaaaaatattattcttttaaaaatatatattttcttactaattttgaaaaatatcataaggctcaaatatatttattttacccactaaatttcaagttcggccttactaagcaccttagtaccttataataatattcttttttattattatatatttataaaaataactgatacaaaaaatcttacttttagt

SEQ ID NO: 325439 - DNA, 593 bp, Cannabis indica
atgagtgattctaatcactttgtaccaaaaaaaaaaataaataaataaatacaagaattacacgtaaatgttgaatctcataagcaaaggtcatatttgtaacatgtcttttttgtacatggatctctcttctattgagtcttggcatattctatcataagaaaagtcgttgacagataattgaattatgtatcttaaattaatataattttaggatttttaatttttgtgtatcaatgattgtgggttcctttttgttatcaatgatctttttaagtttcataaaattttattatgattttaaatcctacaactttaattttcaattaagaaaattactaaaattaaataattattactaaataaaatacaccgcactaagggtaagcaatgatcgacttaatcaattttttacattaaaaaattcaaattttggtttttgatttttagattataactatgaaaaccgaccgaccattatataaatgtaaaaaaattaactattttaatccacggtttggtcggttcaagcttcatttttttttttaaaaaaataagtcttaaaattttctataattatttgaaaactaaaa

SEQ ID NO: 325440 - DNA, 1349 bp, Cannabis indica
ataaaactatttccaaatagcatgaaattcccaaagatttttatttattctctttattcatattcatatatattatcttaattattttattttgtttggtgaaagatacatggaagagagaatgacaagtacattctcatttgacaatttgtagcaaagaatggtgtcatcaaattcttcaaaccactttgccacaaaataaataaataaataaataaaaaattcttcaaaccaaacaaacaaaacacaccattttaaaaatgaaaattctaaaagaggggactacaatattacaatacataccactaacatatattttaaatttttaacaaaaaaatgttatacataactataagagtaataatatatgcacacaaaatatgcactaacacaataataaatgatacaatagtgcttttttaagttgtaaattttatctttaataaaaaataatgtcacgttattgaatataatgttttggtatagattttgtgtatctatcgatactctacatataatttttttaaatttgattttaattcattgattggtctaatatactaaaaaatacaaatacatattatcaaatataaggtattaataaaaaaataattaatataaaataagcgaggagtgtcattcccgttcttgtcttgtttaacattcagggataaaaaataatctctttcttcgcctcgttccccatttagatagataatctccgccctattaggaacaagtccccgcaaaacctatcttagaaaaatgaaaaaaaaaataaagtataggtaagtaaagggaggaccgttgaatttatattctatatgatgacaccctttggaagtacatatatatataaataaatataaatttattttttggggcacaaatagaccaattgttgggagagaatgaaaaccgtactataaaaaaatgtatgttattgtatagtttttgtgggacatgtaacatccattaatggggaaccatgagaatcaaaatccttagcttgatttcaatttggaaaagatggactacaactctttatttttgtcactttgcaattactacctagctagtttcacctttgatagtgatatttcacatacacatataatatattagggtacacttttaatgtgtattacttataaatagatagtactataaaaattcaaatttttatactcatttttcatctaattagaaaaatctttcatttttatattatatagactaagctttgttctgaaaaaaaattaagaaaaaaagttacttaaatattttgtatataaacatatttttgatatagcgtaaaaagagatattgtggaagttgatcctctaaac

SEQ ID NO: 325441 - DNA, 1306 bp, Cannabis indica
ccgaaacgattcgtgcacttgcgagtaaaatattaaaacactcattttttaggacaacagttaacatcctacaaggtaacacttcaaacaacttaatcttcgttaagaaatgtagaactcttttactctttggcataaaagacttggtcatgtaagtaaaaagggattaaaggttctaagcaataaatgtttacttggaaagaatgtaatcaaggatttagatttttgtgagcaatgtgtttatagaaaatctacaaaaattaagttttggaactggtatacataatactagatcaaccttagattacattcattcagatttgtggggaccctcaagaacaatgtctcaaggaggggccagatattttctgacttttattgatgatcattcaaggtttgtttggtttaacatactcaaaaacaagaatgatggattcagcaatttcaaggaatggagaaccttgcttgaaacacaaactggaagaaaaataaagaagttgataactcacaatggcctaaaattttatgtagatgatttcaccaagttttgccggaagaatggcataacaaggcatgaaactgtacctagaaaccctctatagaatggtcttgcggagagaatgtacaggaccattcttgagagggttagatacttactaatccactcagggctaccaaaagatttttgggtagaggttgtcatgacacaagttcttgcaagctcaatatatatatatagagagagtactatagcaaaatattcttaagcatatataatgcttaattttttccatgtataattcattatattttgatattaattaattgttcatcaactctacttgctcattacaacgccatttttctataaataattatttagaatttgagaggtgtctttcgataataaaatatttcttttgtgcatatttcagttaattgatattttattctttgttttcctggcacatctgctagaaagaactggtgggggcaaccatagcatgtagcagtagttgaggggcaaactagaaataaaactaatgattctcttgtatgcatcaatgtaatattataatggtcaatttaatataatatgttagatttatgcatgtgaaagaaatagacagttggaaggttagatagcctaagtttaaattatttaagataaacaaattaaaaaacaaaatgaaaaggttgatcgatcgaaagcctctaactttttgacatgaagaaacctttgctcggatatatatctcttctatgtaaaatgtggctatataatagaatttttggtttatgaaaa

SEQ ID NO: 325442 - DNA, 528 bp, Cannabis indica
aaatgcccaaattccgccgatctccgtcctaaagcagtggtcttggagttctttcgttctattttggcttcattcaatcaatcattttgcccgcaagcgttcggcactgatgcgatcgcttcgttctttgttgattttctaggatatgtatggaaagctgccgaatcgtcgctgacttcagctggcagcgtatggttcagtattcggccactctgagggaacaaaactcacctttgagtgtgaagcattaccagccaaataaaatttcaagcccaggatatgaaacgattgagattgagattgggaatggaagagtctattgggagtgggaataggttaaccgcgttacaaaaacctccgagacttaagttcgttcaggttgggattggaagagtgaaatggaggagtcgattggattagggttttgagggtttagttttatttatatatttttgaaagttaacggaggatcaaatctaccgttaacagaatatttttttatttttaaagtatattctgttaaattaa

SEQ ID NO: 325443 - DNA, 781 bp, Cannabis indica
atttttaattttttttgaataatctacagtactgaaaacgaaatctttgatattttagtttaccacgcgtgtttaaaattttttaaatatattttggacattgtaaatcatttagaatattttaaaaatttacaaagatagtattataattataatgaatacaataacactaatctaatttataatatgcacacatcatgaatattatttcatatttccaataatatttttgtaattatactagaataatgtttaattttgtgacattgaaatatattaaattaaaacactacctttgctaaatttagtaggattgacatcaacccctattattttggatgctcctcttgctcttgccccttcactaatctacaccaattttcattaatatgattaaaattctatgtaaatttaagattaataatatcattttatgaataaaattataatacactacaataaataaggatttcaagcgcgacagtatcagaaacgacagaatttcattcttaatagtggtagtatcaggcgcgaattaacaaagatgttccaaataatttctttttaataaaaaaaaataattaaatgattattagaaacgacaaaactctcatcaagtgcgaaaatattttggaatgacttttacttttaggaacaatttattttcgttccaaatatttttgcatcatgaacgttactatattttattcctaatattgattttcaggcacgagttattaggaataaaatatcaggaatgactagtcgtgccaaataatct

SEQ ID NO: 325444 - DNA, 603 bp, Cannabis indica
tgtagaaaattaatatttccaatttccctacacacagcaaaagtttagtcaagtcaatggtcaaatcagacctattacccagtcaaagctcttatttgcttttccctgcttttatgcaaaagacagccccttttactttgaaaagctacaggtcgtattaaatgtatttagaaaccccaaaaaccatcagacatatatattcttctttatttactcaaacacacattttaaactacagccacctaaaataaccctagccgtgagcaacctttcttcactgttcttctttgaagaacatgaagaacagcttcaacacagcttcaactcaacctagaaattttccctctctgcccagaaaaataaccccagcaaacaacccaaccgagatgaacaaaacccagaaaaaatcaaaccgaagaatagcataaacataaaagaaaaatcagcaaagaaaaggagaagataacaccggttttatagaggttccccgaaattgtgcgggtacgtcctcttcgagctcgcctcgattccactatagatcttcaatgatcaagagattacaatggtgggattccaaaacacacaggtattattttggtaatc

SEQ ID NO: 325445 - DNA, 1455 bp, Cannabis indica
atgtattttcataaataaaaaaattccaagagtacaaataaaattttttctgtcttgatgtatttttataattttttttttcaaatttttgatcttttatgtaaaattttatctttttagcaaaagttcatattaatttatatttaactttttctttgttgtacttttgtgttttcttatatatttattaaaatttagcagataaatatagggataatctcacaaatacacaaaaataataaaaaaattacaaaaatatggcttcacggaattttaaatacttttacgaatttttttatttatttacagaaaatgcggtctttttatgttgtactcttgttaatttgttgttgactttttgttatctatatgttatttggatgttattttattgttacttttatataattttcttattgttttcatgttgtttctatgaaaaatcgtaaaaatgtaaaaaattctttaaacgtaaagatatatatttttttttacaaaatagtcccttatgtaattatcccataaatatattcttcatttcatttcgatatagtaatttataatgtaaatatttaaatttatctttcagttgtagattgatacttaagtaaaatatcttctattaacattctggaccttctgtaagtaccttaccgtaagtaccaagtcagtacttatgtgtcactctttaaattgtctacatcatttaatttgcaactgagagcttaacttaagtatttacgttgtaaattactcgttctcatatattgtaacacaaacagtatattataatattatatatttgtgtgaatggaaaaaaaaattatatcgaatttttatgaatttgaaaaatgtgagaaaaattttgtctaacgaatcctagctgtgaaatataataacagtagcagatgcatcacttgattcacatccatacaaacagatgctaaaaacgtgacattaatgtggcgtttggttggaggtaatgaaataaaatagaatgaaaaagaaacaattttcattctattatcactactataaaaaatagtttttctcgacgtttttaaatagtcgtttaaagtattcccgtcagtttctataaccgtcacctatacaactgtcacaaaacgggcaaaataggcaacggttaaaaattgtcgctagtgtggacttcccgacgatttgaaatcgttgcctataacagggtataggcgacgtttttaaattgccggtaatgtaaaaaaaaaaaaggagaaaaaatacctatttttctatcattaatggcagaaaaatctttattttcccccattttttttcatacattagttttataattttacctaaattaaaataaaataactaattaattttattacaatatcaactaactttaaaacacattaaatttacacaataacaaaataaatatatataataataaaaaaaatatataaataa

SEQ ID NO: 325446 - DNA, 657 bp, Cannabis indica
taactcattcaaatttaggcgggatttgattccatctttgctctgccaagaaatattgaactaggtattaagaaagctatctgatacatttttctcaatgtgcatcacatccagattatgacgtaacaacaaatacttccaatactcgagctaaaaaaatattgacttcttcttccatggcccctgaggttcatttgtaacaacgtcacttttctcacgacgaccttttcttttctttgaagtcgcttttcactttccaaggtggaattgaactttatttaacttttctaacatttgttccccttgcaaaggtggcagtggcggtggcaatttaaattcgtgcttatagtcaaatgccttttcataagtccaaaacacatgttcgattggcaaaaaccttcgatgtcccatttaatacactttcttcgagtatttaaaatttatagagcatgttttctcctcacaaataggacatgctttgtaccctttcacactgtatccagaaagatttctgaaagttggaaaatcattaatggcccacagtaatatgaccttaagattgaattctactttcctaaaggcatcgcatgtaggaataccctcatactaaaatttactcaaatcatcaactagaggggctaagtacacatcaatatc

SEQ ID NO: 325447 - DNA, 1441 bp, Cannabis indica
acattaaaaccatcttgatctaatatggacatagtaattaaagttctcttaatatctggtacatgcttgacctgtttcaactcaacaacctcgccatcttccaattctagcttgactatcccaatgcatgcatttgcacaatctctattgtcacccagattgatagttccactttgtagaaattatgtattgaatgaaatgttctttaacaggacaagtgcggaatgaacatccataatcaaaatgatccaatctatttttgccttgtactttgagatggctaacacactgacactatcataaccatcactgtcttatgcatttgagacaatgtcagcatttccaccttttttgaatttgtaatctttcaagagtagacaatcatttttcaagtgcaatggttgttgcaaatgaaacatcttctctaaaacttggatttcgatttacctttcccagtgttgttctgactcttgttctccttcttggacccttttcctcaaatctgtaagccatctccaacaccttatcttgcttttctgcttttctcttcaattcctttgacattaatgcattttggacttcctctaatgtcaataaatcctttccatacatcaaggtgtccacaaagtgttcataactctgtgtgggaagagaatttagcacaatgatggcctgatcctcatcctcgactttaattccaatgttctctaagtcgaggatcaccttattgaaattatcaagatgatcttctatttcctttcctggcatcatgttaaaagaatacagtttctacttagaaacaatctatttgccaacaattttgtcatgtaaagcctttccaatttcaaccatattgcaaccatattgcagctaagtcttcgttcgacactttccttaggaatttgtcaccaagactcaaaattatggcactatgtgccttctcgagaatatctgtcttctctttctaggtgagaccttcaggcatacccttctctcccaacaaagctgattgcagaccttgttgaaccagcttgactctcattttcacacaccacaacaacccaaattcgttcttccctataaacttttcaagatcaaatttcgcattctccattttcttgcttgatcaccagaatcttggaccttcgagccaaacaagattcttcttcaatctccaagatctgatacaacttgttgaatctctgacttaatccaattgaatctcgaactcaatcccacatgccaagaatggctataagagcaatccaagaacactcacaactcacagatgataagcactcatgcattaagaaattaatctaaatgttatgaagctttattgatttgaaatgtcttttgtattacaatgtgatgaactactttacaattgttagatattagatgtatattaactgtaaaagaattagatatttagtagata

SEQ ID NO: 325448 - DNA, 665 bp, Cannabis indica
ttcaagtgtaactctatttagttataacctctcaattagaatattattttcttggtcgtgtattcttggataaagattctactgtatctttatttaaaatatcgaatttagattttaaaactattgcaattaatccacattttttttcttatgagtatgcaataaaatgttttaacactgaattttacaccttaaataattcaatattttctatacagaacttaatgtcttaattatatatatggatatataaaatattggattataactttatatatattatgttcaaataaaatcaaactctgtaggagttgtagtagaaaatttcaatcagtgaaatcttttctgagctccctcatctactcaaaaaatttcaaatataatctgatattgttccgtacgaggtgggagaattttttggggtcatgcatggtcgacttttaatcttcaatggtttattttgtaaagttgttgcactattcatctaaaaaaaataataaaataaaataaaaagttattgaaactgatttttatttatttatttttctcttgtcactcaactgcaaaattttattttatgtttcataataattgaactaggttggtttggtacgccctattatattgtattagtattatattgaattgtattttatgcaatattt

SEQ ID NO: 325449 - DNA, 815 bp, Cannabis indica
ataaagaatacaatttctatttaggatctatttatgaatagaataattagtatttttatcatttgaactttattatactatggaatcgcacccctaaatatatggattgttaaaaaattctcattacataataatttttattaggttttatttgtttttgatataaagtgttgaatgattagcatttttatcttgaactttgaacaaaagcccaatttttttatttattttttaaatatttatatttaagtctttttttattattatttaaaatccaataaattttctaaaaagatttttttctctaagaattttgtttatttaaacattctttatatttacaaacttatattatatattatgttaccgaattttttcagtcaaacataataaaaaagatatgcaagtttcacatctaaatcaacaataaatttattaattggccaataatatactttaggttatttttttttttttaaaaaaatatttctcttttaagaggaggcatgatcttagaagtagataatgtttataagaaaaaatatattaattagcaatatcatattaacttttaaatgataaaaagaaacgaaaactaacaaaagtattatatctctctcaataggagagctcactaaattttttcaacataatatacgacttagaggatataatttaatagtattgtaagtttatgaaataaaaatactaagagcatgtttggtattgttttctgttttttgttttcaaaaaattgtttttagaaatgagaacaaaaaataatttttagaagtttttaaaaacaagtcatgttt

SEQ ID NO: 325450 - DNA, 1119 bp, Cannabis indica
agtaagttgcttgcattagagtaagtaattaccaggtataccataagccataggttactgagatacccccggccatttcttgagatgccaaatcaatcctttatactttgagtgtgccttttatgcaggtgaggtcaatttagttatttttgcactttcaccacactgaaaagatcttctatctttcagatgagcgatctgtcagacagccaaatgctcgactcaggaggtggggctttcgctgacgaacagaataaaagcgacaacttcataccagcctcaatatctgacgaagaggttcctgttgctaaagctgcaaatttgggaccattatcttctgacaagatagagaggatggttcaggaactcactgaaccagggacaatcgagattcgcgatagtgaattcacggtgtctgcccgggaacatctcatccattcgaggcatgcccctgatatcgaagtcgaggagatgggggaagattgggaggttcctgatcgtgagttaggggaagaagataatgtcaagggaagcaagacagattcggttgatatcaccgagttaaacgaaccctttttatgcgaggatctagtctcacgagttacaaaattagacctccatacattcacgaggttgaatttgttgcgacttagtaccatgcgtcctcgcacatcccaaaggcctcatcttcctttcaccaattctgcgattatccccacagaggacgtggttgtctcagttcccattctttgatgtggggtatcaataccctttcaccctttcataatagctatcctcagacgttatgacgtctctcccttccaataaacctcgcataactatcacatagccttagggttttaagcgatgtatatggaatatggtcggagggagccctcgatggaggatttcagttatttttatgataaaaagtgtgggtcacgataatggtttttacagccacttctgaaatcaatggggtagaaggcatgatttccaatatgggggattagaaatcaaagtggttttacgtgttcagagtaccaggggttaggagttcactgtttgtaattgattcatgaattgaaacgagcaacaaatgccaaggtctataatgaa

SEQ ID NO: 325451 - DNA, 808 bp, Cannabis indica
tgttttggttttggtaatcatatgtgataaagatggttataaattggttctttaatgtttttttgattaaactatctactacagctttaagaaagcacgaagaaatggaggagaattcctagatttgaatcattgaattgtttaggggttattattgtttttaatttatttttgtaaaattttattaattttaattgttttatttattgttagtctgatttatatttttataaaatttaattaagagttgttttttttctatataatttaaattgttattatgggtgttaatttaaagatttttatttttgttttaataagggtttatttaattttaggttattattttaagttttaaggtagatgatgtggcatgagttaattttaaatggtgagagtgatgtgtcatttattttaatgaggtgacatgttatctagcacattacaagataaaaaataaagaagtacctacggaagttctacattagtgacaaaaaatatttttatcgtcaaaaatacgacttaggtacttatctactattcagaataaaacttaaatatttctgccgtaatttactctttaatttatattaaataagtttaattatttttatggactcacgtaaatgtttaattttttaattattaaaaaattaattaatgatatttaaattagtttaacagaaatcacttttcaacagaaaatcttaattcgtctataggcattattctagggaaacttacaaaaatactggaatttaggttaagttttgcaaaaatactgtcacacggaaattttttcaaaaat

SEQ ID NO: 325452 - DNA, 732 bp, Cannabis indica
attaaaataaaaaactaaaatattaaataaaactaacactacgtggcttgacacgtaacaatcacctagtatatatatatatataaataagtttcaactatcatactcactgataagtgatatgtgtgtgtgtttttcacatgaaaaattcaactaatttatttatttcccatatatagttttatataaattggttaaacatgtgtacataatgacagaagacttagaatctacacttttttctttctttcttgtatgatagtctaagaatataataatatgagaaagcagaataaaggtaactttaataaagaaaagccattataatatgtgatacgtgtatacattttgtatatataacaaactatccacattgagtgatacagattcaactttgcaaaaacataactataacaaacatttttgctttggattgctattaatcatcatcggtgtcatttggtagaccatataaagggtgttaaatagtacgatgataaattttaataaattaatgtgatccgtatatactgtttaatatataaaatcattcatattaacttgtatgataatatttagaaatggttagggtcgaggggctagggtccagggtcgagggactggcatcttagtttcgggatccggagccaaggccaacccctgggctagggtttagaatttgttggtttttatggtccaaattagagtatagtgcaaaagttgttttataaa

SEQ ID NO: 325453 - DNA, 1293 bp, Cannabis indica
atggacccacataggggccggccactaagtttatttttgctattattttattattttttattccaaataatttaatcataaccctaagtgaattagtataaaaagaaaagaatagtctcataatctaattaatgactcttgacctaattttcttcttgtcagacaactacagagtttgagacttcttattcttttccttctaattttcgaaatccttagtgttcttcaccattaaaattcaaactttagtgattgagtgcatgcccacccatagtaagttagtcctcaatcatagtgtgactgtgaagaatccaaataactgaaggagttctagcctcagatcttgattatactctgtgacaaaaaggatacaagggttggagatctgagcggaagtagtcatttaattccgctacaaccaatgtaaggtttctcataccttttatgtgtttaattttatcgttttagaagttcatatttaggatgttaaaaacatacttattagtaaatctaagtcctggtaaaatatattccaacaggataaacatgtacagttggccaactgtattcagtcaaggattatttctcatccttcatctttatctctttctctctcacctccattatttcttacttgctcaagctcgagtactgtaaatttagtactctacaataacccataaaaatattcaataaactaacaatacaattttatttatttgtaactttgtaactgctaagagttaaaaataggggtgtgcagaaagtcatccaatctaattataaacgaccgatccaataaaatcggatatccaatcataattggatcagatcggatgtaaattttgaaaattcaattggatcagatcggttgttggatcagacatccgatctaatggataaccgaccaaaccaatccagttatggtcacccaattatatttatacatttttaaaatacatttataattttatatgtttaatatattttatttaaaaatatatattaattgatttaatgtacatttaacacatgagattaatgaaaaaaaaaattaaaatattaattctcatattacgaaacactaataaaattatcaatacgtattgaataaattttatttttaacagttttagaataatattgttttgccattactgctacaagaaagtaatattttttttcttaaacaaaaaaagagaaaaatacaaataaaaataaataaatacaataaataaaaatagaaaaaactataaaaaaataaataaaaaaatactataaaaaatattaaaa

SEQ ID NO: 325454 - DNA, 519 bp, Cannabis indica
gtttctatttttgtttattttctctatgtaggtcataaatgtaaattttttccattttcagtttattatagaaaaaatcccttagtaatattgccaacactaattatcactttttccgaacaacccattaattattatctttgatgaatctccacttaattatttaatattattattaaataatattattagacagtagtaattttagtaccatttaaaattaatgtcttaccaacaatactttataaaaattattaaattaaattatataaaatttaatacttaattataacttgtaatatttcattttaaaaaatattaaatactagtaatacatttttgaagtttctctttttatttttccttttagaaaataaaaggattaaaaaagacacaaagctaaaaaaccattagatcaatacaagcacagagcatggggtcaaagataataatggcgacaggactgagctatggactaaaccggatacaaacacaatcaagataaatattgatgcagct

SEQ ID NO: 325455 - DNA, 956 bp, Cannabis indica
tttgttttgaatttattaaaagaacatttggaagtaatggatactacatgtttcttcctagactcaacgatctagaatttgggtcttatatgtgtcctgtttaagacaataacagagtttgtattgacgaaattaaaaaaaaatatatagttttacaaatattcagtacttatgctgctaaaaacaaacattagatttatgacacttacaaacttaaaactttgaatattttatattaacattgttgttaagcactaggtggtagtggtgctcaatactaattgtgaagtgttgttttatattgttaagagtagtgtgttactatttttattaatatcacatttcactaacctgacaatcatatgctttgacttgcgttggatgctggactattcgttgaagataaaagtacatcgatcccatatgaagttttaccatgagcaaattttatccattgagaaaatataggttcgatcaggaatttttttttgactaccaatagcaagaatgaatggttaaggtttctacttttcataataattaaaaagttaaaatatatagaatttaatatttaattatatcaatagtgatataacatttcatattagtggttgatgcttaacattttacaatcaacatagatatttcatatttttttaattttaataagtttattgaagatatctcgtgataatagagactttctattttattttagttatttaacataactttttaatgatataattatattgtatcttacattattagatattcttaagaaacattaaaacaatactaaattttcatgtaaatgattagcatataaatgaacactaatattgtcatacaagatactatataaacattattgtaaacgttagattttgatacaaactctctaatttgataagggaaatttgattttctatacttattaaacttaattttttttt

SEQ ID NO: 325456 - DNA, 962 bp, Cannabis indica
ttgattataatttgtcactaagattgtgataaaatagtgctcttttatgttgtagtttttgatattaagaaactatcacttggggttcttactttgttccaaacaaatgttgttaatttttatacaaattgcttcattcctaataatcaaatgttcttactgtgtattttgttctgtatcatagtttgatttgcatgagaaaggaacacttggatgcagttaagtgttaataatcaaagtaagatgcatgtaagccaactagtaaaaaaaatgtaatattctagacttatagaacatacaaagtgtgaacccatataaacgagatgcattttaattagttacgatatatatttagtaatagttaagccggctttacaataaaagaaaacttacaaattgtttgcagctttatgtagttgagatttattgcaaaaaaataggttccaataatgggtagattgggattgggatctcttcgtgtttagccattaattcaattcttacgttttctctttcctctgaaagaaacaaggccaattaagttttactgtttaaccaaattcaatttttaacgaagaaaaagttgagatgaatacttacggcttaaatcgtagtagatgttgtacttcttctttgcccttttgaaaattattggctctaattcttcctctatatatgtcgattgatggaagctttttactcctcaatgcataattttgaacgtttttgctacttcaaaaattgactcaataaaggatctaataaaagagaaaaggaaaaaaaattaaaacaataatagttgggttttttcccaaaaataagaaaaatagttgagaataattaaataaaaaaaccaaaacaaattactatattatattaataccaaaaagagtaatttgcgggataaaacctaagtctaacggtaagaatagaaagaaatggcttggtgccattaatgatga

SEQ ID NO: 325457 - DNA, 1898 bp, Cannabis indica
ttgtcttggaattgccatgggcttgggaacccatgggctattcaattcattaaggatttagttatccaaaagcagcccaaagttgtgtttctttgtgagactttgtcaaagtctgatgctattgagaaagttcggttggctataggtttccagggtgctttttcggttgattgtagagggaaaagtggaggtgtggcgttgttttggaaggatactgaggatgttactttacttgggtttggggacaattttatagatgttgttgtctcgggtagtgaaggagttcaatggcgtcttacgggattttatgacgaaccaaatagaagtcttcgtaagaatacgtgggatcaaattcgctatctcaagaccaagtacacctggccttggtgtattatcggcgatcttaacaatgtttcttctcaatcggataaaagaggtggtaatccatatcccaattggcttattgatggtttcggggacatgttggaagattgtagtttaattgacatggatctatgtggttacccttacacttgggagaagggcaggggtactaattcgtggatagaagttcgtattgatagagccttagtttccaaaagttggttggatattttcccacttgcaaagctgctgaatgttgaaggtacaacctcagatcactgtccattgcagctggtgttaaatgcagagaccaaaccagcttttaagaagcatttcaggttcaaaaatctttggctaagggaacccggttgtttgcagattgtgaaggacacttgggaattttattttgggtgttctatgttggaaaagatcaggttttgtggtgaaaagttactggtatggggcaaggactattcgggcaacttcacagatcgtattaagagttgcaaagctgagatcaaaaggtggggaaaaggcagggattcactttctgttcaaaattaccaatcggttgaagctcaattacaagaggtcttgatgcaaaaagagattttttggcgtcaaagatcgaaacaattatggctgagggaaggagatcagaattctaagtatttccatgctatggcaacttcgagaaggtgaaataattccatccaaaagctgaaaaatgaccagggagtttggattgattggcataataatctgtctgggttaatggttgattatttttgcagtttgttctcatcttcttcaccagatatcgatgaggtaacaaatgctattcctagagtcattactgatgatcaagctaatatgttgatggaacccattgtggatgatgaagtgagaagagcactttttcaaatgcaccctgttaagtctcccggtccagatggcatgacaccaggattctttcatgaatattgggatgtggttcggcatgatgtaatcactcaggtaaaagattttctttgagtcaggttattttcctcctgttttgaatgaaaccaatattgttttgatccctaagaagaaacaacctgagactatgagtgatttgcgtcctatatcactatgtaatgttgcttacaagatcatagctaaagtgtaggctaatagacttaaaggcgttcttccttgtgttatttctgaaacacaaagtgcgtttatacaagggaggttaatctcgaacaacatcatgatagcttttgagataatgcattatctaaaaaggaaaagaatgggcaaaccgagtactatggcgctcaagcttgatatgagcaaggcatatgatagggtggaatgggtatttcttgagaagatgatgactcaaatgggctttccttggaagatgatttctctgattatgtactgtgtttcatctgtcgtttataaagttacacatggtgggaacattatgggtccaattgttggaatttattttaccaggatct

SEQ ID NO: 325458 - DNA, 1017 bp, Cannabis indica
cgtgtagcagtcccaacacgcttcctcccatgcggcattaaatgcgaattgactgctcagggggagtctgacacctcgcggagatgccttagtattacttgggcatccgggagcgtatggagctcagcatgccttctccaggaggcatctctcggatgctgccttatatcacaaagacttagcaaataattcaagcattaagacgttttgatccacgtgtccctgtccggttggtccacgtatattgggcaaaatcaggggaaacaagtaccattgcctagaggcttaatttaggccatatatgctcttttttaagaggcaaatggagtcaggggagcagtatatcctggaggaagttgtatgtaaacttcttcttcaaggtctccatataggaatgctttatgaatgtctaattggtgaacattacaattgttcattgcagcaagtgcaagaaaaacttttagggtgttgaacttggcaactagggcatatgtttaggagtagtcaagtccttgtcgttggttgtaggctttggctactagacgagctttgaatcgatctacagcctcaaattggtcatatttaacctacagcctcaaattggtcatatttaaccttataaacccatttacaacctatggctttttgcccaggtggtaatttggtgatgatccatgtgtgactttattttaatgcttgtgtctcagtatccatggctttacgccaatgagtgaactgagaggcttcagcatagttttcgggctcaacttcagaataggttgctaatactgcagccctaaactgaagactaagcttgatgtaacagaggaagggctcaattgggtgagtcgtggaagtggtatgacaaacatagtcttggagatgagatggttttttttgtgatcctgccagtttttatggagggttgattcgggagatctgaacatggagctaaagttatgggattaaaaggtgtattggatggaagtatgacatgtgggaaacacaagtcaatat

SEQ ID NO: 325459 - DNA, 1251 bp, Cannabis indica
atagctcgtaacgatttcacatgatcttttatagatatgttgatttccatttttggacttttcatggtcatagtctttttcttttttatctgtatctggtttttactgagctatatacataatcgcgtggtcatgattattatgagagatggtaaaatggcaaagtgatcatgaagatcattttttttttgagtgaattcttaaaagatcataataaatagattcactcggaataaatgtttatgagcaccctataataggattttaataattagataaaagttatgtttggtttatgcttgatgcattagtttttttttattattattttttttaaggagcatttggtttggtttgaataatatttctagcactacttttttctttttgtttttaaataattccaaattcatatatatatatattttaagagaaatggtaaattctttcattcttaaataatcatctatgttaaccttaaaaaaagtagctatctattctaatattttcactgatttggtaaagtacaatttgattgatattattaattaatttaattgggtcaaaaaaatataatttaatcaaaaaaaaaattaagatttcaaattaatggtagaaaaacatttatttattagtctcaacaaaggtgaatttttaagtcttattagctttcaattgatgacttttagagatttctaagctaacataattccctcattacattcattcagcattgaacatttaatctcattctcttagcattatgagtctctaaatctttggtaacactccattgtgttggtggcacatcatcgtgttggtatgggcatttgtccccatttcgacacccctttgaagttttataaaaaatgcatggtttcaatttcttccatcgcaattctctttttggtttgtaattattaagaggttttgattttggatcactttgttccttgtgctcatcaactttttcacaaccatgttgtctaatgagattcctatagtagttcaaatccttcattgggggcattggatttgtggtagtaaacaagtctttagacactgagttcacatccacataactcggggcgggggcggggacgggggctgtaatggtggtggtggtggccggtggtattagtccattttgtcttaacttttcaatggtttgtggatcacttaagattttattgagcaaattaaagatggtttggttgaagaggtttggtcacattgaacttgggaacttgt

SEQ ID NO: 325460 - DNA, 816 bp, Cannabis indica
cgaaaacatatgttaaaatatttttttttaaatttttttttcacgacggtattggttatgcttacaatatcatttttgtaaatttttaaaattttttgaatagtttatagtgtcgaaaatacgtttgaagttttttaaacacgcgtggtaagctggaatatcaggaactctgttttgtactatttcaaaaatttacatggatgatattataactataacgaataccgctatgaagaaaatatatcagcatgcgatttcgaacgtgaaaattgactaagagattataatacgagattgtaattaacactcttctattaaaaataaaatagatgaaaattgagctacgtatatattttatattttgtaccatatccaatttatcattttacaaaggaaataagactcttatgtttgtaaaatacattgtctataaatattatggcttaaatcaattactatttactattagtgtgttatactttcttattggacgaattatatattattatatgccatttagaccaactaaattctaccaattttcacatctccacatctccacacctcacaaaacacatggttaatttgttcttgtttgtcatgaaatggatcacttatatcactttagctagcttaatatgtataaattacatcttattagttggataataattaataatattaaaggtaaatatcattattttgtaaaagttaataacaagaccttttattttgttaaatgataaaatagattttatattttccaatatataaaaataggacccttaactcaattttcaataattttatttttaa

SEQ ID NO: 325461 - DNA, 820 bp, Cannabis indica
atatgcacactttatatagaatagatataattttcttatgtcaaattgatccaacaaataataaaacaaataaaaaatattagaaatgccgtcgtcaacatgcattattatacatacataaacataattattaatattttattattacatttagacatgtacgtaagatttgtatagctatatacatatttataaaaacgacaccgtgtgaaataattaacttttatctcttaataaattattaaagcaaaaataaatacatatatacgtacgacatactgaaattagaagagaaaaagtaaatgaaataaaataaaacgacactacgtacgtacgtacactctacttatatatttatacaaatatatatagttaattttccgtttggttaccaggaaagtgagaaagaaaatgagagtatattgttagattgtagtataaccccaaccgtcagaaacatataaattcctagctggaaagcatgcacagaagtgcattaaatacaaaattaaataaatagaaaaagacagctaagattaaataataataataataataatatcatacaaaaacaaatcccattttttttccttataaattattatttatttttttaaataaataaatacactgcagtagagaaaaatcactttctctaaaatccataagaaaaaaaaacgacaacgcggttccaagtaagttgtcagcagcaccgacgactaagttgttattattattattattattattattattattattattattattattattgtaacaccccgatttcccgagatgtcacataggatagtccgta

SEQ ID NO: 325462 - DNA, 446 bp, Cannabis indica
ggagtttattttatatgacataaaaaaaataagatatgaatcaaagttcaaatatgagaaattaaacaaaagaacataagtaaaagccgaaaaagtcgctaaaaaagttatcatcgctaaaaaagtcattgtcgccgaaaaaattatcgaaaagtcacgtcaatgaaataatcatcaaaaaagtcaacagagttgtgtcgtcattagaaaagtcaccagagttagatgtctcaaatataaatgaaaatagaacgtgttctataatataatgaatataaacaagtaacacgcaataactcaaactagttatagttaaaaaaaaatagaagaaatcagtttataaatcattgaaacataaattaaaatcaaaactagtttcacaacaaaatgagtaaaaatgaatagcacataatacctcataaaatcagttataatttttttttttt

SEQ ID NO: 325463 - DNA, 1747 bp, Cannabis indica
cctttactttttcttttttcttttttttttgttttttttttttttctttttttttttttttatcttttggcccccttaatgttaacttctgcctccgcccctggccggaacaattggtattgtactagttgtacctatagaagaggaattatatggcaaagtgaaccaagagtgcagtgtagtcatagtcacaaattgctcgggttgatgagtattaagaaaaccagaacgacaagggaattcttactcattgaaggtaacatgtcttgagatatatatacgcccatgaggactgaggcatttatatcccttgtgaacctcactgtacctgaggttcacacacttaagagtatgatactgaaacttgtgactctgatagggatgaatgcatggaaaacatgacgcaccgaacacttttaagaacttgtaatcagggactcgagaaaacaaatttcataaggtgatttgccaagaaaaactggtgtaggaaggcgatttatcaagtaaacggccgtttggaaagcatcagaccagtaattaagtggcaactggcctaagctaacaatgtgagccctgtttcgacaatatgtctatacttatgcttggctcttccattttattccgaggtatgaggacagctatgatggaaaaatataccactatcattaactaattgggagaaagcctgaaactcacctccccaatcagttcttagttgtttaattttcctatcaaattggttttcaacaaggtttttaaagtgtgtaaaggcttgtaaagcatctgatttctgttttaaagggaagaaccaagtgtacctactataatcatcaagaaagtgtatgtaatatttgtaatttgtatgtgatgtaataggggaagcaccccataaatcagtataaattaaatcaagaacatgagtggcacgactgctggaatttttaaaggttaataaatgagatttaccaaactgacatgcatcacaaaaactatgtgtttcattactcttagttttgacattacaaaactttaaaacttgatttacaatagaaattgatggatgtcctaggcgtctatgccaggtatcctttagggaattagaagagagacaaacattcttagattgagatttggtggtagatgccaatggatgactttgagatgaaactgtggtgtgaaaacatgctagagtaggactaaaatagtacaagccatctctaattgttcctcgtagcacctccatccctgttgttagatccttcacacaataaaaatcagaaaagaactcaattgagacattattatctcatgttaactttgacacactaataagattcttagtaattgaagggacatgtaacatatcattcagctttaaatgagtggaatcagtgaggtttattctatcagtaccaacatgtttgatggcaagtctactgccatctccaataatgatgtgttccttaccattatactccattttgttgttgagtttcttggattcaggggtaaggtgattagtggcaccactatccgcgtaccagctatcatcattcaaggtttgaggagtagcaacaagagcagttggttgagcatgtttatcttgactttaaatgttttcagactgtggtggctgacccatgcatgtacccttcatcatatctattaggggtgtacatcaaaccgctcaaaccgcccgcaccgcaccacaccgcaaaaaaaaaatacggtttgaaattcttcgcgg

SEQ ID NO: 325464 - DNA, 2856 bp, Cannabis indica
agggcataaaacccaacaccaaggcctatgttaaaaaatgtgacaaatgccagagattttcacagatgcaaagtccatggccttttgccatttgggaaattgacctgatcggacaattacccaagggcaaaggtggagtgaagtatgcagttgttgcagttgattactttactaagtggacggaagccgagccactggcaaccattacatccaaaaaagttcaagactttgttgtgaagaacataatctgccggtttggattgctgtacaaaataatctgggaaaatggccaacactttgacagccagtccttcattgatttttgtgcgaaccatggtatcatcaaaagcttctccgcagtggcgcatcgccaagcaaatcgtcaagttgaagcagtcacaagacattgaaggatacaataaagaaaagacttaaggacgctaaaggaaactggccggaggaacttcctgaagttttgtggtcgcaccgaacaactgagaaaatggcaaccggatagactccatttgccatggcatatggatatgaagaaatgctacccgtagaactcgagccaccatcccacagaagattgacgtatagccaagaagcaaatcacgtactccttgccgattcacttgatgaaatcgaagagaagcaaaccacaacaaacgtaaagttgatggcccatcagcaaaaagtagctcagtatttcaagaaacaagttaaggctcagaatttttttgtgggagatatggtcttaagaggagtatttcgaaacagtgaagacaggacgacaggtgtactcagacctaattgggaaggaccatataaggtggtcaatgttctcgaatcaggagtatacaaattgggtaagtatgatgaaaaaatgaaactcgttctggtaccaaggtattggaatggggaacatttaagaaaatactaccaatagaagtaccaggttggatgaccatatcaagtaccaaacgaaaagaacatttactcttaagtgaatggcctcctgtgcagaccacgcccaaaggtttgggtaaaattacaaagtactcaggttggatgaccaccatctaaagtacaagttttaatttttgcaatttgttttatttcatgttaagctaaagatcagattagaccaaatatatttgatgtaagttacttcgataacaaacacatttttgatcaataaataaataaatatttttatttcaaaattcaaatcgagtcaaatttattagcatgatattaatttaccatccagtgcgtacaaaaggtttggtcaaacccaaaaccccgaacagaaaaaagcgcataattgcaaaaaattataagtgaccaagaatcataagtctactcggtcacttggggggcacctatacctgtacaaagtatttggtaaaataaaacaaacacagttgcatgacgattataaacagatgatgaaattcataaaagacaacaaaagcatgtaaaaacgggattaaaggctgcccggtcagcctgttgtctaaaaaatgaaaaataattctaagtttaaagaccgcttggctggtccctttgtcttaaaaaaaaggccttatggccggacatatattaaaaaaagatagaaagaagaagtattcaaatggctagagtcccaggctctttgtacgggtcttcttggtcggttggagctggaggatcagttgtttgagcggggggcatgtcgacattctaactggaggtagaagtggtcggctcaaattctctataagccacctgtgaaacgcaatactcgagcaactagtctttggaatcgcccaattaatcgaagtttgccttgggattagccttccagaagtcataaaaaatcttgagacccactgtctctaaggcattcaccttccctccaagcctcgccacctctactttctgctgctcggcctctgacttgtacttctcaacctcagcttcaagctcctcctccttagacttcttctctgcttccaacctgcaaaaaacaactcgaagaatctccctttcttcttggaggctggtcacttctttcgacaaggaggcaatggcagcgtcaagttgatcagaagcctggagatctttagtcagctcggccaccttcttctcgacagcaagaagtttcttgttaacttatcccaattccattcggacggctccaagttgaaccttggcttcatcaacatccttcctggccaagtcaacttccgcccgcatggtgttggacatggcagcgttcttagagggagctgacttagctcaggaataagcatatgccatcttcagaccagtctgcgcagataaataacattaaaatctaagctaagtaatgaaggataagaggaaactgttaagattgacttaacctcgtaaactccttaaggactcctcccatcagtaactccagagaaaggtcgttatcagctccgccgagttgctcattcaccttagggaccgatcgagtcatgtagtaggtgagcatatctttgcctctcttagtctctggatgcagtactggaggtagggcaggggcccagatctgctcatatctactccagacaagctcagatctgcccttcaactgctcgggcctgtccgagctccctcctcaagagtctttggacttagtcacttttggggtagaatgtcaatgatggttggctcctcaaagagatcaataacttcttcgcccggtgccttttctctggacaaggttgtctcaccacccttagacttcttggtcgaaggagataagcctgagcttcctcccactctctttttcagagcttcgagcattttttgagacatttctgtacgaaatgaaagcaacat

SEQ ID NO: 325465 - DNA, 906 bp, Cannabis indica
tattcacatgaatgagtaaagctaaacttaaaattaaaatatattaatagaaaaagcaatttatatgttccactactctgtctagtaatttttacaattgttattttaaaaagcataaaatagaaagcgtgataaagtgaagaatgaaggctaaacttttatgtttgaaggaattaagcagcaaaaacatcaatccagttcaaacattaaaagaaaaatgaacgataaagaaacaagacaggctcaaaccacaagtaaaatatacatgagaaactgcttgtggaaactcttagctttaattaggagtaatctacaatgttgtctgtatcaccattttacatgaacgtaggttgtcgctgcagcaatgagcgttccaataacctccccattatattcatcaatatggtcttcaaaacgacgacgtaaaaccctgatcacaacacctcgatcaattgtgccataaaagcgagcaattttgaattgtccctacgtacacaagacaatttaccaaaaacatttatataagaactatattcaagtatacatattcagaatacttttggtagtacatacctcataatcatttcgtatgtttttgcctctgtaatacttcgtaagagtcggattaagaacatcaccaacagctgacacaatgaccacactactcgtctccacccgtatctgtgacgcaaacgatttgacttttcctatgatgtccttcataaccaaataccaaagtcagatagagaagtagtactgggttcgtttggaaagccgtattaggtcgtattatattgtattatattgaattgtattttatgcaatatttttatgtaaaactagatgtagtattaacttttatatatggacacctaaatatataatattttagtataaattaaagtt

SEQ ID NO: 325466 - DNA, 643 bp, Cannabis indica
taaaaaaaaaaatattgttatttgacattagtggtgtccaacaccttttactgaaggcagtttgtctattttcttctagatgcgagcactgacacgaccaaatagtagctttcggctgtgcattgtcctgaactcctaagggtgtgtttttactcgttttttttatggtgagttatattttggggtcctgggatcctaaaacctattttaacgtttaaaatcctaatggaagaccattgccaccagtcgagaccgaaaagtggcaatggtcgaccatggcttatgggaagccttagatggtgtttcttgcttattccagtcatatgaatgctagaaaactaatttggccacattggttcttggccaattggttaagagagcactggcatccttttggccaaaaagataacagtggtcgcatgtgagggttggtgactttttttatgagtatttgatatgtagaagttggaaatatactttggccaaaaaaactcatcattctatgttgtggccgaccactgccatcatttgtgccaaaaaaatggcagtggtcgaccaagtggtttaccatttgatggcttttctcgcttgattttgacatgttagtgatgaaaaagtacttttggcaaaaaaaaaaaaaaaa

SEQ ID NO: 325467 - DNA, 881 bp, Cannabis indica
agagagagagagagagagtattgacgatttggagcgtttgcggggttttgatttataaggaagagtgagatagaaacgacgtcgcaggaagagggtgtgggatcggtttaaaataaatttcgaacgttttaatgccgagcggcggaagattccagttcctactttactttttctaggaagttcaacggctagttaccgttgctatcatgcgctaagtgcgctcaacttaccctctttccacttttatcattttgttggaaccaagcatagcaacttaatattccctacctaagagaatggggcgagaacaaagataattttttattaatgtttaattttttattcattttataatatacttttaattataacatatatctcgtgattgtagttgattagtaaacttttaaacatatattttgaataaaaatatatttttttttaatttttctttgaaatatttccacttttgttataaattataattgtttataacaacaaagaaaatgagactggaaatatcactcatccagcaaacatcatcatccaactctaaaacatattttgctaaactatgcgcagtttagtttgcatttctcttaacatgagaaataataacttcaaaaaaaaaagataaaagacaacaaatatctataattaaattagtaaaactagataaatccataaatgtagagtttagagctgtagaaactcttagagcatctcagtctatatgagtgaaaaatcgagtttttgtacatgccaataattattacagaaatatactgtatataaaattgtatacgtttgtagcagcagaaagtaattctgatactgcagaaactaattttgcagagacaaaacagattaggcagaatata

SEQ ID NO: 325468 - DNA, 932 bp, Cannabis indica
aaccccttaacgatcaggtaaactactaacagaagttttagaaatataacttaagtatcattaccgtcaaaaattaaatctaagtatatatttacaactgaaaattaaatttaagtatttacgctgcaaaactacataaacattagacagtcaaaacctacatgtaattacatgatttatctaacacttaaccttataaacctaatttttttacggtaaaatccttcaaaatccccattctgttttgctatttactattccatctaaaagcttatgttaagtgtcacaatgaactacatagatgataattttttagtggtccatctctaatgtatatttcccccattaggggcagatcccgcagggctctatctccatggggaaatgcgcatttcaactttatagcatttatacaaatttttagaatgatatttatctctctttactggtatataacttaatattttatcacttaatatgtccacctcatcaaatattctctaaatttttactattagagatgctcttagtaattaaaaatgagaactagtgttataaagaaattaaaatcagaagactaattttttttaattaagactaactattatgtacaatgagggacctgttgacaaataaacttttaatttagggcagttaataaatatgagcctctaatcttccaaagagaatcagctctctctggctacgagccacttcacaggtggaagagattctaggtacggaaccgctgaataaaagacacgtgtcactaagaatatttgcttaaacaggctcggctcatagaatgtagcctagccgccaagccgagtttatttatcgtccccaactttgagtttgagcctatttattaattaatataaaataaaattcaattaaataatattggaaagaaagagattagataacagcaa

SEQ ID NO: 325469 - DNA, 788 bp, Cannabis indica
tttaatttttaattcttttaaaagaaaatatgatgtaaaaatatgcctactgtacattgaaccatttattttattttacttttgttttgttttactattttgttattttttttccttttatgatattaaataattaagtcacacttaatcacaatcaaacccttaagaacatctccaattgtaacatcttttaaagatgttaaaaatctacacatcatttaaaaatataatattttattttatctctcttccatattatttttggcactcttacttctaaaaacactcaaatgtgtaacactctttaaaaatactataattatgatctcacagaatattatttaatatatatcttaatttttagctacaatatttttttaattttaattttttataaaaaaataaatagcatcaatactacaacatagcatctatgtaaatttttagaataacatttttttcttttcaatagtatagcaacttaatattttactatatactatatctacctcactacacatcctctaaatttttaccattaaaaatgttctaggtagaaatgagagataaaagctagtgtaggacttgaaagtgctggacacacaaatccacgggcatatatgaatatgtacaattataatacaagaatatggttaaattaattaaaatataagattgacgttaattgttttatcaaaaaaaaaaaaatacactggcgttaattcataacatcggtaatatatatattattttttttttgactaaaatgattagaatcactcatgaat

SEQ ID NO: 325470 - DNA, 967 bp, Cannabis indica
ggtaaaataaatttccaacattgttttgcttgccaccgatgttggctctctttcctctattcaaacctccatttttcacactgctctgcgcctcagtagcaggggctttagtgtttggtgacttcttcttaccaccatttgagccctttgcttgggtgatgactttttcaaatttgataaagccatatgctctatctaagaagtcatccatggtgtatactgccttgagacgaaggtcggaccacagaggattcatttccttgagcctagctatgagtgtcataacccttttatctttgctaagacttttggtcttagcgattgcctctaagaactattggatgtagtccttaaggggctcgtcttcctgttgcttgacatccaccaaatcattaggctcgatctagcgttgtcaggaaggagcacactggttgctgaaagcatccactagatctttttatgagtcgattgatctaggggagcttaaggtaccaccattgtgctaggtctatcagttttgtagggaagattctacacctgacatcgtctctcacaccttgcatattggttttcactttgaagtaatggatgtgagatagtggattcagacaacttatgtgtcgtgatccccttcactaaagcagctaaggtgtcgaattctgcccaattgaccccatgagtggtagtctgcttcccagatggagcttctgttacccagatagggtcttttttagaagttcccacgttcatcattcttctcttgttcaagaggtcacatagttctctttgtcttccaagttgatcatgtactccagtcgacctgggtcttgtagtagtctcctgaccacggggtcgtgaaggcaactctagtgagacctccgaaatgaactcaagattgtcttgggacgacccactgtgagagtgttcattcagagaattgtagtggctactgttggaaattatttta

SEQ ID NO: 325471 - DNA, 901 bp, Cannabis indica
gcatactctgtcaccgtcatattaccctggatcaatcgtataaattcttctgcctttgcagctcggatggatttgttgtagtgtttctcgtaaaatagggtacggaaagcatcccaggtcatgttattcaagtcacgaccctgtgatacaatttcccaccagatgtgagtatcctctcgcaacatgtaaatggcatacctaacacgatcattactctcgacccacatgaaatcaaagatggattgtaatcatactcatccattgcttcaccttaagtggatcagcaccaccctcgaacactagcggatttcactttctgaactgctcgtacagtggctccagacgatttcttgcattatgtggcactaccagaggtgccggaggttcaggattaggatttggagcaagctaagctcgctgctccctcagctctcgaatttgatcactttgataccggatggtctcttgcatcgcggcatataactcttcccaattcaatggtggtggaggctcctcaccctcaccgccaaccccaagcccaacaagctcgcgattacccctaccagatcgcctcgagtgcatgaactatacacctgcgaccataactttcatatatctcaaatcatgacaatacaatactaataagtatttccatgtattcacatacacatcagtatttactatacttttctaactaacatatttcaaataagtaggtaatcaggtaataaacaaataatctaacaattaacacttactgaaccatgagtcgaatgagtcttcacagccaatgtacatatcaaaccagtcttcaggatctttaaaccttagtcgctctgataccatgttgtaacgtattgtcccacaaggacgccacatgtgttattacaaacttattttt

SEQ ID NO: 325472 - DNA, 936 bp, Cannabis indica
aattatattaaaaattagaaaaggaaagatcaactagaccaatatatatataattatttttggtcaattgttctaatggctaattggtagtactctctttaactcttatatatatatatatatctttctttagacaattatttgtgtttgaatcccagtttcatggcatgaaatatagctaattaattaagtatgaattttaaattgatcaatccatatgcattatctccactaattattatatataaattattttttaacttttaaaaaataactataattaaatgtccattttaaaactattaatgtttgaaaatgaaattttaattcaattactatttcgggttgcaacactcctgcccaacagcaggtaaaagcttccactaatgcgtcagtttcatccctaatcacccctgtaaagctataagttgcagttcctgaaaaaatggcagcatctacattaatcttcagggtgttttcagctagtttggcccaagtttcagcaccatcgacatcagtaaggaatgcagccgtaggattaaatgttgaatcttgagccgagtccaatctgcgagtaaagcttgagctaagtgagcaacactcgcaaaaataggggacttatcagaccataatagctcatttcgatgttccaaatttcccaacatgtcattgcgatcaacctccttttctccccatctgcctgctgtagaaccgtagcaaaccagttggcaaaggaaccaactaccgtcaaattaacaccagcagccaactgttgccaatacgctttggcaaaagagcaatccaccaaggaatggtagatggtttcatcagttactttgcacactgggcagatggtatcaacaggcacatgtctataacgaagtctgaatttcgtaggcagacagttagtgacagtacgccataacaagtctttca

SEQ ID NO: 325473 - DNA, 1025 bp, Cannabis indica
tgtgcgactgctcctcgggaaaacgtcttcaagctctgaatctccggcgaagcttccagcgtccacgcctcgtcttttccgactccggcgacgacttccgtggtggattcggctccgtcactgcccacaacgtgatcggccttggaatcggcgatgaaatccatcccaatgccgccaccagcagttcatctctcttctccacctccggcgaagacccctctgttggttcgactccgtccccgccagcaacgagatcggccttggcaccacctgcgacaccaccagcagttcttcttcctccaccgctcgcactaacagcggttcttctttcttctccggcgtcgacttcatcggcgttttcttctttggccgtgtgtcttcttttcctccaacattccggttcatctctgatgctgttcgttgctgctgtgcgagcgaaccccatgggccaacttccagatccggcaccgtctcccacaccgcctttctttccggcgatggcaccagggacgctatctccttcgacgtaatcacctgaaccactgtcttgtagttcttctcggatgtcgttcgttgccgaggtgcgatcgaattccatggaacaacttccagatctggcgccgttcccaacacgtacttctgctcagacgactccaccagcagccgcacctcttccttcctcctttcaggcgacgaatctcgttgctgagttttctctagccatttatcttcttctccatcggagatgatcttcgcaacatcgaaaatctcaggtgatgccgccgaaggcagagagtcttcatttaggaactccgattgtattgctacctgctgtttgtgtttgctgaaactgtcgagtctagcaaaggctcgtttgtgttcccgtattgccatttccatcttttcatcacattcatcctccgtctctagtggtgaaggagatccagaaggtagattcggcgcgtagcagttccgtattccttcttgtttgcgaacccgacagattgcacagcttggtggatcca

SEQ ID NO: 325474 - DNA, 1242 bp, Cannabis indica
tttttttttctcaaaatgtatatttttatatctcgtttttttttttaactcttttatactctctcacaaattttatgtttcaatgctttgaaagtatgtgtcatattcatctcatattttgagttacgaagctttgaaacttcaaccagatcttttgtatgaggaacaactagtgaaaatattcgatagaagagagaaagttttgaggaacaagacactggtgttagtcaaagtattgtggagaaatagcaaggtcaaagaggcagcctgggagttagaatctgatatgaaacaaaaatatcttgagttattcagatagattttgggacgaaatttctataaggaggggataattgtaatatcttgagattagtatgagttatgtgcttaatgcaataacatgaaatgtatatttgattatatgatgatatgagtatgtttgtggtgtgaaaggacagaagtacccttattcactattataattgatttatagccctaggagcaaaatggtgttttgaccactttttcctattaagtaaaaatttaattttatggctaagtgtgaaatgagagactcattttctggtttgagtctcactaccgaccactcctctctctgtcattcaactttgatttttgaactttgaagatttgtaagccaatttttgttggattggtgtttgagctttgaagtataaaacaagtgtagtagtttcactctttttacttcttgatcttaatttgtttaaaataattgattttacacttgaaacgagttttatttgagctgaattgcatgtaaatattgtgagatgatcttgaattggtttgatgatatttcttttttgctttaaaactaagaaatagtcgattgttgtatggttgagcatgaagctgaattacaggtcagatactaattggtgttgttgttgtttgaatgttatattgcagagtttgagcataactttcttatgattctcttctttgactctatgacatgaattttaaggtttttgagtcttgttgatgatgaatgcatgcttataggtttcatgagtttagctatgattagttgttggaagaaatgtacctagtatgctttattttgatgcatgaactatttgtaacggtatgctatgaaatatcacttatacgtggctaagtattttaaggataaaatacattgaagagtgtaacggtaaattaatccctatacaatgtagatcatctatagaggatcat

SEQ ID NO: 325475 - DNA, 695 bp, Cannabis indica
gggcacaaaacccaacaatgttttcgttgggtatttcagtttgtattttttgtcggtttatatcagtttggtttggacgggttattcgggttggacagtttacaaaagtttatgtacaaccctaattaatagtgctctttggaagccggaagacactcattatacatgtcggaatagcttggacaataacttttattaacacctcttttcctacagccgagaacaataatcctttccacccttttaatttattccacacccgatttttgatcacatcaaaaagctacctcttagttcttttcacaaaagatggaagtcctaaatacttaccatagctttcaactacctgaacatcctgttaagaatactgtaaaacttaatatagccctaattaattcatgagaatcaaacaataagattaaggaatagcggaagtgtaccggagtccatagaatcgattttgtaataacctttgattggtatgatcttccaatttttgcatcaaaaccttctctctggaacttgagttttcttgatgatgggaattcaagaatacgatatgaagcgatgcaaaaaatggggaccaatacctgtttaaattaatcctttttgactacttccaatttggcccctcatcaaattagaaattatctaattggtatccacatactaaaatcatgataatcatgccctta

SEQ ID NO: 325476 - DNA, 2440 bp, Cannabis indica
gggttgaaaaggaaaaatgtagtttttagggtttagaaaaagaagggaatagaaataaaaggaaggtataagagatattattattataagtagtttttttggggaaattgaaattcaattgcgcacgaaatgaaaatttaggggtttaggcgggaatttaaatttcatgccacgtcatcaatcctcgtacttatttcttattggtccattcttcttcttcttttttggccagtcttttctttccttttgtgtttcctttgtgcctggtttctctcgttctttttctttctattgtactgtagttctttttttccaaaaatatttatcattttcttttaactatttttaaactcttattttttatttattgtataatatgaatttgttggtcttaataaatgtatgtaatgaattatctttattcgaaaaatgtaataagataatagttatgtttctttcttttggattgttttcaagaatatttatattatattttaactatttttttttatttaaggcattatttttttactatgaattacttcatcttttttattttgactttgttgggtttaaaaaacatgtataataaattatcttttaaaatacaataacttatagttattgttctttttgtttctctattagtaatttgtattattgtgtcgtgtttgtgttaacatatttataatacgacacaaaacgacataatgaattagcatgtcacacaacaagcgacaatatatttataacaatttttagaaaataataataaaaaacttatgaaaaataattcgtgtcattgtatcatgacacgacacgattataaaatgtgaatacgactatagcatgacacgattatggtaaatactaacacaacagaattattaaatgtattaaaaactcaaacgcaaatgcgacacgagtattaaatgtgtcacccaaacccatttattttgtatcgcctttaagttgtctcatcgtgtcctgacacatcttgccaatctttcatttacgttatttttcaaaaatatttattttattctatttaaccatttttcactccatttttaattttgtacttgttggttttttataaatctatatataataaattatctcttaataaactagttcatttttttccacacttctcttctttatcagattgtttttcaaatattttttgacattttatttgaactttttttattttaattttttcggttataatatatgaatatgataaattacatctatttctattagtttttatagaatttgttcggatttattgtctagaatttctcccaaaatacgtggcaattctggagaaagccacgtggcgataggacccacactacggagcgcgcaatctagattacccctagagcttaatgttacaaaaggataatgacaaactggtcatcttcgagaggtgctaactagacaatgggcattcgctgcttcttcctctccgcgagtgaattcgacctggagaaaggtacgagaggacaggcgaagtataaacattactcgaggctaaaaacacagtatgtgcatttaatgcagtatgtggaagagcatccgacactttacactgaacaaacgtgcttaagagtttaaactcgtaattctctgattttacaagacctcatacatcaattgacggctgcataaatgaaatgtctaatcataattaagagatgagtcaagtctcatcaaacacctatagacaacctaaatatatcatggaaagtaggcatcatgccctaagatcatttttattttggaaattgtgcaaagcatgactcatgtaaacacgataagagtggccttttaccaccattatgagactataaatatcccaatgatgtataaaaaatcaatcaaaaaattatatgtaatgaatactcctcgttaatacagtgactcgtggattaaggttcattaatgctccaaccacgtaaaaatcttttcttctaccattcattaactacttcacacagctctaattatttgctgccaacaaccttggtcaatatttcggtgctttcattgagagttgtaggaagctcctaaacataaaatcataaataaccttgtggtacgatggtgatgacaagaaacacttcacgtccacaataacctaacgaccaaaagacccaggagaagaagaggcagcgtctagggtggacgctgaaagagaaggagacaccaatgacctcgaggatacaaaccaagaagaatatgaagaatacgataaagacaactacacgaaactagttgagctaaggcaaaggtttgctgaccatgagattgttgtcgtcaaaagtgagtgttttaatatttatactcgcaagtgcacgaatcatttcgaaatatagtgttcatgtaagtgcaaggtcaaactcatgggagttgactaacatcaaaagaa

SEQ ID NO: 325477 - DNA, 2166 bp, Cannabis indica
tactttgtgagttttgaaaaattctcataaacacaataataattctgttatctttgtgcaacgttgctcaagtaatgccgtagcaaatctgtagcaattggaaaaatcctgactaagggggattagttattcaagtcacttttttaactatattacatttcttacaagcaattttctagtgacattagcattattttagtcaagtttaattatagtcattttaaatttgaatcattgctcaaccattctcatatcttcccttttactttaagttgtaattagtttgttttacatcatattttatttgcaatccctgtggagacgatcttatttaccactttattacttgtgtgactgcgtatatatatgtcatatatacattaatcatacataatataaaagattgtaacattcctgtttcaagtttttattgggctcttacacccacagaatgatgacttttatacacgactatgccactttagttgctttatggaatgaagctgacctgtagaccaacacgagtattttcagcgtactttgtcctcactcacacgttttttgggaaaactttccaagaggtgacccatcttgaaattaccctaggtcaagcacgcttaactatggaagtcctttggaatggactaccagaaaataagatgcaccttgtttatatatgtagtactaatcaatccattaaagccctcttcaactatcttcaactatatagtctcatacctacacagtctcaaaatcattacacttacctttcccatgcaatgtgggattgcacaacttaccggataatttccttttacggatcacgggactaccacacgcataagaaaaaacagtcgcacgcgttacaaaatacttaaacttatttttcgatattataaactatatagtcagaatttttttaaaaagtttacatatgattctaaataactataacgtccaatgtgattaaaaaaattagactaaaaagttttattttaatgacaaaatagataaggattatgtataaacaactctttaaggagtgtaatatagacataatatccaaaactaaaaatgatttaaagtgtttttaattttaaaaagaccaattaggatttttgttccttgaattttgacatgtactaaattattccctttgaagttttctggctgttgaaaatttccctgaattattgagattgctgaatttaaggacttttatctaattttcattcaattttactaattcaatgaatgctgcccaaactttgatatttaacaaatcatgcatgcctctttgactttaaaatgtgtcaaattatggcccctgaatatttatttatgttagattttttttttactaaataagataaaaatctatgaatccaataattttaatagttcagtagaagtttttaacggtctgaaaagttcaaaaaacatgatttagtacatatcaaaattcgaaagacaaaaattctaattaacattttaaaaattatatggtacgtaaatttctgaaacaaagaagaaacacaataataacaaaggtcacttccacatttatttttgaagccaagtcaagttatatttgcagccacaaccacaaacattttggccaatcacacataaattaaagcaagcaagctatataaatatatgtatatatttatagctagcatagatcacagtatgaaggttcttatgatcaattagaaaccttattgaaaatgtagatactcttaattaatacatgaaacacaaaccaaacaacgtacgtacatatgtatgaatgttacatatgtgtgtggaagtagacctgcacgtacgtgtgcttctggtagtagctaggatcgtcgtcgtggtggattctgaaatatcacaaaaaaagaaaaaaattaaaagtaataccaaagtcaaatagtagctaattaatattaacccagccacgtggccatgctacatgagtggtaaagtcttataaaaaagaaatattatgggacaggtacccaacattacaagaacttcaatacgtgctgttgggaggaaaaaaatgttacaaaagaactgttgagaagacaagaataatgatactcttgacaaagctcatagtgtccttgttcttggtcaaagtgattcttgattcaaaaaatagagaaaacaaga

SEQ ID NO: 325478 - DNA, 1226 bp, Cannabis indica
caagtagtgaaggcaagtgatgatgtaaaatgtctcttttttcattaaatttatcaaaatatgtcgaagattagtggaacagattatctcctagatccatttgtaactggaaagatctgcaaatgatgttcaaaaatagtttaaagtcgtaaaagattatgacatggaggtaaccttgttgaccaatataaaacaaaaattgggagaaagtctaaaaaattatatccaaatgatgatggacgaaatagccaaaacaaaggtcaacgatgaaatgaagttggtggccttaattttagaaatatgtaccagatccctgttttatggggagatttgtaaataaaaagatctgatactttgttagatttctactccagaactcaaggcttcataaatttggaaaaagcttatgttcatgcttatgaagtacctctagaattattaacaactgtcagtagttcaactctgactctctaatttcctgctctaactaattctcctccaattgtgtattcttgactcaacagtgtacagacccaatgtcttaggaaaaacttccacacaaactagttacattggctttggggttgcacaaacttgatgtagtgttgcctcaagacaaatgagtcaacaaacgggtgttctagaatcaaatgtgagtcatttcaggaacaaaagaagtactaagaatctgagttaggctaaagctccaaagaaggggaggactcatgaactaagatattttgagtatactagctttgtggatacttggaaaaatgtttatagagaaacttacaacatggtccattgaaagaagccactgcttatgtacaaaggtggaaggcacaaaaggaatcaaaacaaaaaatgtgaataccataacaatgttaggcacactacaaatgagtgtgattacctaaaagatgaaatcaatggattggtaaggaatggtcattaatcctaatccaattggatatggatcctaatcatctatcctggacaggttttggcttatggtgctgacacgtgtaatgaagctggataatgaaccagtctgaattatacgataataaatatatttagacaacttgcctcagaaagtacagttagtagtaatattcgaacaacctcctaaagacaacgacaagccatgaataataactactgactgatgagaccagcaagatgaacgaaaaacaaagaaggtccatctcgggatacacagaata

SEQ ID NO: 325479 - DNA, 678 bp, Cannabis indica
tgttattggtggtattcttaatggcaaattttcttcccattacaacggtttttttttcaaataaaaaaaacaaatactgatgacaaagtcatcattaataatgtatgccgccattaataaattattctataaagaaatatacatttttattaaaaacaacattcgaatgacgttggtcatactcatatttttagtgaggactttaattatgtcgtcaatcatagtgtcattggtgatgcttattattcttgtagtaatgtagagcacttatgctatcaaaatatttctatgctttcatcaagatttgttaagaaactcacctggccaactccttatgatcttaatattcttaaaagtgatataacaaaaaaagaagtaggctattaccataattacggggtgaaacatctaaaaaatttcttgtgttcttattgttaattattattattcgtagattcatcgccttaaagactcataattgttggctaaaagggagatcaatatattcaaatattttataaaaatttacaaaagtttatataaataattataacgtacaaaatctgttgggttttgtgccataaataaaactcatttcaatataatcagatttaataattaataaagatgagaaattcaaatgatttatttgattattatatttaatgtataaattct

SEQ ID NO: 325480 - DNA, 622 bp, Cannabis indica
aagttatagctgaatccaatcccgaattcagcatcatttatgacaacttttgccggcgcaattggtcaactgcgccggtaaaactagggtttcttgtagtgcaaacctaaactcaaatctctctcttattcttattctttggcttggtctccgttcaagactactaaattgggtaccaatgaaactgttaagtttagaaatttgaaaatttatgctactatttttcgaatttcgatatttattagcaacaaatttaatattttaagtatttatgtcgcaaattttttagtagtaaagttaaaattttaaaataattttactaagtaattattattaattaaaatacataatttattttttatatgtaatttaatatattttatacatccgccgcaaaacgtgggatcgatgtttactagatataattaaataagttcgctaccaatctcagatattttgatttctaaatttaatttttaagtattcatattttattcgagaatgtatttgttagttttaagtaagattattaactacaaacaaattatcactacgaaaaatgttatttttagtgacaatttttagtcacaacataatttttttgtgactatatgtgattttt

SEQ ID NO: 325481 - DNA, 1802 bp, Cannabis indica
tgttctatgttatatacaaatagatcttgggttaattgttaatttatctaacacatcatgatcaagatgaggtaaattattcattttcttacaaatgtgtttgttgtatatacaccatacgaacacttgatgatttgaggacgagtctaaattagaatcatcaaaatgagcagctttttggctttgtagagttgaacagaaatgcaaatttcgaccattcttggccttcagattgtattcgcattttaagtccaacacatcttcatcacctcttaaaatggtgggatcatcaaactcaacaacaatgcataaaccaaatcctaagaagttgcgaagatcttctgaagagggaaaaggtaagtttagttcaagtgatgatcccatagtttgatgggtaaaccattgagtaattgtatctcctgaaaaacaaaaacttggtccactcaaatcctacaatatatgaaaaaaaaaagtcaattatgtaaatattaatggtgaaaaaactatactattgaaatttaattctatatatcaaggaatttaagtaagagagatatacctttttttctctaagactatacgttacactgaaaatgttatgcatgaaatattgggtagccaaaatgtgacgtatggcgtagaatagaaagcactgacaacaagtgaaatgaacaccatcataatcaaaattcacacttgctgtagaagtacaactacttctgcacatatacggttgatcatgtgttagtagtagttgaccagaagtggtttcacttgaatcttctaatgggaaccagggaaaaccattatataacagaatttggagttttggataatcatcaatccagatatcgcgaatgtcgcacatattgaagatggtggttggaatagacttgagatttttacaaaaagggaggtaaaaattttcaagcaaaacaagattctctattcatgatgatatctcttcaatcccagttccatataaactaaggttctttagtttctccataggctccaagatttctggaaagcttttcaattgtgaacaaccttgaagactaagttcccgaagagactttaacttacaaatggaagttggaatagacttgagatttttacaccatctcaagtctaggcattcaagcacaactagattctctattgatgatggcatctcttcaattccagttccatttaaaataagatccatcaaattctccataggctctaagatttctggaaagcttttcaattgtgagcaatctttaagatcaagtacttgaagagacttcaacttagaaatggtagctgcagggagtttgtcaaaggatacacatccacccatatataagaattccaatgattctaactcacaaatagcattcggatcaagttcccttaaatgttcacactcacttagatcaagtacaagaagatttttgagagagaaaatggatgggtgcaattccttgattgctgttttacttagacatataaattttatattaccagaaatcagtgaaagagttgtgagattggagcacccattaagatcaagcaagttagtagataactccctcaccaggttggatatcctttcataccttgaagaaacagcttcgtcaatcccaattgcaacatatccattttccattataaattgaaccatcgaagaattatatttatgcatcacttcagattcttttttcttggatcatctaaaatgttgtgaaatcttaacgggggaaagattaactaaacttgtacaaccatctagacgaagcatgtaaagatttgcttga

SEQ ID NO: 325482 - DNA, 960 bp, Cannabis indica
tccgagtatgcatgtgagcaaaaatgtaaaatataatatgttaaataaaaaaataatttttgaaaatagaaaataacatttttgatgttttctgttttctaatttttaaaaaaattggcaaaacgacatttattagttttttataattgttctattttaaaaaattaaaaataatttttaaattacgaagtcaaacaacttctatatgttaaatacattcgtggatgtgtgaacaaataggttttcactttcattagttcatccttatatattttacacaaggatcgttacttacatttctatttattttggcatttttgaaaactttctagtctaattttggtatgacggtacatatttttcacataatgaataactcatgtaaaataataaactgtaaatgaagaaagtaaatgataataacattaaaaaatgacataaaagaatagaatatttgagctgctaaagtctgcaacatcattaagattgtgggggtctatcattgaaaccacagctacctcttgtcttaatcaagattttgaaaagaaaagaaaaaatgtaaataatggaatcactttttttatttatttatttttgtttaaggtgaacttgtcaaaaagtatgaaaaaaccacttctccttctcttctacaaagaccaacataatatcttgattcttatatatctattcctattaatttattacctctctttaaaaccaagacaataacctcagagaaagaaaagaacaataaaaatagaaactttaaattacttgaaaaagacagtcaattggtcaatgacctgttgttttccataagcaatactctgacctggcaatgaaagaaacctgagatgagtaaacattaaaaatgttaataataaaaccaagttcttattatatatgtattgggaagaggtttcaatggttatatttttattgtaaccattatagttacat

SEQ ID NO: 325483 - DNA, 529 bp, Cannabis indica
gggtccattcgtctttcatacaactccatctgtggcattctaaagcattccagtagtggcgcttctatgatcctcttcacacatggcttcgtgtcttcttcctcagaatatgacacggtgccactttattttctagaaaccttctctgtgatcttcatcaactcctcgactttgcattctaagtgttaagtcttgtcacttgaagattctcttctagtaacgcaattgttgatgtggtttctcaaatcattctcacaaggtctaactttttatgctttagctctttcttttttctcatttggtcttcttcaaagatcagttgtggagagacttctactgctgtcgtctaatacatgatatatctcatcgatgtcatcattgactgagttgatgcttctccttctgggcctctagcttccgtattccgatgtcagtcttatttttctacgtgactttgcctctagaattggtctagtcaccataccttgaagcgtggtttcctttcctcttctattgaggttggtcagca

SEQ ID NO: 325484 - DNA, 499 bp, Cannabis indica
aaagatggtttataccagcttggagagtcatcaaattctgtcgttcagtgtcatcttaccacaagctctagggtagataattcttgttgtacctgttcttgtatttgtcattctaatgtacaaacaacttcttgtaattctcaagaaatcaataaaaatacccaagttgttttgagtgtttctccacaagcttactctacttccaaattttctgatgtgaataattggcatttaaaattggggcatcctgttgagaacactttggcaagactcttaccccatatttctcatacaggatccataaaagcattacaattttgcattgcatgccatcaaggcaaaagccataagttgccttttcctttgtccaccagtagggccacccaatccttagctctcattcacactgatttgtggggtccttcccatgttgtgtcaaaagatggtttcaaatactatgttcattttcttgatgattatagtaggtactgttggattt

SEQ ID NO: 325485 - DNA, 1250 bp, Cannabis indica
aggttgatagtcaattttctgagtctaggttgcggcagcgggacccgctctgggtaagccagagcttatttcataactcccttagcggtaaaatttgaggtcgataatttcataattgcgattaaaatgtgatacatgacttgatagagcattgaaatactttcaaaatgcaagttgaattgcattaatcaaattaatattgagtgagttatgaccattttactgaaagcagttcataacccagtgcctaggttgacatcccagcgcccaagttgacatatgacatccatttggacactaggtgagtggggaaacgtccttaggatgtacttttttttatgtctcagtgatattttgacatcacttagcctattttcgtgttttggcgaagctggttattagttcttggagatgttgctgttttacagaaatgagagagtcaaaacttttcattttcgagtggtttttcccatgttggaaatgagatatgtgaagttgtgaatttaacttctttgatttcatgaattttagttattgtgaaaaactagacgaacggtcgaaatggaataaaattcggataagcagaacccaacgcaccaggccatttgtcaacctgcacgttgggtacttattttggagcttacgggatgtttttttttttgctaaatacccaaacttcattaagccgagcttccgggatgttgtttatgattttttcaccaagcaatgacttaaatgtgaagaaaagaggttttaaggtttatttgttaattaagagactttgtagagtctaattaataaataagttcaatgataattttatttgataattaattataattattacattaatagttttggtgtttataggattaaaattgaaaaatatgatatttgttaaataaaagataaatggttaaaaaaaatggcaaaagtatagctagtggggcctgtctatatggccgaccattatagggttatttttgctattattttatcattttttattccatataatttaaatcctaactctaggtgaatagtataaaataaatgatggtctattatccaacaactcatatgacctctgtcagataactagagtttttgagagtcaccattctttcttcttctattttcataatctcttttattgttcttcaaaaattttgagcttatagtgaataagtgcatgcccacctatagcaagtctagtactcaatcatagtgtgtaagactgtgaagaatcc

SEQ ID NO: 325486 - DNA, 1298 bp, Cannabis indica
ggccgcccgtgatgcctccatggctggctggtgtcaattgtgtgttgattaggagtagatcacactagttgctagagtttggtggatcttgatgcctgaagtgattggtttcacctctcgaatcaccattatgggtgtttccacccagtcttggtcctcatcggtcgacgatcgatctctgtgaacctcgctcctccaagggaggaagtgctataccatggccagccatgggtactcctgttgatggctagtcggccagtggttgtacagtgggggttgctgttgagccagggatccttggtcgaccccccaagtcgttggttgctgagatctagctgttctccctgtttgacatttgatcaaaggcctgtcctccctctagcaggggaagatccatcctacttcctgaggagcttggcggtaatctcccttgaagtggatccctaaggatatcctagcctcttctatcggttctctaattgaactgtcttattagatcactggcctcccagttgcagctatctaattttgcctggtgagatcgaaggatgtactcctggtcatccatccatctcagaaatttacgtttctactgagcaaatacatcgcaattagcagtgtgtggttcttcagttaggcctacccagcctacagcttccccgagtctgaccaacttaaggtcttctcctaggttcaggtgaggctcgccaattgttgcttgcccactcccattcctatttctacagcatagaactagattcgaggtctagttgttgttttaggaggctgtcgcccctaggtccttccttcagtgggagccgtcaatggtagatctactactgaaggcgtgggcgcgccacttggatccaccgggatgctcacgtcaggctgtccagttgtggtggccaaacttgttgtgcttgttgtggttacggggttcaccacaactacaatattcatggggattccaattgtgactgaaagatgagtgtttagatctgcaatctgttggtcttaagggagaccttaaagatgtagaaggtgtagataggagttcttcttgtgttcaccatggcatttaatcaggtcacgatatccactctctcaatgaaagcaccaaactagtgaccctaaaaagtgatcaactgataatggggtcatacaaagctaatgctcgccacatgtgttcacaaataagaataagaaatgaaagagaacatgatttcttatacaggtttggcccccttttgatagcgggtcatgaactactcccttttagttgtattataccgagggaa

SEQ ID NO: 325487 - DNA, 928 bp, Cannabis indica
ttttctatattaaaacacttttagaatatatttagatctgtgatatttatatttcttaagtgtttacaaatgctaacattgatatgattatttttcaactccaaaattattagtgagaaatacagattcctttttgatattcatccaatcattcaatacaaaacaaatttatgtgtatatgtatttaattcaattttatattaatattatatgtatgtatgtttcgtttcgcatgaaaaacaaataaatatatatttaatgaatttagtgatatataacaccaccgagaaatttttaaccagaaaaaaaccaaaatatattcagttacgttattttttttttcttcaaaacaattcctatactgctactattttttgatttttcttaacaaaccatttaattctttttactaatcttacttggacaattaatgtgacttgtgagttttctcttttttatttcaatggtaacttaaagttttggggtgtatttaaaagatacccttttggtacacaaagtggggtgtaatcataaaaatataatattttaattaaaagatagggtaaatttagtaatggggtgtaaatataacttccgatcaaatatcactaagtttatataatgtactattcactctctacatatgagcaagttacattaatttatatcacttctatattattaaaataaattcgaacaatgcactattcaccctctacacgtcaacaaattacattagtttaagtttatctattatatatattatttaaatgaggaaagccttttctatcacatttaattaaaaaattttaagaatttttatgagagcattcacaataatttctctttattttttaagatacttcataaaaattttaattttcctattttacttacatatttatattatatcatacatcaactactt

SEQ ID NO: 325488 - DNA, 718 bp, Cannabis indica
tacgctatcttagagctagtttgtcggatttttaagtttattattaaccaaataaaaaagtaaaaaagaacgaatgtccaacaatagagaagtgtggccaaatcacaagaaagagatagaaaaaatcttagtcaactatagttagttactcagcgtcattgatgatgtagatcatagataattttttatcttcagaaagacgattaagaaaaattgagaatttgagttattggtaagtataatagagtggacgaaattggggtaggggttggctaagaagaatcgttgtactattaattaaagctaatttaaaaaattgttgcctgttatttaggcaacccttgtctaagtttctagaagtcatgagcatattggtaaaggcctttaatatctttggaatacaacactttacacaaggttgcttggagaaacgttaattaaagtgccttttttttttaattaatataaaaaataattaaaaaagaaatttttacaccaaaatacgaaatacacactttattacatatatatcttcacacggttaaacaatatttatacagattaactttattttattacacttttaccacttgcacacacaatccatgcatgcagccacacacgtcattgattgatgacttatatcaatcacaccttacatcattcccttatctttttcttttcttctttttttttttattattttcaatttcttttc

SEQ ID NO: 325489 - DNA, 1095 bp, Cannabis indica
atcataaaaatcgtaaaaatatttaaaattttgtacaactatatttttataatttttgtgtatttgtgaaataattccaaaataattcttgacattgattctaatttaataaagattgctttgcatgaatatttggtattaaaaataggataatattcatttttatggctttttttacttgaaagtagatgttggtaggatttatttttcataaatttacaaaatgatatatattattattccatatttttaatcatagttatatacacatattttaatttcaaaatcattttttttaatgtatgtcttcatatattgcttacttaaaccattttttatggtttttcctccctatttcttttttctttccttattttttttattgtttccttcatttttttttaaaaaatttttgttcttttcttttccttttcttcttcctacttattctattttcctttcttccatttattcatttttcttatttttttttttctttcacttaacattatataattatttaatttgtgtgagtgttttttattttttttaatccaatattgcttctattctactatgtataatttgttttaaaatatattttgcaatatatatgcacatatatatatataaatgttaaattaagtgattacttgattagttatctttcatgtcggtggaaattagacatcctataaaattttgagaaattcgaaataatttacaatataaatgttcaaactgtttatttcacacacgtgcaacaaactctttaaactctattttcagcgtgtaaattttttttttgaatttctcaaaattttaaaagatgtcataaataactacaacgtctacgatcataaattagaaaaacaataaaaatcgaataaattttttttctagataccaaaacaaataagggcgcatcggagaatacattgtagaatttccctttaaattaatggatcactttttcttacaaaatagaaaacatatatatcacttgtctctctctctgatccctttccctctctctcttatctctctttctcaaaagcacaaagtatggccaacttaatggtgggaggagctctt

SEQ ID NO: 325490 - DNA, 653 bp, Cannabis indica
cattttgacctttaaattatatttgattaaagaatggaattttgagtaattgaaaaggaattttctggtttctttttctccaaacccgaacctctctctctcttcaacctattcctaaattgaagaaattgctttgggaagctttgtttttggtggattcttggtgcttatgtgtgcaagggaatggaggtagtgttcctactgtttttaatttagaattcttgctaaaactataactgaaattgtgattttaaagctttagatatctttgtatgcatgaatttgatattggtgtgatcttgatacttcatgcttgtttgagtaggaaaattttgtgaaggatgtttatctggcattcttgatgtaatttgtgaattttttattgtatttttagttaagtcataattgtgatttttgctattattgaaggtgtgatttattgataagatgttgaagcttttaatgttagattcttggtgaatcatgctcaagtgtggagctttgaattctttattgcttaatctgaattatagggttatatttgttggattttaaggcttgaaagagtgtttttaagctccctgtatgatgattaaaatctatttgttggtttggaggttttgattaagttttggattgaattgggtgtgttt

SEQ ID NO: 325491 - DNA, 1076 bp, Cannabis indica
cgtttgttttttaattatttctttactttttgctaaacaaagtgtatttttgtaattttaaaattttactagcgcatttatgtaattaaaaattttaagctgtaatattgtaaataaaacataaaaagagagtaatttttaaaattctccaataatttattacacaattacataaaactcaaaataaataggcatgtgctacgagttgtttaaatcctaattttatttagcattaaattttttttgagaaaatcccaatctaatatagatcataggctttttgtaaatttatcttgaaaaggtaagtccatttcgctcttcttcttgtatgtacaagtgaaagaacaacttcggtaaataattagcattataaagtaattttaagggggtcttatgacaatcaaattggatatgcataaggcagatgataaaatagaatggtgcttcattcaaagggttctagaggccaatagtttcaacagtaaaagtcagagattgatcatgtcttctgttaaaagtgtagcgtgttcattgcttttaaatggatctccacttaaaaagattcatccacaaagaggattaagacaaggggaccctctttctccttttctttttcttctttgccaagaatgtctttccaagatcattcagaattgagaaagcaaaggccttagggatgtaaacggggcggggcgggtgcggggatcgctcccccacccccatacccgcttcttaaattcacccacatacccgtcccaatacccgtttaaattaaagcgggggcggggcgggtattacccgacggggggaaggatccccatcgggtacccattacatatatatttttgaaaaaaaaaatgatgtcttaaagagaattaaaaaaaaataatcaaaaaaacttagtaaaacaataaacttaagtggaataatgtgtatagtaaaaaaaaaatgtataatcaataaaaagcctaaagcatgaagttattttaattgtagtagttatgattttaaaatttaaatatatacatatatcatatcggggcaggttcggggcgggtatctattcccccgccccg

SEQ ID NO: 325492 - DNA, 919 bp, Cannabis indica
tggttaaactgattgtttaacactctccacatttcatgagcagtaataaaaatacatgatactactcttgatttcaggagaaaccgagtgtagtatccaagacattacaagccgataacccgtggcttccaagaattaagaaggggatcattatcagggggttgaggaagtgtaccttcaagaaagggtgtctcatttctagctctgatggagagcttgaagtctcttttccatgggatgaaattcttgacagaaagaacaggagtaacaagggataaacccggatgatcagtcgtgctgatgtagtatggagatcgaacatctttataggctggtctgtcgactggattgggacgatgaacaacagagaaaaaaggaagagttgttcgaggagggttgtcagcggaatgatttgatggtggatgagccatgggagcttcgactttggaaggatcatcagtagtggtagctgaacttgtggcttgtgtgcgcaccatgattgtggagggaggattttgaatggtgaagcttgaaggggactgcttgaagcttcaaattatttcagttgataccatattaggaatagggcacttttagagagaagagttttattgaattgaacattgtgtttttacataatggaataaacatatatataggcaacaaaaaacagtgaaaaataactaacttttcctaactaactcttgtgtaggaaataaagcattctgaaaatgcccctacattaacaccacaaagtacgaaaaacccaaggtcacacttgacctttccccctcaaaaccctacctttatggcagtataaaaactccttttatatgcaaaaaaccctagcagccgaaatacccattcaacctctcttcttcttgtctttttcttgctttgaaaccctagcagccactcc

SEQ ID NO: 325493 - DNA, 930 bp, Cannabis indica
ggtgtggtttgggaaattagaaaaactgcatgtgtgggtatgtttgaaaaaatggtcacaaaccgcaccacccgcaccgcggacacccctaatgtctttaacagattttaattgacgttgtaaacttatttgagctatggttgttgtttgattttgggtttgagcaagtttgagttctaactatggtggaatttgtaattttgagctatacttggtttggttgcttggttttggtttattttgatgattataggtaatttggagcatttggtgaagtttggggttgatttggtttatttgggggccttatttcgtttttggagcagaaacggcctaccattttttctagtgcagtacctagaaaaatgacttaccgttttttggacaggttccttgttttaggatttttcttgagttttttcgatggttagagctctgttatgctttttattgctagggagacttttagttttaagttttgatccccgaaaagattttagaaagttgttcatcgatttttacgattgtgacgaagggcctccgttcagtaagtgagtttccattcaggtcgatcggcacgcttgaatctggaaacaaggtaagataagcataaagtatgtatgtgtatgtgtgtatggataatatatgcatgcgattgtatgttttatacgctaccaacactagtataataatggtactgagtgcgtgtggtacagcctgagggtgcaatctggtattaccaacactagtatagttgggtactaagtgcatgtggtacaatacttagtggtacttggggtacgagtgttaggttttatgccctaaataaaactccatttcaatgtaatttattttattcaacatcaataaagaaacagaagtatttttcattcatttgtgtatgttttggttcactttatcaattgcttg

SEQ ID NO: 325494 - DNA, 677 bp, Cannabis indica
acaggatctcgaagagcagatctgacagactttggctcacggggaagcaagtattcaggtaacctgtgcttagttgcaaggtatgctttagccttgtaaatgcctcgcatagatcgggtgatcatagagtgagtacgagggagattgccactgtgagatgctgcaccagtattgtcatcagcagttgctggtgcactagtagtggcatcagtagttgctggtgcagaaacattttcacgagtaacagagtgagcaggcacaatagatactgatgttggagaagatgcataatgatgatcattagaaatagcaggaggcatataatttgcagcaggttctatagttgcaccagtcccaggatgcgcaactgcagtgtcaatgtttgcatctaagccagtcagatcagcagcaatatccacatttggcatttcagttggctcagattcatgagcagtgggaacattttgagagccagtagcaaattgcatgatggagtagaatggagcttcagagggttcatttgatgaagtaacagcagtcttgagggcaggaaaagtaaattcatcaaagacaacatttcgagcaataaagattcttccatctgcattttcacacaaattaacccttgtgttttggagaatatcccagaaaaatacactcttcagacctgtactcaa

SEQ ID NO: 325495 - DNA, 710 bp, Cannabis indica
tttagtcacaaaaatttatgttgtgactaaaaaaataattttttgtagtgattgtgtaaaatgaaactcaatatattcttaataaaaatgttaatttattttagttttgtattaatataaaaaatttatactcatttgttactatgtatttttcaaaatacaaatttagtataatgtatattaacaatggctatatgctaatcatacatatttagtactttaaaattttaaactcttcaattatatagttttaaattttaatttaattatttaattacacagaaaataattttattaaatttataaaattttatttaataaattttaaataggtatcaaataatttaaaaataagacacaagataagtactattaaaaacacatgtaccaaacctattacacccaaggctcctaaacttgttaagactccttaatttgaggttgtggtgcaatcactcaagctagtttaatattgttagactatgagtaagcttcactaattatgattgaaatgattattattttttgttagtgactaataactaattaatactttgaaaaaagaaaataaaaagaagaataataataaaaaaggtaaatactattttggaccctgtgttttgcaaaaattaccaattggaccttctgtcttgttaaatgacaaaatagaccatgtattttctaaaatagtacaaataggaccctaaatt

SEQ ID NO: 325496 - DNA, 6147 bp, Cannabis indica
cctgaaattgtggggtttaattacgttccatttaatacgtctagataacattagaaaatcacacagctgttatctaaactatctttaaggcagtcagcactgacatggataggaacaccctaccaaaggtaactcgctggagcatctcaccttgtacatagatgagtgacttagtttattcatataccttacagtaatggcatgagcaccagtgtactagacaaacttaagaactgctctttgatcataagaccttgcatactggacaatcatgccctacatgttcccaagttattacacttagtttttataatgtgaattatacgctaagtattttaacagccaattcgcctcgttaatactccccttcgtgttgcgaggtggatgcctcactatgcattgttcgtatcctcctcgggattatgccttctgtgacaagaatgtttctcgtcaatacaagaattgatagtttatgtatcctggtctcgcttatgactatgcagtcaacgagttatgaatatactctattaattctatatctaatgagttattccattttgcatttaatgatataattataattatatctactgattcatattcaacgagattgacacgtgtcacttcttgaattactgccaaattttgagtataagaattaccccttaaaattccttttttttttaataaaaagtgctttttaaatgaaaactgtgggtatatttgtcacaatccaatttaaaaaaaatgcatgctttcgaagttggcagtttatggttttgaggcacatcatttgcattaaggagccatcttttctacttctccgccattcctatctgttggatcttttttcctctaatctaaaggagatcaaacccaaggtataaaaccgaagaaaggtaccacctttcctccatttttaccttttcaaaaaatttcaagcttttctgcgaaattcccatcccaactttctgaagctttgcatgccctcattgttgttgacatatttactgcgaatttcctcagattcaatctttaatctcagacgtccccagatttcatcccgtcgttcatctcaaacacagatacagaatttctccctgcacaggcgtacttcttgaaccagtaagtgttcattcttattcttcttggcatattttttagtcatcactaattacatcatcgcttgtctttgcttagatttggtagaaattttttattattttttctgggtaacttttaagatttagatgaagtaaaaacttaggtttatcatatttataagtttctggttttaataaatttcttccaggaattgggattgctctttttatagaaatgtcccagtttggttatgaaatttattctccaaaattcttagaaacagagtgtcccaagaaattcgcccttccatttaaacctaaaacctaagaacctcgatcgttacttgaagtaaatgatgcaaagttaggaaccatttaataagaacccaccaggacgaagttgccagtcgctgtaggcattttttacaagaaatagttaaggaaaaacactgtttcttgcgatatacagcctagcctgaacccccgtatttatcttctattcctttggctaagcccttatttttacctagagtcacaattgctttttcaccaagtgactaagattttgagatcatgacttccaagactcataaatcaaagattccctaggaccccaatgtcacctttgaggctgagctcattgattcaaggataagggccataggagattatgtttgtggtgttttaaagacctatgacatcgatcaaaagcaagggtgatgtgttagatctgctgcaattggtgaattcagctgttatccaccagagcgacttactcgtgaagaacgtacgtagagagaccattaatgaagccagtggtgaagatactactagtggctcatctgggataggcgcttggagcctcgagcatatcagggttggagcaattctccccctgagagattatttaaagatttcatgaaccatattggaatagctccattccaattggttctaatttcctacagaatccttgcaagtctaaaggttctgtataagattttaggatgggagtgccccactctcgaggaaattgtttatctctattttgtcaaggcagttcctacgaggaagcattgtgcaggggatttctactatctcgggactcatacaaatgatcgcatgattattgtaggattaccaaacaagactgcttttaaggaagatttcttttggataagtggcctttctcccatcaacacaactgcatttcgcataatacgtaagtaaactgtcccaaacttggttttgagttattacatgttcataacattatccttactgacttattttatttgttctattgacagcgatttcaaaaagaccaactccaactcctgaaatggccaagagatgaaaacttttgttaggtcttccataaggactgcgatcagccaagtttcttctaaatgaggccaatttaaggtccgttggtcttctcgctgcaaaagaatatacttgtggctacaagtatcccaagtatacgtcgtgggagaaggtttcggttccaactgacgaggagagtgaggattatgtggccacccacctgaggaacaactcattccacatgatcaacacgttcaaggagaagccaacgtgttcatgatcaaaacccaaaaacttggaatgaagaagccaatcctgatactggttatgtgcctagaagtgaggatgcctatggttccactaggtacgtgccattagttaagttgaaaaatttccaactctgacaacgtctggctaagtctaaccaacgaaatgatgagttggaaagagaggcggccaccatcagggaagcacaagaaaacaacacacaaaaccaacctaaacctcgagtaagaaggctgcgaggtagacctcaaggcttgagaaccaggagacatgagacaaatcaggaaaatcccaagaacgcccaagaggaacaacttggggaaactaaagatgttcctgaagaagaacaacagaacaatcaggccccccgtcgagaaatgcctcagagaccccaaggatctacgaatcaagggaatgaaaataataatttaccagagccttctcatagaaatgagaacagaaggaaacccaggattacgtaattggaaatccctcgtggtaacgagagaaatcctaggactcaacctaggactgtgggttaccgccgagacaccgtcaatgtccttctcgcactaatggggaggaggcgtacacacaccccagcgaggggcgtgtatctaacctttcccaaaggagaaggcatgtacgtgatgaggcaagctctagttcaggacattccagatctcaagaatgcagtcgatcagaaagaaacacacgaagaggttatagatctcaccgtagtaatgatcgagaaagtatgggcacaactagtagtcatcaatccgagtgttacactgggacaaggtccataagaaactataatcaaagacatccagatctttgtgagcgattgaatcagagacaaccagatttacgcgagcacttaaatcagaaggcacctaatctatgccaataactcaactctaatcaaaagcaagaggatccaatccaattgcgaatgaatgagttggaagacaagttccaaaaacactaggatggggaatacggtaaactgcagggttatgactcggatgaggaactcgagcctttccatccaaacatcatgaactctgaattcccccaagggtttaaaaatcctcacgtctcattggacgatgggacttcagatccggtcgctcatcttaacaatttcaataacgtaatgcaggccaacaacatcttgaataatttacaatgtattttattccctacctcactgactggggcagtgagtaattggttcaacaaatttacccatcactcaatcggttcttgggaacaattgtttaaggatttcaagaaatagttctaggcaacgagagatacgcgacctgaggcatcttctcttactaacataaagcagcaaccatgcgagtcacttaaggcctacctaagttgcttcagcactgctgctgctaaagttaaaaaacttgaatgacaatatacaacttactgctcttcaagtagggatcactactgacctctcagcaactaggggcgagctgtgggatgacctacagggtcacccagtgatgaacattaatgattttaatgaaagggcccaagtattcgtaaggaaagaggaagcaaggaacgagatgaaatcgctaaaaactggctcagaaagtaaacccaacaatgttatagcaaatcctgtctcgataaaggctgacaattcgagtggttccaacaccaaaagaaaagatgactttaaggattcagccaaaaataagaagaaatagaaaaaggacgacaagtacgtgccaatttacactatttatatcgagcttaatgaaactcaagaaagtatttttctcacaaatgagcatagggttgcattttgcaagcctgagccaatgaggcatgcaagacacaagagggacacgacaaaattttgcagatttcacaaggacataggacatacaacaaaagagtgtcgtcagttaaaagacgagatagaaagccttatctcgcgtgggtattttcaatagtatgtgaggcgatagggtaatggacaaaaccagccaaatccgcccaataacccaggtaaccaaagagtacaacctcctcctgtagaaggagaggaaattttggttatctcaggagggccgcatcttgctggtagtaatggccaaaagagatatgtcaaggagataaaaaacgagcaaccagtctttgctccagagtcatcctagaaatccaagactaaagaacctccgattgtattttcaaaggaagacacaaagcacgtgaggtacccacacattgaccctcttgttgttacaatttagcttaccaacaagaggataaaaagggtgttggtggataaaggaagttcagtgaatattctatacaaggatacactgaagaaaatgggattgcaaaatgcgagtttgaaaccttgcatggtgaatttgtgtggatttatcggagataatgtcaccagtcagggcattattcaactcccattaaccgtaggcgagccaccattatccacaactgtgatgcaagatttcctagttgttgacctaccatcagcctacaacatactgttgggtcgccgagtactaatcggactaggggtagttagtttcactaaacatctgtctttaaaatttcagatgccagaaggtgtaggtgtcgtgcgagctgatcagttactggctcgtgaatgctaccgcatagaattacagaatagaagggttggtcatcaattaatggtagtcataacaaggaaaggcgagaaacaggatgaggatctagatcttagaattcaagttgagaagaaactgttaaaaccaatcctggaattggaggaagttattttagatccagaatatcccacaaagtgtgtattcattgggaaaaatctggatgaaaaattaaaatagcaatagctaataagttttctgaaggaaaactaggaccaattcgcctggagccattcaaatatgatagggattggccctaaagttatctgtctgcacttgaatattgacccaaattacccagctaagagacaaaagaggcgaccctgggattttgaaagacaaggggcactcaaagaggaagtgaacaaattactgactaaagactttatacgcgaggcgttctatccatcgtggatatcgaaccctattcttgtcctgaagccaaatggtacttggagaacttgtatcgactttttagatttaaacaaagcttatccaaaggattgctttccactgccaaggatcgaccattggtggatgcaactgctagacacgagctgatgatatttatggacgtatattctggatataaccagatcaagatgcacgtctgtgatcaagaacacacaagttttgtaaccaacatggggctttatttctataaagtgttaggttttatgccctaaataaaactccatttcaatgtaatctattttattcaa

SEQ ID NO: 325497 - DNA, 2159 bp, Cannabis indica
attccataagagcaatttcattgattcgcattcccttcatcctaacacgtgtccaacatggaggtggcagtcgaattttgggcataacaattgtcccttaaaaagtacctttgtagtaaaagagctttttaataattatagagggcattttcaccaaaatcgtttcttagaaaagacgaatcctttgattctggtggttgtgcagtttcgaggatcattatgaattgtctcttcatattctaaccatcttctaaccgtcaaatttcccaatctttagttttcttgtcactgaacgttgtgtataaaagggtggctcaagcttgtcatttttcacaaacctctggctttttggtgagatccattttcagaatggatcatctgtttcctgctagaatgtcccttctgagttcagaagttcatctttccaaacccgtcttagccagacgcaccaacccatttccatttcttcctaaagacttcagtcctcaaccgaagccaaaaatgatggattctaagactaaggagtttccgaccaatccaaaccacggagaccccatagccttccatggctgatcctcacaagtgatctctgagaatatagatcttgtgaacgatctcataaggaaagggcagtggtcggtccttgcataaggaaaagggttgcattagcgaagttacattttcaacatctgtatatcaaaaacaagtaagaaaagtgacccaaggcttaataaagcccatatcagaccactaacgtaaggaaatggcagtgcccatcaatttttataggaaactccacaatagagtggtagtagtggctactacacaaggacatgatattcattggcgaagttatatttttaacaccaaaatagcgaacttgtattttttccctattttacgggcctccttcacctataaaaggagagcttccttagtttattttttatattcagaaatctacccccaaggtgagagcatctctctccagtttctctctctagaaactagagcttaaacaattagtttttttttgtaattaccatgtcgtgataaataaaaactcaaaggagaggtagctccattaccattctaacatgggaagtgaactactataaatagtctatgtctctctaactttttttacttaaactcaatattcatcttgctaatctagcgagatagtgttggccacttttcaaagtaaacatttttgtgctttcattgaaattcataatttgggttccctaaatatagtttgaattctttgctgggaactttgtttcgaaaaaaattcataagttcaagctagtaatcatccatgaacacgcaaagccacactaccacacttggtagccatgccactgctcagaatgtagcaggcattgggattcgccataaggaagtgaactacgagcaagcgtctgaaaggactcaagttcaggaacgtggattttatgggtccttcgctgttataagcaatcacctgtaagggaaatgagctacgagtgagcgtccaaacggagtaaaactcgagattgcaaacatagaggtccaccacatgtagctcataggaccaaccgtaattctactcaaagaaatttgaacaatataggaaattaatctcctctgttggattctctttacaagtctaatgaatctaaacaaccgcgtaacgctgcaaagaaaaagggacctacaatcaaacacaggggaagatacacaaagctctactgtgaaaatgaagattatgagatttggagggtgaagattaatgagctaatttggagtgtgaagataaatgagctactcaacactcagatgtacttccgagatgaataatgtgcttcacgaaagtacttttcttgagatcttagtagcaaacactatgaatattctgtgacaaagcaaatgctcgagaaacgactctatcgtcatatgggataaatctctagagttggtatcatggcaacatgaccaggaaataaccacaatgcctagtgttaacgtagattttttttaactaaatttgagcctcacagtgatgatttcttaaagaacaaataaaagctatagaaaagtaaagaatatgaacacaagatttttacttgattttgcaaataaaattctgcatagtccacaagtcaatcttattcaga

SEQ ID NO: 325498 - DNA, 540 bp, Cannabis indica
tctatccaatcgttgaatgactcaacaaaattatttgtgagatgttctaccttcacatttgagtcgaacttgttcattgtccattgcctgaagtcaatattctatagctagtcatgtgtcttctgattgaattctttaattcattccattattatcttaaaattctcaaaattagttgtctcaattgctgctccaaaagagaccataaaggtgtgatgtgccaaacttttttaccatgttattttccaaataaaaataatagaaatgatgccctgcactgagaatatttgtcacaaactcaattaaaccctactaatatttaaaaataattatttgattaagcatccactataaaagcatatataacacaacaaaataatacataaaagaaattaaaataattaaataactgttatcccaatttctgtatagggtaacgtgacatttatttgggtgagacgtagagaatatttcataacctaggaagacagttcattccatgatgtactgtccagagtgatttatgttggaaattatttt

SEQ ID NO: 325499 - DNA, 987 bp, Cannabis indica
ccaccattgttttttatgacaaacaactataaagaactttctttagctctcaatgaaagtacaaaaatatttattgaaattttttaaagctaatattaagaaagattaagctaaagaatatggaatgaaaaacaaaagtacacacaaattttcacatggtttagacattaatgagtcttagtctacgtgacagttttataagcttttagctatagtatttgtttttttttttatataactctagtatttattttcaggttgtaaaccctgtacatgaagaattcagtgccttatttataaacaaccatgcttaggggatcggacgaatttggacgcactaggatttattataagaaaaaggctattgatagggtaaactacattaattaagcactcatttgagctattgcgtcgggttggtgatgcctagttcctaaaagcaatatatgtcgtggatattgtgttgttgatagttacaagtgtggatgtgcaccgtcgttgaaaaaatggagtgttagagtaatgttgcttccctaaaaaaaggttgatctctttttcgttgggtaccttttaaggcttgtagaggggataggtcaccaaaacttcctgagttcatgttagaggttgccacacataggcattttccaagacaattatttatctgagataccatttaaacttccattcacggacgatccccaaggttgcttttgtacactttgaaattcttctatatttcaatgaccaaccgtggtgtaaccattgtatatgggaagctcataaatatatgggaagctcataaactgaactgtcatatggaatctgaacatgaagtccaaatttatctttatcaatgaaattgactctcattcatcttcttgggccaagtgatgggtctaaaactcattaatcttaaataagtacaaccaacacgattatgaaaaaaatatagactaaattttttttttttaaaaaaaaaactgaatg

SEQ ID NO: 325500 - DNA, 731 bp, Cannabis indica
aaccagtttgtgaatattttgaaaaccgaaggtccccgtagttctcattacttatcatttactataaagaagtttttatatgcttgattttaattatcaaaaatttaattacccacacttttggtataattatatagtacttaaataagaattttataaaagcacacacgtggcgtccctgttggatagggcgttacaaatatgattcatcgtacaaaaccaaactcatcctatcactctcatcatgaaacaaaacatcatttgtctttaaagcactcttgatagtgctatcaacgacacccttaagaaaatcaggatcaacaaacatgttattgaaattcatactgtctctttctttctaaaaaataaaagaaaaaaatagttagaacaaacaatgaaataataatgttaaaagcttataccttagcttgagcagtatgaactgacaactgtaacccaccaccatcatcagatgtatcctaataatatgcctgcacaaaaaataaaataaaaaccagttttttaacatagaaatatacaatgcagaaactgatttcatgtaaaaaaacacacaacaacgtagacatataaccccaaaatagaaaatagtttcaactaatcaataaaaaaatataacaacaattaaaacattaaaaataaatgtaacgttcccgcttcaagcctccattgggcccttaccccccccggaataaatggctcttatacacgag

SEQ ID NO: 325501 - DNA, 1141 bp, Cannabis indica
ctgacttcttcatcttcccgtagcctacatctccataatcttccacaattcgacgtttccccctatttccatcatcacactttcccttggattcctctctgccgatttcccctgtcttcaaaccagaattttttgataaataacctgacccctcctctagtctctactgtatcttgctttggacagtgtccctgttagccgcccctaacttgccttctattttgttctcgcccatggaagctattgagggagaagaggaaacagtagtggcccttccaattgtttttgttggttcctgtatagtgtcttcaagaattaaattcctttcaagttcttttcgatcatcttgtgtgtcttcttggagactatttccaaccttcaaccattttccatataccactgtaccatccatgtcttccctttgagctagtatgggatattgatgacaatctttaatgcaatgcccaattcttccgcacttaaagcacatgaaaggcaattcttcatattggaatgctatccacttcttttggccgctccaagggagggaaaatcctggacacactggtttgttgatagacgtccagattctaaatcgaaaaaatccgtctgcaaccatccgagagacatctgtattctgtaccgtgattatttcccctgccttggctgccattcgagttgtgttttttgtagtcagcagatcgattggaactccccatgcccgaccccatatagggaagcttgttaaatcatgcctccaagattcattagaattttccattttgcccaagattaacaccccattagataaataccatggcattctagttaaaattctgctttgaatagatttagatgcaaatgtaaaagttaagaaaagacctgtttcgaacttttctttgattttgatgttccagtccgcatctttcaatctccatattcctcccagcactttcttgagaaatccccgactatgttctgagttagtacagaggcggcctctcaaattgaattttgagactgtgattgacaagcttttatccacttcccattcttcatcttcatccgtgacctgaagattatgggttttcttcagtatctcatccattgcagaggtgaacactgttgggttttatgccct

SEQ ID NO: 325502 - DNA, 691 bp, Cannabis indica
ggcataacgggaccaaattctgtccctaaaaaattaatatgtgatatatttaatatcatatttaacaatatgttcaaaaaaagaattaatatgtgacaatatttaacataatgttccaacgcaaaagaataaaactagatgcaaaatttaatcataatcaatgttcatttaatatttgttaatatacaaaaataataatttctcttcatattttattattaatagctatagttaataataaaataaaacggttagcatttaatgtgatagctaaagatattactaaaataattataaaagtagattaaaaacagtagcatttatggtgatcgaaaatatgtattatgcttagagatgcacatttctctcatgaggatcggtcttgccgggattccttgtctaaatagaaaatgaggtggagacagggattacttttatgtccccgaatgttaaatggggcgggaatgaggtcacactcaccgccccaacggggacctatttagtattttattttatatttctagtaatattttataatttataatttatgtttgtattttttagtatattagtatttttttttatgaattttaagttttgttttggataataataattagattattgaataataattaatgcgtaatattttaatttttatgtagtttaatatttttatatgtttaaattt

SEQ ID NO: 325503 - DNA, 688 bp, Cannabis indica
aatcacgtaatacgcctatgttagttagggtgttacataaatcatctccctctctcttcccatttcttctcaccagagcaccactccaccaccacaaagaataattttttcttctcttcactcatttttgtcatttgtcttcactacactacaagctatgatcttttctctcatctttggacggagcatcatatacgaagctgatgggtatttttttttgtgtaatcttgtttgttgttgttatatttagtttagaatgttattttgatgcttgatatgtgggttgttgctgttattttgctgttttgtgtgttaaaatggttactgtctgtgaatactgcattttttatgggttctgcaactttttttgtttggtccgatgtgggcccaatggtggtccgatacattacttagtatcatgacatggatgaaagcccgatatgggcccgatggtggtccgatatgggtttggggactttatttttgatggggcccgaaatgggccttatggtggtcgatatgggttttcgggactttgattttgatgggcccaatattggctcgattgggctcgatggttgtccaatatgggttttggacactttgattatgaattgcccgatattgtctcgaagacgtagaacaaaattcgtttatttgcatcaagctttcgaggggctcattcaag

SEQ ID NO: 325504 - DNA, 1129 bp, Cannabis indica
attcatttaggaaaagtcattccattcccggatctatttcaatcaagtaaacactaccctagttagttaattacaacttatacaacttaataacatgaactaaagtaaaataagaattatagtaatatataaattaatatgaattgattgttagaaatctagttagttacattatgtaagtagtaactagttataattagttactaaatattgaaatttttttgttagaatttttgttatcgataaatcatggatgcgtgaggagagagacacccagtgatttcaagcagggttcgatgcaaagttttccctaagggtcatggcaatgagaactggactaacagtaataagtccattctagaaagacttgaatctcaaatcagtatacaccattcaagagcttctagatagagctggcagattcatcaagcttgaggaagctgtcaagaaggttataggtgttcctcaaccagaagcaaccgattacacttcttatctatttttaaagtcttgaataaacattgaccaagaatgtgaagaaaaatcaacaactaatgcctccactgaaatagactcctcttttgttccctaagatgaactcgagcaggaaagatagtgatgacgagtcccctactattactaaagaagatctcaagcaagaaagtagtgatgaagaatctcaccctacttcccaagatgactcacaagaagatgaattgacaaagattctccctctgttccaaacaattatcaagaacatatggaaacaacattgaaggtgtgtcttctaagtcttctaaagatagtgaccaagaaagcgacactgaagactcctaatgagagagggagggaccttatatcatcacagaagtgtttgaactcagaataaataggttggagtttgctatgattgctgcttgaatccaatgtcggtaccaaggtgctagaatagggagcatctgagacgataataaagcaactgttccttaaacagttcgcttcacagtgagattcactttaccttttgcaagtgaattaatcgcctcctaagccaacaagatgagataaagacattttaggaggtccatcattaaagtatggccctgtaacaccctaactatcttaggcg

SEQ ID NO: 325505 - DNA, 1059 bp, Cannabis indica
aaagcctatgatcgtgttgagtggggtttcctgaaggctactcttcgagtgatggggtttagtgatcgttggatcgggttaactctcggctgtgttaattcggtgaagtatcatgtggtgaatagtggacagaagttggggccgatcatccctactagaggtattcgtcaaggttgtcctttatctctgtacttatttattgtatgtgcggaaggcttttcttctttgatacgacattatgaatcctcgaggatgttaactggttgcaaagtggcaaggagtgcccctactatctctcatttactcttcgcagatgatagttacatctattgtcaggcatcagaagatgaagccaaccatgtcctctctctacttcagctttttgaggctgcatcgggtcaaaaggttaatctccaaaaatcatcggcttttttcagttccaacaccaccacggctaccagggatcgtatttgttctaggatgtgtatccaagaagcaggggtggatagtatgtacttggggcctcctagtattgttggacgcaacaagaacactgtcttgggctttcttaaagagaaaatgaagaagagaattaaagggtgggcgggaaaagagattcttatcaagtaggtggttcaagctctaccttgctacgctatgaatgtctttcttttcccaattggtacttgtaaagaacttgagcgtatgatggcgagtttttggtggaaatcaaataactccaacggaaatgaaagtggtatcatatggatgaattgggaaagattgactcggcacaagcttgatgggggcatgggattccaaagtttgagagactttaaccttgctatgctaggcaaacaaggttggagattgttgtttagacatgagtctatggttggtaaagttttcaaagcgagatactacccgcaaggagactatctttccgctgaacttggatcgaatcctagttttatttggagcagtatcttttccgcgaaggatgttgttaaatctggtttgaggaaaaggattggctcgggtttaacggtgcaaattacc

SEQ ID NO: 325506 - DNA, 595 bp, Cannabis indica
tttagggtcatgccaacctgtttgttgaaagataatagtcaaaaacgactttgctagatcttggtgcttacctgggtgcccctagtgtgcaagtaacactgccctattttgggatgtggggtcgtgttttttcttcgtgctacgtgtcaaaatagtgtccacatcatcaaaccaatttttaggtaaactaagcttgttttctcataaacgtgctaaattattgagggctgattcttatcagcgaaatgaaaagtcagaaaactaaaattaatatattaaataaaaggtaatttaaattaagaagctttaatgaaataatacaaattaaaaaacttcaatcttcaagctttttaacttatattactctttgagttaacatactattaatttaggttttccaaccttttatttcattgatgagaatcaaccgcttgaaaacgacaacataactaaaatttgacagattttatccaattttttttatataattatgctgccaattatcttaatatatataataatgataaaaaaaaaagagtaaataacaacataagtatccaaagttttatgtttataaacttaatatttattttta

SEQ ID NO: 325507 - DNA, 872 bp, Cannabis indica
gttagtttgcagtaagttaaaatagaggataataatggttatgagatatttatatagaggatgaaatccaactaattgatagatctgttaattatgtaatttaatagatcttaattaattttttgatctctagaaaaatattctgattgcttgagaaggagctgattttgggactagcatatgagatagaacgatgttacaatataattgagtcaaacaaagaaattgcatacgcaggattattctaacaaaaataagaaagaaaaatggcttaaaaaagattaaaagtgcgaatttatttttaagtaataattttaaaattaaaaaagaaaagtaatatacgttaatagtataacttttaacagctcgcaataatattcctgaattttcctaaccaagtgaggactagagtaaactcctatagtacaaaaattatatatataatatataaatgattgattaattataaccgtactataacaagttggtaattagaatggtccaaagagatagggttcgaaatgcaaatgagcactagtttatcaatccttaatataatttaagtggtgtttgtatagataaataaatttatattatataatgaaactataaaatataataagagagtaagtgatgaatatgaatatggtgagaacaaagacaaagaaagagacaaaataagggagcaaggtgtggtggccggcggtcggaaggtgtggggtgggcttagttgggtggggcacgacactgtctcagctgcattagacacacttgtcagacccaatttttttggctgtatttataattacgactcattgggtgctcaacccacacaccacaccacaccaccacttccttcatctctctctctc

SEQ ID NO: 325508 - DNA, 747 bp, Cannabis indica
atagaatagatatatagattttgggatgtacatattttgtatcattattgtaacaacttattataattgtacgactgaagaatatgtacatacctacaaagattctctaacaatcacacaagagcatgagaaaattagtacattgaacatttctcaaattaaaaaccatgggaaaggatttgaacatccatataaaacacaataaattgaaaaccacgggagagcattggaatggcaataaaagagcccccatatgctacttcaaacaattagaacacaccaaatgttggttaaatgtttgtggttgcaatagtgaagatacagaaagacaaacatgtatgataggaaatcaaagggaaaggattacaaaaactaagaaagaaaagaaaaactttgggacattatttggcccctaacatcagagcaagaagaaaccaaacacagttttctgctgccaactgcaatagactaagaagaaaaatgtaaaccagttcaggagagttatatatagcacaaagattctctccatatattcaaggaactcttaactaactaggcctttccgccaatctgtatgtttgtcatcttctctctctcccttcctctctctaagcttacatcatttgaatgcagcccttttcctctgaattcatctttattggattaacacaatcacacagtgtaatgctgctggattgtgtcaatatccagcccctttagcttcaccactgactcgacatgaccctt

SEQ ID NO: 325509 - DNA, 1406 bp, Cannabis indica
tggtcttttaatgttagcattgtttaattttttgtggattgtgcaactaaacatggttattttgccaataaaaaatttcataattgactacatttttacaaaacattcatttgcaattgggataaaatcaactcatcttgtctaattcagttcaactatccaaatatgaccctactgttcaaattcaacatatcacaaaatctgcactggaattttcgaatgcacttaattcctctacaaaaacatcatttttcttcatagcaactaaaaatggcagaaagaagaaaatgaaaaacctgagctagaaaagcttcggcatcctcctggcgaaaacagagcaatccaattgatttaactccttcttgatcagaaataagcacaaactcattgttcgaattactaacagtatagacagcagtaccggtaagagtcttggccacattatcggaagccaacgcggcagccaaggcttgctttggctgagttaacgaggcaaatggcggaagaggtgacagtggcgagaaacggaggcgtcttccgttgggccaatttccggtcactgtttcggcgaagcgcttggtgtgttggattcgggctgagaggtcggcaccgagacggaggcattggtggtgtatgaaggtggagagtgataggagtgggtttgaagatgaggcgtagggttttggagactccattggagagttcgaaaagaagaaaaagaaacgttttttagcttagctagctttctttgtcttgaagagagagaaagaagagagagagggatcaaatgagatgaaaggagggactaagtccctcacaacaatttttggccgttggattagatgaagaaaaaaaaacaatgttgaattcaatcctacggtagataagtcacttttcacattctcctaccttctcaaatttatctcatatactatttttttttttaatttacgttttatattgtttgggtagtttttatatgagttgtgatgtagattttaattgcaatttaaattattgtgtgagtttctatgtaaatttcagtaaaaaaataaaaaaataaactgttttaaaatgtaaatataaaatttttcattaataatagggtaaataacagtataagtactcaaagttttaagtttgtaagcggcataaactcatgtttatttttagcggcataagtacccagtgtttgtaaaaatataattttcatccagttttgtcagtacagactctgttttgaatatattaaaagaacatttggaagtaactgatactacatgttttatgtctagacccaatgatcaagaatctagacattatatgtggcctgtttaagaaaataatagcgcttgtacagataaaattagagaaaatttacagttttacaaatattgggtacttat

SEQ ID NO: 325510 - DNA, 557 bp, Cannabis indica
gtgttgacaacacaataaacacatcaaatccatccaaaaactcaaggaaaaaaaacaaaaaacaagaataaataagagtaaatgaatacataaaatacacattcatcattggcaaaatgtcaacctgggcgaagagcccaggcaccaagtcaacttgggcgctgggtcccaattttgctgaccagacaatcttgtttgattctcaaaaatgattgtatcttaattgttgacaaaaatggagaagatgcccgaaagacttctcaggaaaattgtttggaaatggcccacattgaaattatgttaacttaggtgctaggtcccaattctgcctcccagatggctccgtttgtttcgcgaaagcacccatatcttaattgttgatgaaaacgaagaatatgcctagaagatcttatctgaactactgttggaagtggcaaaggttgaaaacatgtcaacctgggcgttgtgacctaacacgaggccaacatgggcgttgatgttgggttttatgcccaaaataaaacttcatttcaatgtaatccattttattcaatatc

SEQ ID NO: 325511 - DNA, 1500 bp, Cannabis indica
ctctctctctgtcgttccctcttagacttcgatgttgccacgtcgacaacccaacgacccaacaacgaactccacgaacacaaccccactccagccatccacccgcgaccccgacccaaccctctctctatctactggtctctttctctctttctctctgtctattgctctcgagtttgacccacacacccacggccgacattggaacccaaccaagtttcagagaaaccaccacgaaccgttgccaccaccaaggaccgtgttcatcgaaaccgaacagaggtcgtagccaccacaaccacgaacaatcaaaggaaagtttttttcttattaaaaaataaaattttcatagatttggatggaatttggatggcatgttattctgattagattgttttagattgtgtatacgaatttggatgtttctctgcatgttaatcagtagtgtttgttgttcgaacaagttatcgatgaaatatcgataggttatcgatataatgtcgaccaagattgaaagttgtttgaccattagaattgtttgtgttgttagtgtatatcgataggatgtcattggtgtgtcgataggatgtcgacttaatttggaataaaagtacaggtctataatgtcgattgcatatcgaccgtatctcgatatcttgttgagtagttgattgaataacttttggttgtttttatcgacatcatgtcaacatgatgtcgacaggttatcgacacttttatgtagttgatgtctgtttgataatgtcaaccacatgtcgacatgatgtcgaccttttgtcaacgatttttgtttactacaaatatagttccagttttctttgcatgtcgacagaatgtcagcaatttgtcgatatgctgtcaacaaagttattttgttgctgcttttgtgataatgtcgacaacatatcgatagtatatcgacagtttctcgaccaaattatgtgtttactaagtgtttgataatgtcgactgaatatcgacatgatgtcgacgttatgtcgaccttgcttaaattttttgtcagtaatattgatttgttatttattttttcagatggctccgaggctcataattccagcattcgagcattttacaggccgcgtgacttacagaggcaccagaacttttgcaaaaatcaagtctcggtttgaggaattcaacttgaataacacggcgaaggaaagtcgtttcggcaacttttggaatgtcgttcccctaacattctcctctgtttttcaccagctgatgctgcacaggatgaaggttgatgctcaggaggagttaaagatgcggttttacattggtcttaaggagctcagattcggagtgcttgagtttgcactcattacaggcctggacttctccacggggccaacagaagaggagaaggctgtgcaggctgctcgctcatagtcagaccgattgatcaataaatatttcaaccgttctggtagtgtgaagacagaagcactccaagat

SEQ ID NO: 325512 - DNA, 1442 bp, Cannabis indica
aggagtcaaatttgtgggtggctagcaatatcctcaacttctctgatactctcattgggaaagctacagcttgtctgttagacttggaatcaacgattagtgggaagcaggggtgtttgcggtgtgggtggtgcagtttttgactattttttcaaaccaacccgcacatgcggttttttcaatttcctaaaccgcacccgcaccgcgaaactaaaaaactgcacaaaccgcaccgcaaaaaatagtgcggtgctgtgcggtttctgcggtttgaactatcaccaaataattaaactatcacaaatacaataaagtttgaccaacacttgtcaaataccataagacttgaaaataaatatgaaaaaaaagtttcaagtttcaacaatacaataattagtgggtttgggttgggtcttcacatattggacctaaataaatataaaaatgtatttttataatatgcggggtggtgcggtttgaacagcatattaataattcaaaaccacaaaccgcattgcaccgcgcgatttagataaaattcaaactgcgattgcaccgcaaagaattataaatcgcatattttgcgatgtggtgcgatgcgggcagtttgagcagtttgatgaacacccctagtaggaagcattcttttgtgatcatagagaacgactctgagatggtgatcaatactctgaagggaacttcttctacttagggtattacaaattatctacttcaatgtaaaaagctctcaaaccttttgaattgctgtaattttcgtttgtttttagattatgtaactttgctgctcataatgtggttaaatgggctttcagctataatgtaattggtatgatggattcgtccttcataccgcgtagtttaatttataatgaccgtaaaatctaacttctttgatagttaatataattatgtacttattaaaaaaaaagtagtgaaaaattttggaaataaaaatcataattagtattatttttaagaaagtggtggttatataaaaaatatatgtgaaggggagatcggagacgttaaaattgaaattgaatgacatcacaagaaataataataataataaaaattgtgggtttacgttgtgagttgtgattttaaataaacaatggaattcattatattgattattccaagattgaggtgaagtgaaagatgaaggctccttcacattgtgtcctagaggagcctgtgtttttctagtatttagcaaacctatgtagacaaaacccttctcttccggcaccttttcatcgtgcataaatattataaataaaatatttaattaactatctatttatcagaaaaaaaaaaccatgtattttcatctatatacaggagtagtatttatataagtataaatatttaactttaactatcttaaagttaataatatttaagttatattttttgaa

SEQ ID NO: 325513 - DNA, 515 bp, Cannabis indica
ggtagatcttaatctttcccaaattctcgatctggtcttggtgaagccttctctgctcttggtcgtggtcgaggctatcatcgtggccctccaatgcatcttgtgtgtcaagtttgcttaaagattgggcacatagctgccatctatcactatctatttgacaagaattgggtcacatctaaaccaagaccacctcctcaagcctaccttgttgagcaagaattcgagtatgatccccatgtttactccactactgcgctaccacattttagtgatgatgacacctggtatgctgacacttgggctacaaatcatgtcacctatggaattgaaaatcttgattcagctacccccacacagaccaaaaaattatttgtgacggtcaatagtctcgtgatccgtaagaggaaatactgggtaagctgtacaatcccacatcgcttgggaaatgtcaagtgggatgattctttgactgtttaggtatgagactacacagttaaagagagcttaaatgg

SEQ ID NO: 325514 - DNA, 975 bp, Cannabis indica
taagttctgttttatttctacaaaaaaaaaaaaagtttccttttattgctgatagctaataaaacccttcgaataaattggtaagtatatgctaaaacccctaaaaccttcgttggaagttgcaaaatccttcctttgctgcgaggtctgagtttctagttctctcaagtagtaattcccctcccccacattactctttgctctgtttggttctcgagaaactgggaagcaaccctattgtacaagtataacctagattaaaggtaagcaagtccagttcttatttcaaatgactttgatccgtgctcattgtttgtttgttaaattataaaatgaataaactttatcaattacaaattttggtagtaatttataactgttttccaggaaaattgttgaccttttcttcaatttggaaaagcgaaattgggttactgatttgggtagagtatagctagagccatgcagtcagtttatgtttaccatgttatctttaacagtttatacaactattatacatatatagaatatgccatcttcttcattttgtttcaagtttcaaccttcggggcttctttgtatcccaaattcaaaaatttatttctagaaattggaaagagacgaattcaaatagtgatgtttctatgatagattctatccttatagccattaagaacttcacaagcgagggccatttatcaaaggcattcaaagctttctctattgtccaaaatcatgtcttttcttctgctggttgttccaacaacatattattattacgacccatttcttctcttattacatcctgcaccaatcttagatcactttctgaaggtgaacaacttcatgcccacattattgggttagaatttgaacaatatcctagcttggttccaaaactggtctctttttacacaagctttaagcttcttattgatgctcaggtttttactgagaattctaagatattgtatc

SEQ ID NO: 325515 - DNA, 816 bp, Cannabis indica
ctgtgtttaatttattacaaaaaatactcattaatcgttaatgaaaatcttcgttaacaagtgggatagctagaagagcagagttcggaaggtagaacggagaaggaagtgcgcaagggaataagaggatagagccatgtggatcaatatgaagataaaatagagaatgtgcgacatcgattctcgctttaaatagaggacctctacattcaaacgggagatggattcttgaccatatcagccctgtaaaaattttgccaaatttctccttcaagaatacacttatcttgaatatgagattgtctcccgaagagagaaccatcgctgatttgggaaaaattgagcaataaagcatagttataattttttattgggataatcttaatataaaaaattcaagtgcaattataatttattgtcgagctaattttaagcatcaacaatatataatagataaaagatatatatgtattgatttatttgagtaactatgttagataagtttaaatatctatatatatcaattaaaatagtaatcatttgattgaaaaatttaacttgtaaaactataattaacaataaaatgaattagacatttttatctaaatagtgaataacctaaagaaaagaaagaattatttaaaataataaaaaaaaaaagtaagaacagtaagagaaagaataataataatatatatctattctatataaaatagtgtctatataacagaattttggtttatgaaattattggtgacttaaattaaatatataattaatattaatagattacgatttgtaagctaatatataaat

SEQ ID NO: 325516 - DNA, 1212 bp, Cannabis indica
atataaatattttacaaaaaatggtgccttatgtaattattccaaaaaataataactttttcttctctttacccattacatcattttcatcttttttctcttaatacagagacgcaatctcactaaaaaactttttctttctctccaatacccagatttaacctacaagatctttctcctcgattcccagacccaactcttaagatagctcctattgttcacgaccttgaacggactagtatagttattgtttcagtgaactttagcacgacaaacatatgggcaaattggattacggttgacaagcatagtcgatggaggaatgtgcgcccaccactcaacgagacaaattaatttaccatcttattcttagattttaaaagttattttatttttgtataaatttattgatgtcgttgtccttttgaaactgtgaatttaaatatttatcttcttctatattattattttgtttaagattagtattttttttaaaatgttcatgttaattgatgtgtttggtatttatttagtgtttttgcaatacatagtgtaattatgtaaaattacttttgactaaataatattttattttatctaatgctcttttttttttcttgtaaagaatttgtctaatgctcatgttgattgatgattcatttttttccctcttcgtttaggtttctatttaacttttattttattttaagttaaattttgtcgtgacttgattaaaaaagattaagagtttagttttttttattatttttttcaaaaaaattgttatattattgtaatattttaacatgtattgaaaatttaattttaaaattaattaatattaaattaaaaaaatatttataacttgtataagtctaacttttgtgaaaagataaaaatttttgccacaaatttaaatattatagttaaaaaattagtgtgataaaatattaaattaaggacttaaatttatcaaaataaaaaaatttatatatatatatcaatttataaaaagatcttatttaaaatttgattattgaaaattaagatttaaggaattattgcgcgctctctgctagggctcggggtgtgaggctttgccattcttttaccctcggagacgaagaggttccggtgatcagactggtgtgtactcgccattactatggaagaactgctagctaaaacaaataaacttcatgtctcggatga

SEQ ID NO: 325517 - DNA, 1937 bp, Cannabis indica
ttactaattagtcttatataaattattatcagaaaacaaaaatagacagttgctaatctatttattaaatttcttatatgatcattgtcttgtctaaactattaataataatgataaatatttgacaaaattcagtattattgttcataatattttatatatttaatattttttatttcttttactcattgtaaaggacttaaaattttacgattttatcccttactcttctaaaaattagtaaacattattattaaatattaatccacgtcattttttgctaaggcataacatcatatatagatagacgcccataaaaatcacgtgttgatataaaacttttgtaaaattatatatatgaatatgaccctaaaaaaatatatctatagatctttatatatataaatatatatgtatatatatatatatagagagagagagagagagagagagttcatcatgacctaattaaattcatctcccttttcattgattccaattcaccgtgggtaattatttatatatgaacatgtgagataattaataattgacctcctttttctttggtgtgatccttttggttattattattattattattattattattattattattattatttgttttttaatgtatttatatatatatgcttaattaaaggagaccaataatatcaattgtttaaggaatagtaaaattaaatctcttctagaatttccttaaaggggaaaaaaaaaagaagaataagaaattaataataataaaaaaaggactgacccttactcccataacaaataattaaaataaattcaatagataatagttttttcgctaaatcttattctacctggacttaattctctaaactcaaattttgacggtaaaattttctaaattacttattaactatttgcaactttaaggggatccacttttttacacttaactgccaacatcaactgcttgtgtgtacactcttatgcacgtaatacgtttatgttggtatacttaatattattatttaaaatatatataaaaaaaaaatatttcaaatatttcaaattttataatattttattttttatttttaaaattttatttaattttaaatgaattttagaaataatttttaaataataatattcagcatactacatgtacaagagtatgtacataagcaattcattgtggcagttaatcgaataacaccttaaatttgttactggttcagtaatttaaaggattttacatctaaattttgagctttaaaagttcaatgtaagtgaaagttgagaaggtttagtcgccaaaaactctaataattaaataatacactgtcattaagattttttttatttattcttaagatatatattcttttcttttagtggagagtactgaaaatgcttttattttcttaaaataataaattattaagttgaaataatttttttttaataaagaaaatgtgtaatttttaaaatttatcataaatttattttgaaaggaataagaataaataaaaaagaaaggaaaagatgggctcatactgaaacacattcttataaattattattatctgttaattgtatagtatatatttatataattgtgttacttatagcataaatatcaaaaggagttatgttttaaaatttgatgggaataatcccaactaacaaccactttattagtttggccatttaatagtttttttcaataattattcttgcttagccatttttttctagaaaaagaacattcctgtttggggaaaaaataaaaattaaattatttgtaatgacaaataaatatttattaatgtaactgatatgttaatttatggagaagatttcaatggtatatcaaaccgtaattatctttattttagttattgaatcattgttaaacggttgtgattaatttaaaaatt

SEQ ID NO: 325518 - DNA, 1986 bp, Cannabis indica
catgttacatgttcataaagccgatcttgttggtctcctcgatacgagagttaaggctccaaaacttggggccttttatgtaaatatgtttaaaggatggtgtctcacctccaacatttcttggcatgatggaggtccaataattgtggcatggaatccgtgtagcttctcggccaacatactcaaatgcacaagccaacttatccatcttcaagtatctactttggatggtaaggtttgcttctttactacctttgtgtatgctttcaatgagatggaaggaagaaaagatttatgggcagatttaaagttgctagccacccaacaatcatggatggttttgggagactttaatgatatattgtttaaggaggaaaagggttggaaaaagagttaaatttttggcagcaacagaattcatggactgtgttgaggcttgtcaaatagaggatactaagtatagtgagagttactatacttggaataacaagcgacaaggaaatgagaggatttgctcaaaaatagatcgagtgcttgctaatcaacggtggctggacagtttttcaacagcagaaggaatttttgtagcagataagctttttgatcatacccctgcaattatttctttgtctcatgaaacatttaatggaaaaagaccatttaagtatttcaaaatgtggacatctcatccacgatactctgagatagttcaaggtgttggaatcaaagaattaaagacaataaactgtaccaagttgtttcaaaattgaagggactcaagttggctttcaaagacatcaaccaacagcattactctaatattcaggtgacaacaaatgaagcaagaaaagagctgcttgatgtacagataaagctccaatatgatcctttaaatgttgatcttactaacaaggaggctacctctcgaaccaaatatgcttagcttttaaagggtctcaactcattcctgtactaaaaagctaagctaagttgggtcaagagcggagatgatgaaacagttgtttttcatgccagtatcaaagagaggagaagagcaaacaacattctatcaattgaagaccagagaggagttagagcagataagccaggggaaatttctaaggcctttctttcattttattacagtttacttggctctaaaatggaaagcaggtgcaagatcaaagcaagggttatgaaacttggtcctcttgtctctaaatctcaggcagaattcttgatgaaggagttttctaaagaagaagtcaagtttttgcaattcctggaataaaggctcctggaccagatggctttactagctgcttcttccaagacaattgggatctaattaaagatgacatttctgaggccatcttctctttcttgcattcaaatcagattcttaaagagattaacactactgtttaacactcactcccaaatgtaagtgtcctaattcagttagtgacttcagacctattgcatgttgtaatgttatttacaaagttgctactaagcttatttgttccagattaaaagtcatcttgcctgagcttgtagcacagaatcagggggtttgtttctggaaaatttattgctcacaacattatgatctgccaggatttaataaggcattatggaaggaaaaactcaaaggcaggatgtatggttaaacttgatttgcagaaagcatacgaaactcttgattgggatttcttggaagagatacttcatgccttccactttcctgataaatttgtccagttgattctgacttgtgttcgcactccaagattatctcttatgtttaatggctcactgcatgggtactttgaggggaagaggggtctaagacaggggaccctatgtctccattactttttgtgctaggtatgtgttgggttttatgccctaataaaactcattccatataatcagatttacttattaataaaaaccagaaataacattttatgttgcatggtt

SEQ ID NO: 325519 - DNA, 596 bp, Cannabis indica
aggcccataatttgctacacgtgacaagtccaatccaagaatcatttgaaatacgaaacacatatcaccaactcaacttcaatctattgttgcatcatttgggcttcacgtggcccaagtctctaaagttcaaacgagaatagattataaggatttttacaaaaatattggatttgagacaaaagtttacaattttactatcacacaaattttttttacaaaaatactgtttttttataaaataacaaaacagaacaattaaaacaacagtgaaacaactaaaaaacaactgtggaacaactgtgaaaacttaacacattacacagtattttttaaatagtaccaaatgtaatgcatggcactacttccatcagctttttgtgcttttatcccactaaatggtacacaaaaatactagatttgaggagcgaatctgcactataaaaaggagacaaatacaatggaaagaggcatcaggtttcagggtagaaaaatcacactttgtcatttctttcattctcccttattattattttagtttacttattttagtgataaaaataagtgaattagagtaataatattggtgaggttag

SEQ ID NO: 325520 - DNA, 1168 bp, Cannabis indica
agaatcgggctcagatcttggtgatactctgctatagaaaggatacaagggttagagatctgagtgggaggagtcctttaattccgtttcaaccactgtaaggtttctcatactttttatgtgtttattttcatcgtcttagaaattcatattaggatgtttaaaaacatacttgttagtaaatctagatcctggtaaaatatattgcaacagagctcacattaaccttgggcgaggcacccctttctgccactattatgtaagacctatccttgaaattccaaacactagaaggggtgggagtggtgcgtggtgaccagatgctggctagcgattgctatcgcatagaggtgtagcataggaatgtcggatcttgatggcatcttggcagaagaaactaaaaagaaagatgaagatcgtgtgaaaatagaattgactattgtaagtatttatgggacgactggaaggggcacatttcacacgaaccagacgcttcggtttaccccaagagatgtccggtgattggatgtgagaaggtgaaagagtaccttacttcccaacgggcgactaaaatcattacatgcatcgtgaaaaacgctcagcaaatgagaagactgcctaagtccaatcactgccattttcagcttcccaaaaacacgcgcccagcacgtgcacaaaaatccaaaagtcagcatttaatgctctgtcaaaaagcaagagaaatcatgcctcgcacataatgacactataatttgacggctaatgatgcaatacattaaagggctcatcataaatgccacatgtgcaaaaaatttctcgaaggaagatactacaacctcccagaccatggcatatcccggaagcttgggggtaattcttatccgcaatttttgcaagcatgacacttgggaattaataaaaaaaggccaagtagtgattaagcctcccaaagccctcgctccgcgatcttggaggaaaatggccctaaacatgccgaacaaacctccgcgacagaagtcttctcgagtgtaggccacgaaggaaatgtccgtaagctggcgactctctcccttctagaaggcaggaccttttgctcccacaaagattatggaccttccatcaagatgcattggtcctgttgggttttatgccctaaataaaactcttt

SEQ ID NO: 325521 - DNA, 1636 bp, Cannabis indica
ctttaagttgattctatagtcttcacaggcctagacaaagaggccattttcatctgtgtaagtttttttctctgtaaattgaggttatgctactctatttttaatgggcctacttttgatttgtagctttttactttgtgcaactgtataataataaagctaagactttgtgagctattaggctgtggattagtttctatttttgctctgtttgttgttcatgttaatgtgttatttttcaaccttctactcgtctagacatatttttataagtcattttaatatgaaatgtttctgacatgatgtttccacactaattgcatatgagaataaaagtacatttttcattcaataataagagttcgatttgcttgttcattttatgagacaatattttacttgaactaacacatgaactcaaagtggaaaatactttcagtagtttcaacattgactagaaaaagatcacaaatttccacccctcgtaccttttcttccttgcataagaatctcttgtatatagatcacactttgacattcacactactgtttaggacactttgtttatcctctcaccatttttagacacactttagaacacacttgttggtacatatatacacattgaggttctccaggtctccctatttatgctacttagttttttcaaataagtagtggaaaaactctaataattttgattgatttcataatgaaatagtggacaggtagttagtccaaggattattgcagtgtcctcatgatcaagcaagtaatctagttcagtcgttcaattgacgtgactaaattcaaaggtacataaatatttgtcaaacaattatcaaatataaatatatattttatttatatatttatattttattatttaatgaatttatttcttttgatgttttgtatctaatagacaaaaagttatatccagaagttgtgattgacgagatgagagaagagtaagagtgggcaaaagatatgcttcaacacttgtagaatacactttcagaattatcacattgtgggtcattagttaatttcttcttttgaaaaaaaaagtattagttatgataaatatttagctagactaatattagttgattttttttcttatataatatttgttaattttgttatgtatatatgtttaaaaaatattgtaaattttgagatatgagtgttttgaatttgtattcttttttatgtttattaattgaattaaaaaaattataaataatttgttggaaaaaattatattatataatatatttataatttaatatataaataaataaatgaatttaattttttcgtattttattttattttttaaaaaaataaaaaatcaagtttcaagtccaatattgttggactagaaatgcttttctagtcctaacaaacaattttcaagtccaactttgctagacttcaattggatttttattttgggattgctttttaagtccatcacaattggacttaggaatggcaaattggggttttttcgcggatcggatcggggccccgacccgatggggcagtcccgccccggtacaatcgaatcgatattcgggtctttgctccgccccgccccggttaggtttttttcgggtcggggatgacc

SEQ ID NO: 325522 - DNA, 1009 bp, Cannabis indica
aaatcatatataatacactttctttatttatttatttgagattatttatatattttacatatttaataatttttaaaacacttaaaaaaatctttatttaagcaataaaagagtattatttaacttttcaaaataatttgtgtatcattaattaaatttgtataagtaaattattttttaaaattattaaactataatttaagaaatatatgtaaatatgaaatacttttcaatggatattacttattgatgactactgtaagatttcaagaagaaatcaactaagaaactgagagagtaagacacaaagaaacataaagcgacaaagctcactgatttcattaattaatggagtatttatacaaagtctttttgagctgaaaaacagtctaacaaactaaccaaagatagtttgaaaagtcgttagaaagcctaactaacttaacaaactatacttaatatttaatgcttacatccccctccaactaaaggtgtagacaccattttagtttggattttcagtacaaaaaatggtcagtaattaaagactttctcaggagatcaccagcttgttcaatggctagaacatatttgacagatagttgcttatccagaattcggtctcgcacaaaatgtaagtctatcttaatatgcttggacctggcatgaaacacgaggtcggcagctaaagctgttgtactctggttatcaatcaaaataacagggaattgaactaaggtgacctgagttcagttagcaaggattgaatctactttagtttagctagagcattggttaatgcatgaaactcgctttcagcgcttgagcgagccaccagttcctgcttcttagcagaccaactgatcaaattatcacctaggaataccaagtagtaggggtgtttatcaaactgctcacaccgctcaaatcgcccgcaccgcaaaaaaaaaatgtagtttgaaattatttgcagtgcggcgcggtttgaatttttcctaaaccgcgcggt

SEQ ID NO: 325523 - DNA, 1040 bp, Cannabis indica
tttcagtaccagttttattattccgcatttaattaatcacttaattaaataatttaactaggaatattaaaatacgaaatttcaaaaattatacagagttttgagaaattctgaatagactgtttgaatcttattttcagcgcgttaattaatataaattttattaaaaaatatacaatttagactactatgtaaaaattaaaattaaaactatctagtgataaaaacaagaagcgatgtatcggtacacctatttttatgagtgcaccataaaaatttcctatatgtatatgtgtatttatattttctcaataatatatgtatgcatattgaatatgttgttttatatatgttgtataaaagtcctaaacttcttatattaatttatatactggtatataataataaaagaataggtggaaatacagtttggcccctccttgctccgtcatttggttcaacaactgatggtatatattattgggatttatgtcctaaatgcaagtaattaatggataatatattagagaatatatgaaatatatctataagataaatgatatattaattataagagtataattattaaattctcaaaattctttattcttatagagaaggtataatcttgtaaggatgtataagataattgaattatacgagatgaataaaacaagtcggtaattttaatatggaactgctaagtacaagattatgcactatacttctagtgtgtatgtgtgtgtcattttaatttggatcacatatatagatgaacatgtagtatatgtactgtgtataatttaattatgcatgattggaccaatatgtaataagcatctttcattgacttggcggttaccattaaaagaataattcatatcacaatgatgattattagtagatcagcctgaatcctaagtatacatgaactcccattcatgttcattgagttctttgattcactcgttaaagtttctcagaaaagatgattcttacaacttctattttggagcttaacatgagtgactgggaacatg

SEQ ID NO: 325524 - DNA, 463 bp, Cannabis indica
aaaaatgtaactattcaataaaaatgtaactattgaatagtcacccatatatatatatataaaagaaactaattctttaattcacttcattgacgaatggtttgtcttatacactttacaagagaatttttagtctataattctgtcatctaaaatctctactttccatatatatataatacactatataataaactaattgatgttttcccaattatttttattttagttggacttcttttttttcttttccacatgctctttaaagagccagcaacattatcaagtataatagcatgtttattaataagtaatgagaattgataagataattattatcttatatttatttacttacattattaaaattaataaatggacaacttaattaaataaaagagaaaagaaagaaagaacttctccactaatttataagaaatgtcattaaggataatagatttta

SEQ ID NO: 325525 - DNA, 905 bp, Cannabis indica
tattttgctgaaagaaaaaagaaatggagttggtaaagctagctttgaacttacgtgttggagagtctcgttggtctggccggagaagctctattgacggcgcctggcgtttcgttggtctggccggagaagttccacggtacggtggaaaccagagagagagagagagagagatgcggctgtcgaataagattagggatttaggttttatttttatttagtaatattatatttatattatatttgatttaggatttttcttaaataaactaaagtttttggtaaaattgagaataattacttaaaattttaagtttgcaagtgttatacactcttttattattctttctgagtatcgactctgttattatcttaagcaaatcacattgatattcccagatcgtctaaaaaaaaaatatgtaatatgaattactttcaaacgttcttataataaatttaaaatagaatttgtactgacaaaactggaaaagaattaaagttttgcaaatattagctacttatacgactaaaaataaatattgaatttaaaccgcttacaaacttaaaactttaaatacttatgctatttatatcttactattataaaagtatggtactagtatctatattgagtagtataccaattttactcctaataaatttatgaacttacaataatgctaatatatttttgaacttttctcttgatacaagtttgtcttgtcttctatctattgaaggacatgattaaggttgaaatttgtatattttaagcttttatttgtatgtataaaattaatttaattaaatattttcatggttttaattgtaaaattacattatttgaaaatatttaatttattttaattttgtgttatttagatttgaggctttggacgggactt

SEQ ID NO: 325526 - DNA, 993 bp, Cannabis indica
tattaaattacaaatttaatatttttaactaaaataaaagcaaatttttctaaaaaataatataaatctttacaaaataaattaacaaaataaaatatggctttatttcataaaaacttggacatatggaaatataattccacacaactaacttaaattagaaaaaagccatagattaagtaaaatcataatttctccatatttatcaaacttgaggaaaaaaatccatattctacataatttcctccatagaaaacccctaaagtggtagagttgttattttcttattatcaattagttaatatatttaaaaaaaatatttagtgcagtacaaaatatatattataaactaatattatatatttgtaattttatttcaaaataacatcatgtataacatatatttactaaattataatataaatattgtgttaaatattttttataatcattatttttttaaatatttttcttttaattctaaatttgatattgacacttacatattgaactaattcacatgctaaacttaagtcaaagtttgctacttgttgcattgaattataaaatattagatattggaacttgaccaaaacaattaattattattttaggcaactagaatagactaggctagaacaaagtatatataattgagatagggcaattattgtaatttattaattaatttattatttatataaaaaataattaataatagttatcattattaatgaaagaggtgtggttgtcactttcatatttcccaccttcctatgaaattgtttccaactctataattaatataggaataggttaattactaatctttctccccgaattttgacatgtattaaattatgctccctgaatttttttgaccgttaaaaattccctctaaactattgagattgttagatttaaggacttttgtctaattttagtaaaaaaatttaacatggatgaaagttttagagacatgatttagtacat

SEQ ID NO: 325527 - DNA, 2115 bp, Cannabis indica
caaactctccaccttgtgacaattctggtcggaattaactcattcttctcatttttcactatcgtcattccttttttctttggcaccacttagacaggactcgcccatcaactgtctgaaataggataagccaccccaacatctaaccactttaagacttctttttttacaacctccttcataggtggagtcaattcgttgcgcatcgatggttggcgttgctccttcctccattaagattctatgcatcacagttgaggagttgatccccttcatatctgccaatgtccacccaatggctatcgtttgttttcttaggaccatcaacaacttttttgtctccatagtagaaagggaaactgacacaatgacatgaagtgtcttattctctcccaagtattcacacctcaagtgatctggcaaaacttttaattcctgttttggtggcttctcaatggatggaactgacttcattggaatgactcgtagttcttcataatattttctgttcaatggcccataagagtcaagccacatagcatactccatcacttctttaccatcttgttgaaccacctcctcttgcaccgaagtaatattaagagggtcttcactgtgctcctttgactctaccaacttgtccaccgcatcaattgaaaaaacaattatcattagcttctgaataagtcatcgccttcagtacatcaaatactacctcatttccttgaactttaagctttaactctcccttttgaacatcaattagtgctttccatgttgccaagaagggtcttcccaagatgatagtaaattgttgtcttcttccatgtcaatgactataaaatcaccgggaaatataaatttatccaccttaacaaggacatcttcgataactcctcttggatgggctaaagaacgatcagctagctgtagtgttacaattgttggttttgcctctccaagttgtagccttttaaatactgacaagggcataaggttgatactagcccccagatcacacaatgcatgtatatttttgagcctcccaatagtgcaaggtatagtaaaactccaaagatcttttagtttaggagggagtttcttctgaagaattgcactacactcctttgttagagctactatctcaaattcatctttctcttctttgataaaatctccttcatgaatttgacatagcttggcatttgttccaaggcctctacaaaaggaatgttgatatgcaactttttcataacttcaagaaatttactaaacttcttatccatgttattcttacgaagcctcaaaggatatagaatttttatgtgatgatcaatactaattggagatgaagtttctttttgttgaagaccatcagtagtcttcttcttctcttgtgttggtgttggttcttgttgatcattattttcatcatctgacttgtcttggcttggcttgtcatagttcttaccacttctcaagctgattgccttacagttctcttttacatttacttcaatagtgctcagcaagttaccttgagtcctgttagtattttgagtagccaactgccccatatgggtttccaagaccataatggaagatttaatctctaacatgaattgcagtagctgtctatctgagaattagaccctccactagggccttattgttgttgattatgttggctttgctgagactgatttctttgtgggtagataccttgttgttgctgacttggaagctgttgttggaagttctaccgatgaccccttggttgaaaccataattgttgttctgatagtttctaatggcttgggcttgttccattggcaaactttctacatctacagggtaggtgtcaaaagtatgaggccctccacatagctcacagataatatgagcttgcttttcttaagtagtcaccaatttagttaagacctccacctgggctgtcaacttggttatagcatcaacttcatgcatacgcacaacttttttagattggcctctttctgttgaccattgttgattagtcatggccatctcttcaagtagttcaaaggcctcattcgcacttttcctcataaaagccccactagctgcggcatctat

SEQ ID NO: 325528 - DNA, 1937 bp, Cannabis indica
tatatatatatatataaagcttttcattttttattagctcgaatataaaaatatttattttctatatatttggcatgcctataaaaagtcttatggatacaactctatataagaacaaaaaaagaaagttggaaaagaaatcaacaactatggactacatgtactcgatgagtgatactattttaatctttccaacaccataatatgtacattaatgaaaagtgactaaaatcaagcactccaacacttactataatttgttctcatttctctcttagatatcaatgtatcttattaatttctcatcttctttaatcttagttatttagtgacgacttattttttattctttggcttcaaacatatatatctaatataaatttatcacttgaatttaatagtgactatcaaatttattgataaaccgttgttccttaataactgttattattttgttgaatttctttgtttctaaaatatattgtgctttgaattcagagaagcaaatgaatcgtatttcaatttttattgagccaaactggtttaaagtttgagttagtctacatgtataataagccacaaaatttgattatcggcacactcaaccgtggtgagttttacattattacactttttatgatcttattattttttttgtgctacaagcaaacaatgccttcaaatcttactgttatagttgttttttttttaatttgtgtgataggatttttttagatagttgtgccacaaagtttttaactaatttagaacactgaaaaatagttaaacatgtaggctagctagcaagtgttggttctcttagccaattcattttttttactttttatttgctactactaataataaaaaaataaaactaaatatctacttaagggcaactccaatagaaaaactcaagtgtagtgttaaatcaacaccaaaaatatactatttcaatactaattttttttctatttccaatcacaacactaaaagtatattcgttattattatattatttgattaataaattatattagtatataattatttgttttttaaaaaggattatttaattatttaaaagtataaaaaaaaagaaacaaaaagtaaaaatgcagttgtctacagtgctccttattattagtgggacactgtagactcccaccaaaataggattacttttagagttaggttggaggcttttggtgaaaaaattacatcatatttgagttttttaaagtgccattggagatgacctaaatatctcattgtactctctctctctctctaaatctattttctaaataattaataaaaacaattaactcaacaaatgattattgccaaaaaatgtgatatgtcaataaaaataaattaaatatatatcgatgataattaaaataataataacataaatagtcaataaaaaataacaaaaatatattagtattattttttttttttgaataaattcagaagattaattaattaataatatcgttcaaaacaatagattgcactttagatgtgcaatcctccaactgaagcacatgacttgtagagaaacaagagtctcttgccaagcaatgagccaacttgtttgcagattgtttaacaaaacacaaatcaatacaaggaaaagataaaagcaaatttcagacttcttaaagaaggagaccaaattgggaagacatagaaaaattacttttaatagattggacacagaccaagctatcagtctccaaccaaacgtgatcccatgggtggtaagcaatccaactcaaaacttctttgatgcctattatttcagcgatttcaagttgaacacgaccaatctttctcttggtgaaagcttctagcatattgccatgatgatcccgagctacacaacccacaccaaatcgaccctcttgatcaaataaggccccatcaac

SEQ ID NO: 325529 - DNA, 1460 bp, Cannabis indica
gttttatgtgattcttttggttgcagcttgaggaatttgtggtaagctttctaatctcatttttttttttgcttatgttgattctaattttttgaagctttgaatcttgttcatgatgttctttgtgtttatatatgcatgtcgatatgaattgatgtaagatgtgatgatttgggtgtctttgagcttatggtgtatgttgttttctattaagttatttttgtatgattttagagatgagaatagagtttgaatgtctaggttttgatcatgaaattctaagtttttcattgaagcatgtgtgctcgaggtttcaagctttgaattaaagtgtaactatggtatgggtgctttaaacttgaatctcttgttcttgtacttgatgtaaagcttggttttgtgcttaaaattcattgttaatattggatatgcttaatttagttttcagcttgagtttatgaatgaatttctgctgtatgatgcttggaaaaacacctcaatttaattgagaagcttgttggtaagttgtggtattttgggttgagtttggtgcattctttggcacctaaaagtgagtttttttggggtttttaacctacgagccgaggcatggtctttgagtgccatggtccactagaggttttttagggcaaaatgtgttaaaacttattttgatcataacttttgactcgggactccgtttgggacgttcttggtactgttggaaagcttgttttgagctctacacgttaatatgtaattagaatgcaaataatgtgtttatgtgtaattggatttggaattaaccctatttatgaaatcttgggatcgtgtgactagggttaccagcgcttgctcatgaatactcgaggatttggaatctccacatacttgaattacgaggtaagacagtaaaataacacattgagaatatcgcagtggccacatgtatgttgtatttgtatacgttacgcgagaaatcgagattagggttattaacctaagtttcgtaataatgtggtgtaggtttattaccctagaatatatgatggtaagaaagcaataatgtgcagtaatatataatattgctaatcaaaggaaaacgtgaattagggttattactatatgtgtcatgaattatggtcattaccctaagcatttaagttgtgaattagggatattgtcctaagtaattatgttgttgagaattagtgtgaattacggttactaccgtcaatatgtattattttgagcgtgctataatgtgttgtatgagtaaatgattagttatgcaaggtagggttattatcctaaaacttcatatgttagagtatatattgaaggtattgaatgtatgcatgtatgtgaagagttgtgtgtataagacataactggtttagacctggtaaacatcatcaggataaaccactgtaagaacataatgtatggattatgtatat

SEQ ID NO: 325530 - DNA, 2355 bp, Cannabis indica
taactagttaaatatgtattaatgtggaattatattattatataatttaatatgtgtgatttatactgataaacaacatgttaagaccccgttggtgagccaggggcatttttgtaattttaactcgagaagggtgaaactgtaattttaatgttatagcgtgcttatggactatcttattatatagtatacatgtcttgtccttttgcaggtgttttttgacaagtcagcgttatagtcacaatcatgtatttcgggccgaaccgggttcgtggccaaaatacattttcaagattttattttggccattttttaaattaattgaataatctaaaaatgtatttaaattgtggaatgtgatgaatgaaaattttccccttgaattatgcttatgtgatatattggccttaggggcattttggtcatttgaccatttgatttattttcaacaaaatgatttttagcaaaaattgaaatgcatttctagttgtttccggccctggccgaaccccccctctctcctttcctcaccttctctaaatttttcttcaattaattttggtaataaagcttggatttggagttgttggtgcaagtgtgttggaaaagcttgaggtagttgtttcacatctgaatttctgaatttaaatgctatttattttgatgatcttttgtgctcttgatgttcataggtgagtgaattcatgttgatatgaattgaagtgaaattggtgattttaatgatgttgaagcttataggcttatgggttatgcatctaggctactttagtgaatttttaacggttatgtttgtgttggaaatctaatttttggttctaatcattgttgtttcaagcttaagattttggctttcaagatcaagcttttaattgtggaattttgatgattttagctaaagtttggagcttattagtgattgttgatgttatgactttgaatgcatatattggtactgagaagagtttgatttgtgtgttttaactctctgttatgatagttctaattgtggaatatgaatttggagtttgttcaagttttgggtatgtttggtgtgtttttgagcttggattcatgttgctggaaatgggatttttgggtttggaacccaggtgccacggccccactctttgagctctgcggcccacccctagaaaatcctgggtttttcaacccaggtgtcgcagcccatgtgaggagtgccgcggcccgccttgtgtttctggggaatgtgttatttcatcgttcgtaacttttctctccaaactccgttttgggtgtttggaatatcgttggaaagctcgttttgagctctatatatttatctgtatttgaatgccaattatataattatgtggaagtgcatttagggattaaccctatttgtgaatcccaaaaattgtgactaggattaccagcactttgtcaggagcacttggggatttggaatctccacatattcgagacatcaggtaagatagtagttagcacgtaaagttaagcgtggtggcgctcatgttaaatattataattgtgattaattaagaactaggattagggttattaccctaaagtgagcggttatatggcctagggttattaccctagtgagtattgatttttaaatgctatatcgtgcttttatataaagatttaaagaattctgtgttcaatgcataatttggttggacttggtaattagaacagagatcaataggcgtgtgagcgtaacacgcaggtatatgtcaaatacacaataagtgtaatggcattaatatatatgttgtatattttattgtgtatattgttatttatactgtctggctgggcttcgctcacgagtgctctactgtgcagaaaagggtaaatctgtctgtaatcaaccatgagttcgagagcttggcggtgcttgtacatgttcgagccacactagaccaagcgggttgggtctaccagtaattgtattttgtaactttggattttgccgcttaggtggacacgtgaaattaacttctaattttttgtgaaaagttttgtgggatcccgagatatgttatcattttgttttgtttgtaaagtttaaaattattacaaattatatttttattccattgcaaataaagtttaaattttccgctcttacctaatagtaatcgtggtttagcgggattagggttttattatcagttgtcatagcgtgcctaattgttagggcgttacaatgatagtataattgagtgggagcgttaatcatagatatagaatttagctgtgaaacgataatttccttcgagcttagcttaataaaaataaatgattgaggcctcattttagtaa

SEQ ID NO: 325531 - DNA, 1566 bp, Cannabis indica
ttacaaatcacactaagtaaatgtttatttagaattcacacagctgtgaatgttttgcttttattgggcagagatgagcgcacattaaagatatgcggtaagccttatctcatgaggatgcctcgctgggaatggaaccgagttaactttgatggcgagctggggttcgtcatataacttcttgagattgatattgctttaattctgataactgcagtttctgttgtcgagatgatctttctcctgtgcatgccatattacagcaagataaatgcctcgctgtctatcaccttcttttacccctctactcacacttagtttgtatactgtgttatacacgctaagtattattatatctcctccacgtgacgaggttaaatgcctcatcatgcacacttgcatttacatggtttctcgttgagacacaaatcaacagttagtacattttttatctcgcacaagactgttcagtcatccgagttataaacatactctgctaattatgtttttaatgagttattccatgtcaagtgtacttacgattgtgtgattgagttcttcattcttccctgctagacacatgtcttcttctgatgtgctcaccgaattttgggtataacagaatggtacatgggtccactcaagagatcttattggtaaggaattctagaatttctttggtggaatcttctgtctaagttcaagcaatctggtgcttaattgcgaatacttagtctcagagcaactatccattgactgtgaggaagacttgattcgtcttcccgacaaagaggaaattcgcaaaactttgtttagtatgggaagcaataaggtggcgggaccagacgggatgtctgctttgtttttcaaacattattggtagacggtgggtgacgacttttgtgatgctaccttggatttctttagatcagggcccatacacagggtagtcaatgcgaccaacttgattttaatccctaagactcgtaacccgaccaaaacccatcattttagacccatctctttgcgtaatgtgacttataaggttatctcgaagattatagcgaatagaatcaaatccatcctccccaatgttatttgtcccacccaagccggttttgtgcctaggagggacatccaagataacaatgtaacaccctaactagcataagcgtattacgtgatttttaaacgtactgtgcagctcgttgctaatcaacgaggtttatggaaattgtgattaattaaaatttttgctttttaattaaacttatataatatttcatacaaaatactttgggatcccatttacaaaatactttacaaaaagtttattgtctattaaaaataacttgtcgcccagcaaataactacagaagcactgttgtcccgaggatcttacgctccaggcctaaccgccccgacatgtacaatcttcatcggctcgtcctcacggttcctcagccttggccttgcccttacctacacataaacatagcactgtgagtcgacagactcagtaagaaaagcataaatcataaaacatacataaatcccgggttatga

SEQ ID NO: 325532 - DNA, 718 bp, Cannabis indica
gaggctgagcatcagcctgcgccaaagaagcaccattagcatcagctttcaatgagagagttgacatttcagaggaaggttctggatgttgatgcgagagagtgttggtggtatcagaaagtggactcaatcctgtatggcatcgttttaggacattacgcacattaccactcgaagtagtcaattgccgcttagagaacagtgaagacattctgttatccttacccgtagaagatcctggttcaaaaccagtaatggaaattggttaaaaccaaattgtcttgaggaagtgatgagaccactgttgagtgtgaaaagatgatgttgtcctgctgtagtgggctactgctgacatttgatggtttaatataagcataggttgttggtgtgggcattgacaacctaattgaagaattaggcacttcagagttataagtacattccttaatgtttttctgtgaggaacttggatttgtagtaggtgtgatagacaataaattctcagtatccaaactggaagttgataaggaaatgaattttttgttgcaatgcttgacactagtggcgttaccatgtgatgtagaatcatttgagtaaagatctgcatcaaaaaaagttattttattccttacatctaaggggtgttcactaagtatccgatccaatcctattcgcacgatccaatccaatccaatccgcaaaatgcggatatccgcac

SEQ ID NO: 325533 - DNA, 865 bp, Cannabis indica
gttgttattgtattgcctgtacatttaacttttaattttaggaaaatgaaaaaacaacgtaaatgaaatttaaaaacaacgtaaacgcaacatatttttgaattgaaattttaacatatactcattgttcttttcatattttccagaaattcaatgcatagtttttttctagattttcgaaaatcataaaacaaaatagtaaaacattataaggctacatgagagcaatataatgaggttactttcaatgattaaacaaagtcagctcaaggaaggggatcacatctactgcaacaatagagctcacacctactctcattatggtaataataatgtattaatatttcatttgtgagttgtgactattataagggcttttttttttctttgtaattacgatataattgcaagaatatacatgggagatgactaagttatccatttcacaagaacaaatacaaaaacattaaataacaacctagttatgaaggaaaacatttaaaatattggtatcttgtatttttttaattgtatagtataaacaacacataacaaactttactacaacttaaaagtaactttgtttaatatagtatttttaaattaaagataagatgtttcaaaataatgcaaacgaaacttcataacaacatgaaaataacatttttgttcttttttttttattttttttttttatatattttgaaatttatgtttatactttcatcttttcaatttttatttttaatgttgaaaattatggaaagattaatcctactgaataaataattcaattatttttagatgagatgagtcaagatgttatgatataatatttttttttctacaattatttctttatttc

SEQ ID NO: 325534 - DNA, 816 bp, Cannabis indica
taggttgttaatccaacatacttgttactaaatctagatcctggtaaaataatttccaacagggatctatgttggatgtgatacagtggatcgaaagttgattatccgaaggggtttcttcaagtttcaggttgagatttcgacgactcaccaactgtcttcagacttctatcttgatattcgaagaggcataaaggaatggatacaattccggtacttcaaactacctaaactgtgttacaactgtggacacctaggtcatgataagaaaagctgcttcagggtgacggcgtatgtctatccgccggagggaaaggcagttcttgcttttggcccgtggatgaaggctgaaacggtggtatacaactgtttcaacaccagaaattagttggactattttcgcgaagaatccattggtcaaagaccaagaagccaggggaacaccatgaaaccagtggattttaaggataaaggaaagcaaccaatgaccagcatcgggagtcagaatgttttacgtcctaagtttgttgttaagactacaaagaaggctatcagagttgctcgggaacatccagggtccaacttaggtgagaaattaaaattggtgaaaaagaatactttggtggcagcagacaaacaaagtggcgagtctggtacaagggaagcaagtccaaaggctctatttatggacagacgtgctcgatcagcctctcctcgattatggggcaatcattctcaaggcaatgcaacagttgtcaatggcaatgacattataaaaaacttttcccatagacctgctgttggaatttattttac

SEQ ID NO: 325535 - DNA, 994 bp, Cannabis indica
ttctttaattttttttctttcaagatcacctcttgaaaactcttctgatctcgttcctccccaaaaatataggtgtgtccaagatatagattctaaagctagtgactgcatgtgctaagttgttaaattagttacgacttaacaaatttaataaactcctatagaaatatctctacatcaacacaagttaaagttcttccggatgaagcgaacaattccgagactaagaactgaagtgtaaagtacacgttgaagggtctttcgagataagaaaaaagatagttggagtcgattatccgggactcccttccaggaaggaataactagccatccgaaactcctttttggaggaagacaagttttcctgaagattccttccaggtggacatgatagacatccggaaacacccttccggacgacatctatcattctacaagacttatttcggatggtgaagttagacttctgggaacgctctttcagatgtcatctaactttcaataacgagaataacttttggaatctttttatttggagaaactatattacaattggctttcatatatttaatggaattttttttaaaatatgggaaaatttaatggagtgtacttttatatggcataaataaataatgcaaaaagatatgagattaaaaaataattaaagtttaaaatatgggaaacaaaaaaaatacaataaataaatttgataaaatttctaataataagtttcgccaaaaaaatcgcaagaaaagtcaccatcgctggaaaaatcactagaagtagatgtctcagatgtaaataaaaataaaatcggttctataacattataaataaatataaataatatagaataactcaaactggttataaattaaaaattaaaatagaactggttctataacataatgaataaaaataagtaacacacaataatttaaactagttataattaaaaatagaaccggttctacaacataatgaataaaaa

SEQ ID NO: 325536 - DNA, 1048 bp, Cannabis indica
gttgctatttttatttatttttttttttgttatttttatgtattttttaaataatttcaaaattgggttcttatttaaaaatatgtgatatgcgcctcatcgacaatggctaggaagtatgttatggcctaatatctagaatggattgagtggttattagatattaagattagttggttagttttattctgttaatacttgttattttgtatgtcggttatgttgacataacaacttcagctataaatagctatcatgttttgtattgcttcaattaattcgatcaataaagactattctatatttttcttctattttctctgtctttagtctttacccactattatagtatcagatgctataatccaagaaaccctaaaccacctcagcttcctctgccttcaacaatggtgcgcacgagagcacattcgtctgctacttccactgatcatcccgtggacgatgcccttccgaatcatgttcctccagcatcccagaattctgcagatctcccacctcgtgttccaattccagctgcatcacctcatcatgtcaatggagatcgaccggcctatgaggatgtacgcagtccgtactacctcagcaccgcagatcatcccggaatcgctcttgtcactccggtcttgacagataggaacttccagccatggactcgagactttaaactctcaatcggggctcgcaataaaaccccttttcttgatggtacgcttcccaaaccctctcctactaatgctttatatggttcttggattcgttgtaatcaaatggtccaatcttggatcctacactctgtttcacccgagataaaaagcagtatcatgtatcttgatactgctgcagaaatgtggactgaacttaacaataggttcaatcaaggcaatggtccacagatctttgaactcaatgaaaatctcacttttcttcatcaaggtgaagattctgttagtacctatttcacaaaactaacagccatttgggatgagattactcaacttcgcccaaaaattccctgtacatgtgtagc

SEQ ID NO: 325537 - DNA, 1178 bp, Cannabis indica
gctaatcaaagaatttattgaaaatatgaataattaaaactttattaaataaatttactttaataattaaacataataatttacataatctgagatcccgttctaaacgttacaaaatatttaaacttcaaaagttgtcatctagcgactagcaaagtgagccaacatcgtcccgaagaccctgaatactccaggtttaattgtcttgatatgtacaatcttcatccttagctttaagctttagactcacaatggttcagttctagcttttacctacacatatatgtaataactgagagtcgacagactcagtaagaaaagtataatcataaacataaacatatatctagaccgtaactaggcacccatacagctaatcacgatctgataagtgcgtcaggaacattctcgacaaagtatgactaactacgaatccagcctatacttagtactctggtcatactgataaagtagaagttaattcatactatctggaggcctaacatatggaatctgtgtgaaactctatgtacacttcacggataccctgatatgctaatctaatggccactgattttcttaatatatatttgttggtacctcggtgcaactctacgtacacctcagtggtaccatgatatgttattcttatggcaattaatatgcacgctaaacatgtatacgtatatgcaaataattctaataatcttaccttaattccgaatgcaagtatgtcaaaaaccctgagtggaaactactgctcgacgatttataggcccctgagtcacaacatacgtaaaacttataagtgatacgctaaaccactttctagggacttaaaatcaaaactaaaagtctcccattcgatggataacatggcagtaccctaaacattttaaaaacatgaaattcaagggtaccgtaaactgtcccaactagtagaccggttccccaaccagaataccaattctgaggggtctgcctggggatgaactagaattctgattcctacaggtccaaactgaactggtcgactggttcagtgtagggaccccaaaaaaccttctaaattattcaaatcgactcaaaatcaatttaaacattacaggtcacctattcaagccataaattgttggaatttattttaccaggatcttagatctactcacaagtatgtt

SEQ ID NO: 325538 - DNA, 933 bp, Cannabis indica
tagatttttttgtttgtttttttagctttatgctgagaaagtatatttttataattttaaaactttacagacgtatttttgtaaataaaaattttagattataaaaatataaacaaaacgtaaacaaacgtatttttttaaaattctccttctatatataataatttaaatagaatatagtgtcttattttagtaattcatttaattttgtggtagattattaaaagaattattaacattttcactctctcaactttttacattatcaagttacactccttatagtaaacaactcgttaataatactcctcgcaatataatttttacagtaacataattgttttattatatttattcacttttatcgtgaaacaagtgacatagtaaattgtaattgaaaaataaatgcaaaataaatacatttaaccctttttaatttaatgattaaaaaactcaaactaaaactattaattagtataaaaaagaaaaaaaatatatattttattttattattcattaatgtaaaaagaatgaacaatattcaatttgcatctatttattaactattatttaccacttcacttatttcacgataaaattgaataaaaagtgaatagaaaaactacattattgtaaaatttatatttcgatggatattattaacaagtcgtgtatactagaggaaacacaacttagtagtataaaaaattcagaggacaaaaagactaattattcatcccttatcaaattatagaatgtaagctcatataacacagatgtttaaaatttactaaatctcacttggaaattaatcaaaatccaatcaacatagtcttttggccagagagcaactaaagaagaaaacattttgtttgttgtattaaagaagaggtatggaggtctttagaagtatcaaagagttattcatatatt

SEQ ID NO: 325539 - DNA, 2043 bp, Cannabis indica
ttcatgctctcaatcctcatccaaaagtgtctcataagcttaatatcaagtgatacgctcaagttctcgttagaaaccatatcgataatgttaagcctagctttctcatttgccagaggatccttacttcttgttcccacgtaaagcaactccaaggggatgtgggatcggcgagctacttcttttgcggccctagtgaattttcgtatccacccaatatcatctcctccgtacaagcatatatatctcttctctaccatctgaaacatgtgcatacacaaaattataataacatttttctttttcacaagaggtaaattaatattagagtaatttatcttccagcaatttaatacctaaatcaaaattttagcggcataaatacctttcgttgcatactcgacactagatatcatgacgcatcatttaaaagtgataatagttttatgacgataaatcttatttatgattttaattagtgtaattatatatatacccaattagtgatgtctgggtggaggcggtgaaggataaagttgaagttccagcaattgttttgcttccacaattcttcttctctaacatatgagaaagggtaggctctaatgccccatatgcccatcatgtaaagggcattgtaatgcacatattgacctctctcatctaaaaccaacaccataggcttctcaatattgaacttccatttctttatgatggagctgattatggcaggagaaagcgccacactattgtagatcgtgtaacactccattttctctctcatggtcataaacaactcaactagatcgttgtcccagaatactttgattggggcccaaactacctcgtacttattgttacactgcttcttttctaagtacatctgacacatgagtaagtattcatctctgtttgtgagttcaacatctacatcagtaatgaataaagctacaactttccccttcagcttttccaagtcatcaaactgtgtttcagaaaaacaaaaaaaaaatatatatataaactaattataattgtgattaaaagagagtttgaaatgtaaattaaatttggggcaaacccttttcttggtggaaccatcgtagagttgaggattgccatatttggagaagaagtagaacaaggcaaccaatgacttgaggttatcggggttgtttaagtacatgcgttcaatcatctccaatactgatattacatttataaagtaggatatattacattacatttatatatttttcaatatttattaaaaatattaatatacaatattatatataatacaccacacatattaaaacatattttaacggccaataatcacctatttcaaagtatttttttttttttaaaaaatataattatctttaaattaaatacctaacaattcaccccataattatagatacattattaattattaaataaaaaaatttaacataataccttaattactaatatagtacctcaaatattataatactatttacattaatattaaagatagagtgcctcaaataaaaaaatattacaccataataattgtaacaatacaaataaataatttccttttaaagaatctaaaaataattttattttgaaaaatataaattaatttcaattaaaaaatatatacatataaaagattcctcatacagatccatacaattaattaatcaaaataaaaaattacaaataattgtttgcttcccattttcatcacatcacaataataaataatggcaatttatttttttgtataaataatattttgttatggtaaaaataaacatatatgtatttttaacttttattttgtaataagtatctagcaataaataccttaacaaaaaaaaaaaaagaaataaacaccttaaataaataaataaacataaaaaaatattattgtgccaccacaacaagttgtttttcttaaattaagcaacaatatttattcttatataaaatgaaattttattatagtgaaaaataacactacatgcaacctcccattcaataagttag

SEQ ID NO: 325540 - DNA, 1192 bp, Cannabis indica
taaattgaagctacgatcaggataaaaatgagaagttctaacaaaactatgaacaattacattcgtggattttttcactaaacaaactttcacaaaaggtaaatcgacaaggaatgctttacaatctttaatgatatcaccaaataaagaaatcatagagaatgaactcctcaaagcttgcactctaaaaaatcctgctgccacgaactctgcttaatctagctgagagcttcccgaatgctcacagcttctggaacttcagctgcggttgatccccgaaaaaaactagtttgtccttcaataaagaagcctttctcatcttgagcaacaaagccataaccaaaaccatttagctcttcaaaatagcactatctacattaatcttgacactattcaatggtggaacggtccaaatctctacgccattattctcggtcaaaccagaaaatgacacttccaaaccaaaattttgagcttgattctattgttcaagatagcttacagcagaggaaactatttccaaagcactgacacacttttgattccaaaaattttcattttgagcacaccaaatttcctaacatgtagcagccaacaaacattttttctcctgatgcagacgcgtaaaacaagcctcaaaccaacagaaaaaatctgcattgttcgtcctccctgtacctattcctactcggttccagaccaactgggcaactggacaagaaaaaaggcaatggtgaattgttttagcctcactttgacaactaggacaaacaagattaacattcacatgcttagtttgaagttgcaccatcttgggggagagtgcccgaacaagcacgttaaacactctaaaccaaatctttaattttggagggacctttaactaccagaatttcttccagaaatgagatgaactttatgtactccaattaccattcaatttttggattagattgtaggtcaattttactgaatacacacctgacacttctttagtccatattagcttatcttatggagaagacaaaataagaggaagactaagaatgagacgactgtcgcacttattaaacatgtcattaattaagtccacgtcccatactaatgcacccattgacggacccactcgtattagtgtgggggctatagcccccaataataaatatattaccttttaaaaaattaaatgtaa

SEQ ID NO: 325541 - DNA, 1836 bp, Cannabis indica
agagtagtgcccacacacatcaagtggtacctcaatcatagtgtggaagatcgtgaagaatccagattcaacagaaggacattcggactcagatcttggtgatactctgcgacagaaaggatacaagggttagagatctgagtggaaggagacatcatattccgctgcaaccactgtaaggtttctcatactttatgtgtttatttataatcgttttagaagttcatatttaggatgttaaacaacatacttgttagtaaatctaagatcctggtaaaatatttccaacatgtaaaacctgccttcattctcacaatctgagctattccaagatggccttaaactcttttgatgaatccctcaaatacaataaaaggaggattggctcccaataccatacatatgactgaggaactccaattagtagcctggattttaacctcttctatatttatcatagctattttcttcccctctttaaccactggttcagcaaatctatgtttcaatttatcgtaagaaatcttaccatatgtaaaactctgccattgttgcttcgctgaagcttggaaactctccttttcgacttcctcagcccagctagggcttttctgtacctcatttccttcttgttccacttctctctcgacccgagtttctcggagttcaccagtttgaattgcatcagagttaaaactgctttccccaggagcagtcgaaacagtaattgatccttccaattcatcttcaaattcaggaacagccaggggatccgatcgagttatagtcttttggattattcttttcttcttcgccatggaagagagaagaggagaccatgcatccctttattcatttgtactatgttacttacacctttttatgccattttcatgaaactccataaaaatgtaattgaaaaaatgtaaaattaattataaaatgtaatttataagaatatttaaaaaaaaaactaatcattttaaacactttgtataaaaatctctttatttaaaaaatctaatattctttgttagtgtttggtaacacttttattttttaatgtattaatcacaaaaataaaaatagaattctttgttttttaaattttatttttaaaagaaaattgtattctataatcacttttatttttttaatttttaaacataaataataaaagtgtgttctataactacttttttgtttatttaagtgaggactaagaaactgagtctaggtccaggtttgagtcttggtctagtgtccgaggttcggggttccaggtttgggtcaagatccagggtatgggatctgagcataatgtctaaggtttaggttagggtccaagtcggggtccaggttggggtctagatcagggtccaagttggggtttgatgatcgccagggtctaggtccgggatttaggtccaagtctgggttcaagtcgagattcgaatctgaatctgagtccgaatttgagtttggggttttgaatctgggtctgagtctggggtttgggtctgggtcgaggtccgagtctgaggttggggtcaggatccgggtccgagatcagggtctgagtctaagtcagggtccatggtggagggcccaagtcatgtctagggtcgggatctggatccaagtctggggtcgagctagtccgataccaaaatattaataatagaaaatacaaagagatataatgaaattacttttttagaaaaataatttagaaagtattttttttttttaaaaaaaaaaggaaatcaccttatatactatttttttaattattttttttttgaattttagatttgggttgctccggtaatttct

SEQ ID NO: 325542 - DNA, 815 bp, Cannabis indica
atagataaattattaaatatttttttaattcataccaaaaattctaagcacttacatcagttgttctactttaatctttaatataacttagagcactcacagtaacttctttactctatccttcaaaatacttcattaaaacttcactttatctattttaccttatacttttacatttacaccatacatcagcctatctataatatctttataatgatttattttaatatttttatttattttaaaaaataaataaataaatataataatttcacacatatatattacaaaatagtttaaaaatattaatacaatatttatagcttaataaataatacttttctacatgtagttaagtattattcatgagctaaatctcttaactataatacctcatttaatggagcaatatttttcatcactttttacctcttagctaaataatttaactattagagctttcccatcgattgaggtatagtagctaaatactaaaaaaaacagctaaagaatcctatattaaactacattagttgaggtataacaaaatgtaaaatagagaatactattttgtagctacatatacatgtagtgatagaatatatatatatatatatgtgaggtataattgttttaatcattttatgtcaatctcccttctttattaaatattttgtttatttcttttatattatttaattagtaaaaatatttcaaactagattatttaaatgatatagagaaaaatataaagaatctaatgtatggtgtaacgtaaaagtatgaaggtaaaaaaaaaaaaaaaaaaaaaaaaa

SEQ ID NO: 325543 - DNA, 1417 bp, Cannabis indica
aagtaagaaagacagagaaagagaaggaggttctaaagttttcttgattttgatttttcttccaaattgattaacttctaaaatcatgattctaaaataaacatgtggccaactgttgaacttagagcatgccacctaatcctcaagtgtaaaataccgaaaatgccctttaacttgcaacttaagcaattataagcttatgggtaaaatagtctaaaatcataaccttgcttaaactcggtattctaaatatctcaaatatttgtcacactaaaaaattggttctagacatacccatgtgactctaacgaccatccatcgtattttttatcgtcgctgagcaaaaatcataaaaattacataatttatatttaacataaataatactcttagagtttaataaaatctccggaattaaaaaattataactctaatgcccatttctaaaaataggacccacaaaaatataaaatcatatataattataaaacactaataattaatgctaattgtctttactaattcataacctaacatacggtcattacaacaattacttaaaggacacaatttttaatagtcgcgggctagttctagtatattggtgcatattttgtgtgcatatgttattattcgataaaaaaaaatattacaaaaaatatgtatattttcttaaaacagtatttgaaaatagaaaattttcaaaaatatattttttgtatgttttatttacaattttactacttaaagtttttatttacaaaaatatactttaaaagttttaaaattacaaaaacaaactttttttcagcaaaaaaataagaaaatagttgaaaaactaccaaaaatcaacatcaccaacagttataaatcagctataaaataaccagaaaactaatctaatgacaactataatataactataaataaaccatcaaattactaaaaaataggtttattgtttttaatgaaaagatattttgtaattaaaaatttgtaaagagtaaaaatattaaaaaaaatatatattttttgtaattttataactaattacaatataattattattcttatttatagtcggctcaaaatttgaaccaaattttttcataacaaagttaagattatttttattgaggtttcattgtatttgtaaagagatgagtcttgaacaagtgagtgagatcatgaaaaataattcctatagatttatgaatttttaagaatttgtaaattcttatacatttttacaaataatattgacaaaaacagtatattatatattttaattaattgctttcactataaattactaaaagaaaatcattaaacatatatatttttgcttttttatatttttacattttcaaaatagtttttttttttttatttttacggaattctacatagaaacttc

SEQ ID NO: 325544 - DNA, 597 bp, Cannabis indica
aaacctttcaatcatatggtttcttcttgctttcgtgtagaacaagaaaaatcgctccggcaagatgtgtcggagcttcagagcttcaaagaactaacaccaaacaactctagagagattaccaatttgagcaactctggctgattttttttcttataaaaaaaagaagcaatcaataaagagcagggtgaaagatgagatcaactgatgtagttcagttctttgaaattcaatatcattaaatctaggtttttctttttttctttttatttttttcaaaattgaacaaataaattagaaaacacttttgaactggttggtggagttgcaactaacaagtagttgatcggactgagaaattggtcaataaatttgatggggaaagtaaaaagggtaaatggcggcaaaatggtttcattaaacccccacaacctaaatttctgcgggtaaacccccaaaaccacaaactgttagcaatttaccctttccgtccaaatttagcggttaagtgtcaggttggcttgtccacgtggacacaatatacacgtgtcacaatttaattagtccacgtaaaaaattatttaaaaaaacttaaaa

SEQ ID NO: 325545 - DNA, 594 bp, Cannabis indica
tgatcatattttcataactaattagacccaataataaagatatatgattattttacttcttaatattattaaaaagggaaagttgaaatatatcttaaagggttgggatgagacggaggttgatgggtgtagtttattaattagaggacctagtaaaaaattgtttacctaatttgttataaatgtaacatttggatcctaaattacattcaaagataactcatcaaacaatgacatacccaccacacacccttgcacccgattggcacaaataaaaatctactgttccaaaattcatgtttcccccagtattcttccaagtttctcttattgggtctgcggaatatagtgggtaatggtaactcaatttctatctttaaggatgcctggatttcgagattcaaaaaacttacctacctcagtacaccaaacaccctcgacatgaacatgtccagccttataacagctaatggagaatgacatgtctctcagactcaatctatctttcccaacgatgtttgccaagctattcatcggctctattggtctttcacctaacatggaacctatacagtaaattctggttaccatcat

SEQ ID NO: 325546 - DNA, 771 bp, Cannabis indica
ataaaatagattacattgaaatggagtttctttagggataaaacctaacacaccggatctgtgggtgcttggggttaagcaacattaatgccagcattcacttggtctctttgaactagcttaggtagatttattatgttggaaccacagttgtccctgtttctattgagggcatcccaaaggtctctaccccctcaagggcctacacgttcaaagactgacccggttcttggcgtattaggggcatacgactgggggtgggtacttggtcatctctaccctgttggggaaattctcaggttgatactgcctattaagggcatacaaccctccagcttgataaccgctcagctcagaatttggttggttgttggcccaacttttagcttcatcatcaccataaccgtcaaggtagtttggacgataatcactattgacttcggggtcttcccttctccccctggacctactatttctcgggatatcattgccctctcgtggttggtcgcgttggttgcgaggtttcccctccctatgttggggtgtccttccactatttccaccatggtcaccaatgttgttcctggggtttcctctaccacttcgccctatacagacattataggagtcatcacgtcccatataatgaccaggtaggacttgttcattggcaggtagtggtcaattattattgcagggaaccctattggaggggtgactcctagccctctcttggttccttggatgatcttcaggtccatagaccaccct

SEQ ID NO: 325547 - DNA, 896 bp, Cannabis indica
cttaccataaaaaggaaaaattattttgtcacctaacttgccaaaaaaggactttacacatagtaaacagctaacaaaagatgaaacgattctattacaaaataaggaatagttctcaatttcccatttaaggtcgaagccactgagcgaattgatcactaccttagaatcactttcaaccaggatgaaattatgtcctttgtcctttgccacttcaagtgccaaacaaactgcagcagtttcaccacttagagcgtctgaaaagtccagttttaccgtgtacaacatgatccgtgctttaaattatctaacaattatgggtcgggctagcacaatacagacatatttacacatccgtaatttgtgtatttttatacgtaaaaacaaaattacgccctccttgaaatttaattttgggtctactactggttttgttgcaactgttttttttatggcacagttacaaataattttttgagttgtcaattattagagtatttttttataaaaaaaatgtgagagaataactataaatattggccatagatgctcacctctatgatattttcaataaatttgttcatttctcaaaaaaaatcagtttcaattaatattagggattcttacacttggtgccacattttgctatttttttacatttttatcattattcggttatttaaacatttataaaaaatttgtttttcaatattagattttcaaagtttgataattacaaaaatacctatgcttatgtcatgatttttctctcatatttcacaccatccctaacatcttctcctctttcttttctttcttctggatttttattttattttctgttagtttttttttttttaattaaatatcatctggtgagatatttaagtgaaaat

SEQ ID NO: 325548 - DNA, 1595 bp, Cannabis indica
atacaaaaaatcaaagaatattattttcttataaaatatagaaccaagcattaataatttttaactataaaaaatacgtgatattaaagatgaaaaaaattattttaagaagcaaaaatcataggcatatattgtactgagaataaaaataaaaataaatacttaattaaatacactaggtttcatcgtccgccttaataataaagaaacttagaaacccataagaaaattaactaagaaaaatggtaaactaacactgaccgctttgagcgttttctctggatttttcaatccgagactgtactgaattctaaaatcctaagcttctatttatagaagagtaaaaggactaatgtgcaattaaacttattacaaattgcatgtgggtaaaaatgtaaataccaataattaaaactgcagtgggacgtggcagtctcggattggtggatgtggtaaactgctaccacgtgtcgccatttaattggccataaaaatgagcaattttgactctttatgactgaagagaatcaaactagacgacggccagtcgcggggcatggcatgagatgcacgcacaagttgggggttggccgacctcaacgaaaagtctcgtgagttggccgacctcaacagaaagtctcgtgctgaatggatgtcctaatcacataataaaaccaggtaaatcacacgtcaaaacctaattcgggaaacccgaaccacaactcaaggttctgttattaacactagggactacacaaacctaggaaacagggaaacacccaattacgacactgaaatgggcaagaattgagaaaacgggttattcggggaatctaccaaaccggttaaccggttttataggtattggcaaatcgcttaaccgatttgcaccagttttccccaaagaacccccaacttgctcaaaactcatccaaatgctaccaaaaattccacagtacctaaatagggcatacacaacatattctaaccaataaaactcagaaaaatacactgaatcacaatatgccattaaagacctaagtttgagtttcaaagcttaaacttgtgcaattccatcacaacacaacataaccagtatccagaacctagaatcaactcaaaataagcttagaaatcaaatcacacaacctttaaaccccaacaacccctaacttccaaaattgcataaccaaaccaagtagaacctaaagaaatcaatacacaaaagcttttagggtttaccttggttagaacctcctcaaatgcttgctggaaacaccaaaaaccagcagcagatcccttggttcaagctgggttcgaagagagagagaagggaaagagaggctgttcttgaattttggcttttctttgatttttccctaaaaactaaagattaattgaattaatcttgctgaaatatgagttgttaggtgtcaagttcctaggcagccaccaaatcactcctttggccaattactaaaatgccttttctcttataacttaagcaaaataaagtctaggggtaaaatggtcaaaaaccataaccccgctcaaactcggtattttattttctccaatacacatcccactaagaa

SEQ ID NO: 325549 - DNA, 1032 bp, Cannabis indica
taactaataatattttttctttaatttttaatcgtatcactttcaaataacatagaaaaaactagcataaaatttactatacgtgcctcgcacgttgctttttgctagtagctttatatatatatatatatatccatatctttcttgagaaaattaggctgtatacctcttttaacttgcagtatttaaattttaccctctctttctatatctttcatttctaccttttttttcagccactataccaattttgcccttatctcccttcctctccaactcgcccaaactcccactgaaacctaagcatctaaaaatcctctcagatttttgctattgctattgctttgagcagaggcggtgatcgatattttgtgggttttccaggaaatgagaattcgatattgagagtcttgttgttacgattgagaatttcgtttcgaaaatatatttttaatgtgaatttgtgctattcaaatatggttgaagcagaagattaatgggtctgagttaaaatggggttttttctttttgttcacttgtttttgctttgattgaccaggttagactttcgtaagactaaatatttcctttttctttcttttttgtcctcatatttttctacctcagtgatctatttttctttcgtttatgagattatatgggtaagtttattttgttgtgaatgcctattttattgatgtgatattagaaattattatttcttatggtataaattattagttgataccaatttttatagtttattactaaaaatatatgttagtagatatcacttgaattaatatgattctctcagtttactggagtgcttttagattattattattaatttttatcacaattaatttttatcataatttatttgaatagagcacgaattattattattttagtggaattcataatgaaataaggtgcaagtgcgttcagttgctacggaggaattcgtaacttatagtaagagtatatttggtagttcattataaaatgaggtatatttcaattaaattt

SEQ ID NO: 325550 - DNA, 467 bp, Cannabis indica
gctgctagcaaaaccagagaaagagaattgttgttcctttacttgggtgtctcaaaacacgccgtcagcgtggccctggcaagaggggaggggaaacaacatcaaccagtgtactacgtcaataaaagcttggtggacgctgagacccgctacctggagatggagaagttggcttacacactagtgatggcttcaaggaaactaaagccatactttcatgcccactcaattgtcatgctgaccaactatcccttgtgccaagttttgcacaagccagagacctcaagatgcctcctaaaattgacgattgaactaagtcaatttgacatttccgatgtaccgcggacaaccatcaatgggcaagtgcttgctgactttatagctgaattcacctaccagcctgatgagttggaacacggggaagcggtagagaaggatgcctaggatgaaattgttgggttttatgc

SEQ ID NO: 325551 - DNA, 743 bp, Cannabis indica
tggaccaaagacacttgctggagtgcctttcatataagatagaaccagttggaatctactatccagaactaccttccagggagaacagctttccaggaagaataacttgctatccggaactcctttctgaaggagagctaactattctaaagattgaactcagagtgggcatgatagtcattcgagaactctctttcgaactcaacaatcattccacaagactccttctgaaatagataagttagctgtccagaaacaacattcgagagacacctaactttccaagaacaattttcggagacatttttatttagatgaactacaccacatatacttacaatgcacataacaaaaacttagtataaaaatatctatctgcatagctaaatgtttgaactatatttttagtatcgtaaattacttatttattttttaaaaaaaacattgatataatagctactataattataataaaaccaagtgcttaaaaaaaacaatattacatcattgcgggtatcattttgtgtgtatataatttctcaaaatatcaaaaataaattctcatttacccaaataaaaataataccttattatatattttttttaattatattcattaaaacataattaaaaaaattttacaataatttataataccgaaaataaaattttaaactagttatttactacgcatatgaaatagaagatagtcattcaataaatatttaaaccttattttttct

SEQ ID NO: 325552 - DNA, 1003 bp, Cannabis indica
gattttcctatggtctttgctctattgtattttctcataccaaataaaattcttagtaatttgtggcttttttttgtcatgtttggagttgtgtcttttgttttgtttgtaccaattattaatattttattgtttttaaacctcacatttttttccctatttttcaaaaaaatatcatatttttttacactatttctcttttataatattttttttaagtcttttctacactttcttatcattcttttttctcacgtgtttttttttatttcaatatttttccttttctaaatgtttcttcatatttatttattagtaaatatataatagtatagaagactatacgagcatacatatgatattaaattttttgtgttgttattcttttttttattaatttttgtgaattattattttatttttcttataaattttaattaatactaggcaatagtagagcaaattacaacatttaggtatgacgactggtgatcttacctttaataagtgaacttatatcatgctatatctttgtttaaacataatttttttcaagaattatttaagtataatttatatgattataacttacaggttttgacgagggttatgtgcctgtgatacgttcttcacacgcctagtatatatatacatgataacttgatcattaagtttggttcttttggcacgatttagaaaaattaaatgtttatttatatcattatgtgtatgataaagaacccataagatttaagattatagtgtgtcgagggtactccatttggatatcttttaatccaaaaggaggatcagattgaataacctcatagtacagtttttttttaaaatatttacgaaaaatgcactttatattaataaataacatatatatatatataagagatgtgatattaatctcaacaccacatacactacaagtgtataataggagaatcaccaaatttgaacaagttcttacacctttgtccaaaagcttatttcc

SEQ ID NO: 325553 - DNA, 594 bp, Cannabis indica
atgttatcatactcatccattgctccgccttgtgtggatcaacaccaccctcaaacactggcggttttgcttcctaaaccacttgtataacggctctaaacgatttcccacatcttgtggcactactaacagtgctagaggatcaagattgggatttgaagcacgctgagctcgctgctccctcaattttctaatctattcaccttactgtcggatggtctcctgtatcgcggcatacatctcttcctagttttgtggtaatggagggttcgcaccttcaccgccaatccccaaccttgaaagttcgcggctacccccactaagtcgcctcaggcgcctgatctaatacacatgcgaccataactttcaattatttagaacctcccaaaccataatcaatgtcaataagcatttccatgatacacacacatatcatccattatcataccttttctaataactcacacattttaaataagcaggtaattcaattaatcaacaaataacctaataattatctaacaattaacacttactaaaccatgagtcaaacgagtcttcacagccaaccatttcaaaccagtcttcaggatc

SEQ ID NO: 325554 - DNA, 1762 bp, Cannabis indica
tacatgatctggatcaggtcggatcatagccggatcaaatccgactcgacccattgacactcctagttcaaacataccatatttagaagcctgatggttctctgattgtatcaagacattctttaatcaatgatattttttgccactattttctttttgaggttttccccactgaatttattagggtcaaattttgtaaggtttttcccgctaactttattcgagtttttagcggctaaactctctcaattattgtttcacttaaatttaactttttacgtttaaattttagtagtaaaaccctctaaattactgaattagtagcaaattaagatctcatttagttaaaaatgagtgcattatacacatttttttatgtattctataataaaatagttactgtttaaatttagtgtacgtgcctcgcacataactttttactagtataaatatatgtatatattatttttatataaatgaaataattataatatatatcttcatatatatatatataaaaaattaaacttaaaattattccactgccaaaacataataataataataaaaaatacatccatacacttatatttgaggagtgcggtataggttagaactagccaatattagctagttaaattatgttggactcgttggtatataataaaatagaataaataaatatgtaaaaaaggaattttgtaatagttttatttattaagttgcttgaaattgggaaggtcacatggaagaaaaagactattcgaaataatggtggagacatgagatgagatgagatgagatgcctgctcaaagttgatggctgtactgtacccctatatcggcatatgcttttctttagtttagtttgtttttgagtctgcttatttataacatgtgcttaattaatctactgtagccgtcttataggatttctctttaccaataatatttcttcttaatttttctaatttgggttaatatcatatacacatatactcttcttctctgtgtactgtactgtacactcaataaaattgtgaagaatagatcacctgttttcacatttttaattgaccatgtgtatgtaatcacatgcacattgaccggccttttttatttttctacgtacgtaaaaattagttacttttttaatataactttataaaatgttattttgtttttttataactctatagaaaattgaatacatagattttttatttttaaaattctttatgcatccacacgtagcatttaggttggccaccgaatatgtgaatgtgacaatgattaaaatctcaaaatggcaaactaaatataaaatatgtaatttttaaataaataaataaaaaaagttgaaagataaaacaaaaactaaataacaatgatctatagctttaagagaagacttagtcgaaactaatatatgagcatgagatgagttggggccagtaacaagacttggtcacataatgcaaatgaattattttaagtgtgtacaacccaataattcaagccaattttgtctagttttggaaggtggatttcactttctcaattataaattattttcttcgttaattaaatattttttttctttataaaaataatagtaataataatgtatctcttaaaaaatgtatgacagacccacttcctactctaagtctaagatgcgtgccatatggacccacaatattaaattggaaccaaattctctttatatatattttggatgattctatagtggtcccataat

SEQ ID NO: 325555 - DNA, 1542 bp, Cannabis indica
ttatccgccacgatctcctgaggtagtccgaacttacatattatgttttttcagactaacccctctacttctctatcttttatttgagcgaatgagtcggattcgattcactttgagaagtagtcagtgagggccagcatgaattttttctgggcaggcactgttggcaggggacctactatatccatcccctatttcatgaatggccacgggctttggacggtggttcgctccattagggggctaggatggatgaggcatgtctctggcatttttcgcatttccgtgagtgattcgccgaatcttcttagaacgtcgggcaatagtacccctaccgttgtactctctgggcggtcacacgtcccccggaatggcttccgcattctccttactagacctctattaagaccagcttcccttcctactttgttatgcattttaagtacggcctgtggtagaatcttctatatagctggttctggagtatagcataccttgaggccctcattacaatttttctcgcctgtttggggtccgaaggtaatttgtcgtcctttaagtattcaaggattggccgcctctagtcttcggatgtttttgtcggaatttcggcgcacctaacttcttcttctgttgaaatgctagcttttggaataaagttgaatggtattgttcttgtgacgtggagggggaagaggatcctaggccggctagggggtcggcgtgcatatttgcttctcggggaatctgactaatctagaaatagtcgagagttgaaatgaacctttttacctcggtcaggtaactggccatttttagctctttggccttaaaatcccctttaacctgctgaactattagctgagagtctgactggaccaccaccctttcggctcccatctctttaaccagttttatcccatggatcaaggcctcatattcggcgtcgttgttggcagctcggaaaccctattttatggattgttccatcatttctccatcgggcgatagtagtactatccccaccccgctcgccctgacattcgaggacccgtctacctttagcagccagtccctcccggtggattccttctcgcactgaacaggttctgaagttatctcgactacgaaatccgccaacgcttgtcccttaatagcagtctgaggtgggtattgtatgtcaaattcactcaactccaccgcccatttcattagtctcccagatatctcggtttgtgcaagacccgtttcagtggaaacgatgtcataaccgagatcgtatgacactagaagtacggccggagttttcttactgatatgactaaggcccacgctaatttctcgataattgggtatctgccctctgctcctaagaaggttttactggtgtggtagattggtagctgcgcctttccttgctccctcactagtaccgaacttgcggaatatttagacaaggaaaggtagagaagtagggtttcgctaggctctggttttgacaggatggggggcgttgttgttggcttttatgccctaaataaa

SEQ ID NO: 325556 - DNA, 960 bp, Cannabis indica
agcactaccctgttggaccctcaccaacccacgaccacccgcgacaatgtctaaagtaaattttccagccctgtattttcgagtttgttgaatttttgggtgtttggattaatatgtttattgatttagagtaaaatttataagtttgttgaaatttttctgtgatctgtaagttagggttagaattagaaacttttggggtcaaatctgtgttctcaggtgaaatctaggtttttacatcaagcccgatgtagggctgatgtactgagttgaaaaaatagactggaggttgaaggtaaagggcttatttttgcccgatatagggctgattatgttggtatttcaaacttaggtcgatagaggacgatgctaggtccgatgtatattgtaatgttttatactttgatagacttttgtatgttcgataaaggacgattgggggtccgatatttattaatactttattgtccaaacagaatgtttgtgtgtccaatgaaggacgatgggggcctgatagtgggttctatatttatacttgtttactgtaggttcgatagtcagtctcatagaggacgattggggcccgatatgggttacgagtgttatagcatttttttttaaaatatgcatgtaggtttgatagaggacgattgggttcgatagtgggaccgatagttattgcattttttatttgtattatattattgtgttcgatactggttcgatattttcccaatattggtccgatgctttgctacaaaatgtctaacttgaattttcttatgtattgtattgtagcaataaaatttctaaaccctcgccttaatccatgaataataattcttctaattgtagcatctaacatgccagcaccagagtctaatgtagagattttgcaacaaagagattttaccttggtgaagtattggttgattgtcatgtcgcgctgcctaattgaga

SEQ ID NO: 325557 - DNA, 2369 bp, Cannabis indica
aataaataattaaatgatcacattaaacaagtaatgaaataaaactgtttctttattgataaataaatataaaagattacattgaaatagagttttatttagggtacaaagcccaacaaactcccacttgcgctaacataaaacaatcattacatttcaattaatcctagattcagtctgtgcttttcaaatgtagttgcaatcaaaattttggtgaatagattagctaagttgtcttaatatcaattttctccacaagtacgtctcctcttgccacatattccttgatgatgtggtaatttctctttatgtgtttgcttttcttgtggtttcgaggctctttactgttggttatagcactagtgttatcacaatgtaaaaccaatggtttttccattccagaaacaacaccaagttctgagaagaaatttcttagccagacaaagttccttagcagccttagcggcagctatgtattcggcctccatggtagagtctgatgttgcagcttgcttagcacttctctaaacaactgctccacgctgagagtaaatatcatcccagatgtagacttcctgacatcaagaaaagcctaaaaatctacttaaggtttcgaatttctcattagaaaaagaatagaaattcgaaattcaaaagacaccacaaatcctaatgcaattaggattcaagaaaattccaagtttaaagggaaaagataaatgacaattaaaaggtgatcatcttttgtcttctcctttaacacttagaatttcaaattgcctatgttaatgggagtaggaatataaaacttagaaactcacttaatcctaatgccattattaggatttgtgaatattttgagtttaaaaggaaaagataaaagataagtgaaaaatgataattattttcctcttttccttaactcaagaattttggattcctcatcattaagggaaatataatttgaaatcctaatcctattaggaatgcttgaagaatagaaataattgcctaatattgccaaatttgcacacctggtggtttagagagaaataagcttagttcacgtcatcaagtcaacctcacacgagtatgaagttgacttgggggaaaatgttaacccaaaatttgacctcgattacatagacaccaatgcttaacacatggcaagaaagaaaatatcccaaacttgagtagtcttgagtcatagtagttgacttgggaggggtccctagccctgcgcccaggttggctttgggaactctgaaatgagtgtttggatccctccaagttatttccaactcactatattttagtattttgaaccatgaaaacatgaagaatccaagttcaaggcctaggagctaaaaatatacgaaatatcacctcaaaagtcaacccgggcacctagggtttcactcagcactcaagttgataacccaactagggttttagtttttggaaccgtcttaataaaaaagggtcaaaatttgtactggggcatgaattaaacatgtcacaaacaaaattgaggcatcagaatcagattcaaaacacttttgtttatgagcacccggagcaccagatgccctaggcacctatagcacctagcacccaggttgacatattgtcaactttgggaacttctaagcataaaaatgaagagttgtcctgagaattttctttgtcttcatcaaaaacaaagaaacaaatactttcaggagagaaacagacaaacctagagactaaaatgggggccaaccgcctaggttgacacctggcgttggcctagtgcccaagttcacattttgtcaacttgggccatttctaaggagtttttttagaagtcttaaggtcatattctccatgttctttaaagattaagatacaagtattttggggaatcaaatggaaccatttggtggcctaattagatccagggcccaggttgacacctggtgttgggtcaatcgaccaagttgaataaatttcttgaaaaagtgtttcaggtatttttttctgtcatcaaaactaataagatacaatcaaacttggggagaaaataagaatcccaaggggtaaaaaactgagtctagcgcccaggttgacttggtgttgggcccaacgcctaggttgacttggtgctgggcccaacgcctaggttgacagtcaacctagtgtaaataagatcattcataggacgatccttttcaataaaatgagagctcctcttataagaatattttttatttaaggaaatatatttctatttaaagaaataaatttctatttaaggaaataaataaataattgattttttgataaatgaatattttatattcattgaatctggacaaaatcaattatgt

SEQ ID NO: 325558 - DNA, 910 bp, Cannabis indica
aaaaaaaaaagaaaaaacaagtggtaacccatattttgattttatttattttttatactaataaagaattcacatagtgtttatctcattagattttcaaaagtgattatatattatcaattatatttgaaaataaggcataaacattataatacaaatataaatcaatataaaaacaacttgttgttaatgtgaaaaataaagtgtatttttgtaaaaaaaaaaaaatcaaatccatacaagttttgaaaaaactatagaatatttatactttattaatttttttaataatttttgggtatttattgtaatgcccactagattaggcacttcattgtattttctaaattactatgctaacttttattaagatcaaataatttagtaaaaaacttgattaaatacaatttttttaaataattataaactttactaaataaataaataagtttacataatgcgagatctatttttttcaaaactacaaatataacatatacaacatgtgttgcttcgcgactaacaaaatttgagtctgtgtcttcccgaatatctaaacaatttaggtctaaccgtctaaatatgtacaatctttattgagctctaaactcactattgctgagcatttgcattgcctttacctagctacacataaaaaatatatatgtgagtcaacatactcaataagaaaaacataaaacatacacctaatcacagagtcttaaacctgcgtccaacgcgtataactaagtctcgaacgttcttgatgactatagtacgattgaccatataatattaacctatactcaacactctagtcgtactgatgtgataacatcaatccatactataaatataattgacaataataccaacttatacttagcactgtagtcgtactgatgtgata

SEQ ID NO: 325559 - DNA, 569 bp, Cannabis indica
ataaatctcttgtgtcaagttatttaattttctgcaaatattttatattctgcctgttctattttgtcactgcaaaacaggtttctgcagtagcagaattactttttgcttctgcagatgcttacagttttatattttcttatatataattgatatttgtaaaaatacggtttttcatatatgtacatcaaatcattcattatcacaaatattttttcattatttctatagcattatgataatattcaaccattaattttgattatttctattttttattattttatatgagaattttaacattttctccaaaaaaaaccacatgaacaaagaaaatttatcttaaaattgctaatgaattaatgatgtcttttcattttttattttttattcctaacaaaataatatcatctgttatcccaaatttggcactctgatgtggcatcacgagaatggtgacacgtggactctacttagaacatctgttcggatcaacatgccgagcaggatgcctccctggcatatccaaaatggaatattcgacgagccgtgcagaatgagcaacactt

SEQ ID NO: 325560 - DNA, 648 bp, Cannabis indica
tcctgagatggttaggttcgatctcgagagtattatttgtgttctttgatttgttagttaagtctacattttggtccgggtgatatgtacattttgagaacacggtagtacaattaagtgggaagacaagcaacagtttgagttagtttttagagatattaagggatgacttgagtcgtattgagtcaaactcattcacttttatgagtgatggatagaaggagctttagaatgtagtgtaaaatattttcaacagccttgatagcaggttttgtataagacatatgcatggaaattttaagaaggagttccctagactactactgaagcaactattgtggaatgcagctatatcagccattttagcaaattttgataggagaaaggaaaacataaagaaggtcaatgtgaaggcatacacctgactggcaacaaagcacccatcagaatagacaaaatcacatttcaaagaggggtgaaatgtgatatgctactgaacaatatctgtgaaaccttcaacaatgtaattcttgatgcaagagacaaactaatagttactctattagagtccatcaggtaattgcttattatgttaactttaactacattactcaatgatgaaaaaaatacttgtttaacttttgtttg

SEQ ID NO: 325561 - DNA, 1610 bp, Cannabis indica
tcattgcattaatgaaaattgtaacaattataataagattaatgctaaaaggcgtcagtagtacttagtaccaggccgactcaagtattgagtagtttgaactattacataaaattcctatattcactacaaaaaatcttatttttagtcacaacaaaatttatgactaaaagttaaaaatttgtgactaattataaattatgattcttatgttgtgactaaaaggttcgtggctaaaagtattagtcacaaaagttacaattagttgtgactacatatatttttagtcacaatatttgttgtgactaaaactaaattaataacaacttataactaaatactatgttttagtcacaagtaatattttgttgtgactaaaagtcacatttagtcacaaaaagtatgttgtggctaaaaagttgtcactaaaagtaacagtgttttgttatgattaaaaaaatgtagcaattataataagatcacgcgtgatgtctagcactaagatcgacccaaatattagatagtttggattattacacaagattcttatattaaaagacccattttttcactccttcatataaaataaatgtatttttttgtttgataatatatacataaaaatcttcataacaaagtttacctaaaaaaaacctcaaaataaaatatgacttagtttttataatagaccaaattttaattttttgtcgaatgcccccaaatggtttgggccgatcttgcttaaccccctttaatatctcatatcgctataggtaagtgtatgaattttcatataatttaatgtaataattttataaaatatcgttaactaatcaaaaagtgtcatctttaggtggtgctagattatactcttataataaatactatatatatttttaaaaataaaaaaataaaaggtagagaatagtaaattaaaagtgtcattgttgtgaataataatagcagtaactgtacttggtcatgatcacaaaccaaacagttctcaccaccatcaccaattcaagtggcttcacaaactttagtgtgggccctaattaatattaatattaataatattattattattattattattatcttagtttagtttaaatttaattaaattgaatttttagtgcctaacactatctatatctatatcttaatatattatgaattaagaaaccatagccttcacaattaccataagttttattttatttagaaaaatttataatacactcttaaaataaacatttttcgtatattttttagtccatatatatatataattatatgaataattaggtattttttccttccaaactttaacatgtactaaattatatcccttgaatttttttggccgttaaaaatttccactgaactattgagattgttagatttaaggacttttgtctaattttagtaaaaaaattttaactatgaatgaaagttcagggggcgatgatttcatacgtatcaaaatttgagggacatgaattggtagatatcaaagtccggggtagtatgatttagtacataaacaattactgaaatagtaaaattgaatgaaattagacaaaagtctttaaatctaacaatctcaa

SEQ ID NO: 325562 - DNA, 1711 bp, Cannabis indica
ttgaaatactaggcaagaaaggtgttcttggacacattcaagtcaaccatataaggctttgtgagcaatgtgttcttggcaaagcaaccaaggtaaaatttggggtaggtaaacacaaatctagatccattgtggactatctacacgtagaggtggagccatctagaacattttcaagaggtggagccagatattttctcaccttcattggtgatttttctaggttagtgtgggtctattttaaagaacaagaatgatgccttcatctgccattgactttaagactccaatggaggtctgaacaggaaactcagctaactatgatcacttgaggatctttaattgtcttgcctatgctcactcaaggcaagacaagcttgaaccaagggcaaaaaagtgtatctttttggggtaccccgagggggttaaaggttacaagttgtggaacattgaagatcaaaaaaatgtcatcagtagaaatgtgatttttgatgagagcacattgtgtagggatcttaatgctcgaggagaaaagctcaacacagctagtaagaaaccaccaaaagaattcaatttgaggtggagttggacaaaagaaatgagggtaattcaggtactgatgtagaaccagaaatggaacttgaagagaagaatgaaactgatgaaatgcataaagaagatgatgatactcaagactatcttctaacaagagagagagaagagaaccacaaggccattacagatgtggttcactatgccttgaacattgctagtatggactattaagagccaatgtcctatgaagaagcaatgctatcagaagacagggaagaatggaacaatgctatgggtcaagaagtggtgtccttgaagaagaatagtacctagattcttgtgataaggcctgtaggaagtaaggtaataagctgcaaatgggttttcaggtataaagaaggaataccaggggttgagaagcttagattcaaagccaaattagtggcaaaagggttcacacaaaagggaggggattgactaccatgaaatcttctcccctacagtgaaacacacttcaataaggttacttctcagcatagttgcaactgaagacttagaactagaacaactgcatgtaaagacaacctttcttcatggagatcttaaagaacagatctatatgaagcatccaaaagggtttgaagtcaagggacaggaggaccatgtctgcttactcaagagaccactatatggactcaagcaaagtccaagacaatggtacaagagaatcgatgactttgttctaaaatttgactttaaaagaagtgtctatgacagttgtgtgtaggtcaaaagctctaaagcagttgtgtatctccttcaatatgtggatgacatgcttattgcaaccataagtatggaagaaataaacaaagtaaataagattttgaacaaagaatttgaaagaaggaccttggaccaggaaataaaattttggggattgaaatcatcaaagacaaaaagcaaagaaggatcaaattgtctcaaagtggatacatctccaagattttgaatagatttggtttcagcaatgtgaaactagttttcacacccttcacacagtcatttaaactcaccaaaaatcaagctcacaaatgaagacctcggtcatatggagaaaataccctacactagcatagttggaagtatcatgtat

SEQ ID NO: 325563 - DNA, 589 bp, Cannabis indica
atagttttcatctcttctttattttgaaatctctttgtgatattttataaatttcaccttaaatgatcttttgtttcatgcattatgtttctcgatggtttttggacatgttctattcctggtcaatttttatacacttagtttaaacatacaatgattaatatgtgaaatgttaaaaagctctctagtacttttttaagtgttaatattattattagtttaataaagtatcagatcttatataatttaatgtaacagtttttatagaatatcaccaaccaatcataaggtgacacatctagaaagtgttaagcaccactggtgcctaatagtaacgcttaagcaccagtaatgtctaacaccatctagagatgacaaattacaaatggttagtaatgctctataaaaattattataataaattatatgagacatgatacttaattgcaatattacatctcggaggtcttttagcatttctcttatttttttaattcaattttagctaaaatagctaaaaagttagtcatttttttacataacctattagtacaccttaatatcaaacataatattgtactaaataata

SEQ ID NO: 325564 - DNA, 1649 bp, Cannabis indica
gttatttttgccagctacttttctattttatgctaggtaaaagttctaactaccaacattgtatttcgccctaccctttgaccaacacatcataggtaattcttatttatgtaatacctactttgccagcaacaaaatgtgctggacaaagtgacatttcttgttgtgagttgaaattattgcagtaggttcatttaacctcgtagcttgagcactcaactattgtacaaggtaagtaattgtactaacaaccacttcagtcgcaaagtttttattagttccaaccactaacagcgatttgatggtgagtcatcgaaaaacaaagaagaactaataatgaaacaaaacaaaataaaattatgtcacataaacaagactaaaatacttaaaactatatcatagagacaaaactaatcgtaatagtaaaattcgaattgcaatagtaaaatgcaaccctgaccaagccgcacctatacccaaaaaaagttgacgggcatggccaacctcatccaatagaattaaaatcttattacttgggatttggcttattactacatgtgaaatatgaaaataggaatttccccagcaaagatgcgatatattgcctgactcctttaagaacttttaattagtcgtattggcgatatgtcattataaactaaacaagatgtcatatcatagggcatgttcataatgtgttctatgtgtctatgttaagaaagtatacatcagatccgtcatatatcattgagtatgaagctatccctcttcagaaaaatgtgacttatgaagaacaacctatcagaatcttagcgagagagctaaaagtattaaggaacagagagattctagtaattaaagttctatggaagaaccacaaagaaggtgaggctacttagtttttagactccgagatgtatatgaagtatattcacttgtttaatttttaacttgaggttgtattttgaaattttgggacgaaatttctttaaggaagaaagaatattgagactcggtttgacggagtaaacaataaaaaagaaaagaaaaaaattgtataaatgtggtgggacccacattttattaaataaatcccttttcccattttcctcccgcccataaccccctctcttcttcttcctttctttcacgaataacaatccacaaacataaatgccagcgtaactctagtgagcatttttttggccatcccctgacccacagtattggttcccatctgccggtgatctcaaccctcgagtggcgcctcctcattcgccaacattagcgagagatctcgagttaaagttttgaggttcaaactttgaatgtgttttttgatcacctccggtgtccgtttgacaatcggtcttcactagtaaaatcatctcgtcgaggagaacaatctgcactaagttattttatccaactccatactatttttggtgacatttttataacttttccctttccaacgactttttagtgatatcatataccattttgacaaatggttagcatgggtgtgatatactcgtcgagttggtcgttttgatatatactactcttattttcagcaaaatttatggtaccactactacaaaaaccccctttagaggcggtttttaagccctttcagcgtcggtttt

SEQ ID NO: 325565 - DNA, 821 bp, Cannabis indica
cctcattttgattcttcttgtctgttgttatttggaccgtgatcccttgcgcctccttttgtcattcttcgttgatgaagaggaagggccagaacccatcttgaaagatgaattcggggctggagaaaattctggcaggggagggatttcttgggaaaattccatggtgttttcatccgtgtgttggacataagggattaaagtaaggctagcttttcttttccttggttgtgggcaatgatggactaagtttgagacatcttctgggtcatgaaacaaggtgggaattggttcaaacttatcaacttgggcagggcccattaactcctcagctaaaccaatttcttcagcatagatgggccaagggtgggtggctcatgtttatggggttgtattgattggcatagtttaacatgggccttatccaccatttgatcataagtgggcccaatattagccataatggtggtaagaattccattgtctgttgggttagggggggtcttgatgaaaatttatttaatatatctatatcagagagtgtactattgttaccttgaataggtcttcttgacacaataggggatacgaatctggctcttcttccctttccaggatggcacgctcccaaggaaccagaggcttgagatgtaagggtaatacccttcggttgggagcaggtattattcaccacttttaaattcttccccaaaatagaccctggaccattgttgttgactctgattactttccttgttggtttgatactagccgtttgttgcagaccatgctctctgatgttttcatggacaggtcgcttt

SEQ ID NO: 325566 - DNA, 1729 bp, Cannabis indica
cctcgtgttggacgcttcaaacccaaacctcaaggcagaatgaattttatacccatgcggggtgacaagaatgattcctacccctgagccatgctcgttagacgacccatcgacaaacaaatgccatacacactctggtaattctcatgcactgttttcttctagcaacccagtacattcagcaatgaagtcagcaagtgcttgtgcctttatggttgttctgagatggtatgttatctcaaattgacccaactcgatagcccatttaaggagttgacctgagtcctcctgtttcattaatacttgtcgtaggggctgcttggttgggacatggatgggatgtgcttggaagtaaggtcatagcttctttgacgaatagactaggaaaaaggccagcttctctatggtgggataacatgactgtgctcccacaaattgtttgctaatgtagtacactggcttttgaatcttctcctcttcacgcaccaatgcgacactcaatgcatgctcagttacggccaagtatagatacaacacctcccccataattggttttaacaagatagggggttcaactgggtgtttcttcaatgattgaaatgctttttcacactcttctatcaattcaagcctcttacttccttgcaataagttgaagaatggtaaacatctatctgttgatttggacacaaatcggttgagtgcagctatgcgtcctgttaggctttggacatccttctttctttttgggaaggcatgtcaatcagtgcctttatcttctctgggtttgcctcaataccctttgagttaacaataaagccaaggaactttcctgatgacaccccaaatggatacttgagtggattcaacttcatgttgtatcttttcaatatagagaaacactcttccatgtcgtcaacgtggttctttgaaagtttggacttgacgagcatatcttccacatatacttccatattgactccaacaacggattgtctttttagtgctagaataacaaacttgtatgataagtttgttgaaaaaaacaatgataaatttgttttgtcccttgctcatattgttgcatagtaaatctgtggtggtaagatattatgtgtcactccttggcacttggccgatcatgttattatgcctattaatgtcaaactgcgggatcattggatatgtggtcatttaaatatttttgagcgtcggatatacttgtacaattcattgaggtctgtcaagtttatatcagctgctaaagaggcttgcaagcctttttttgtgatattaccttactatttctctatgttagactttagaggcctccacaataaatcaaagtttagcactatggaaccgtttcccattgttgttgttgatgggttacctgagcaggtaacagcataagttttcactcatgtattatgttattttttttttattttcatgttatcattttactttgtggttttgttcagtttcttatttttttctagtgttgttttgttgtttttgtacattgattgtggtttttttgtagcatcttttgctgggtattttattgacggcaaacccatcccatcttctgattttgatgtgcaagttcaccacgattaattggctgtgtcattttttcattatggcatgaagaagctgttgggaatattttatcaggatctagatttactatcaagtacgttgaattaacattctaaatatgaat

SEQ ID NO: 325567 - DNA, 946 bp, Cannabis indica
gttggtgtaaggacaaacatttgtttaacaaaagcatgcactattattgcaaccagcgaggtatcacttgtgaccaagctggccacattactgaaattcgtcactacatgtttgatgatgatgaatattcagagagaaaaggaatgctcaagaacttcagttcgtcttgctttcaacacttagttcatctggatctttcgtgtgcaagactcaagggcgttatcccaccggaaataggtgctcttacaagctcacctaccttgacctttccaacaatgctcttacaggtcagttacctctttcactaaccaacctttccaagttagagaaactttatctcatgcataatcaactcaacggttcgattcctcaaaaacttggcaacttgaagaatttggttgggttaaacttgggcaataacaagttaaatggtgcaatcccttcatctattggtatgctgaccaaccttactgagttagtattgcgagaaaatcaaattagtggctccattcctaccagtataggaaacttaaagaatctactacaacttgatctatcttataacagcctcagtggttcactcccctccaatctttttcaattaaccaaattaacccatcttgatatttcatttaaccaacttagtggtgatatccctaaagctttgggtaatttaactaatttaacctccctatctctttcctcaaacaagttatatggtgcaactgcaatcccttggtctattggtcatttgatcaaacttgcttatttatatttggacggaaatcaaattagctccattcctatcagtatagaacaactggagaatttactataccttaatttgtccggtaacattctcagcggaccactccccacccctctacttcgattgcagttagatactctggatgtttcacataacaaactcaatggttctatccct

SEQ ID NO: 325568 - DNA, 1363 bp, Cannabis indica
cattcagatatgcaggacagatttagtcaaaagatcactaacaatatgccaatagttggtataaaacatcaccgacattccatctagtcctgggctgccatccgacttcattgaagagagagcatcaaagacttcaatggctgtgtaaggtcgagtaagggcttcatttgctgctgcagaaattgtacaaggaataactgaggtgacatgctgaagtgcttcagaatctattccatcagtagaataaatttgctgaaaatacttttggatgatgttacttatgcctggcagatatgagtgctcaattccatgatcatcaacaagtttattaatgacattattcttctgtctactggtagccttttggtgaaaatatcgagtattagagtctcccgatttaagctaagaaatgcgagaacgttggtgccagtaatcttcttcttggacaagtaaatcatcaatgatattttcactcaattttaactcttcctagtgtgctgaattggtgtcatttgatttattcaaagcggccaccttctcttgtgatagtttgattctttttggaagatcaccaaatttgccacggtgccaacttcgaagcctatttgcacaggtagagagattttggattagttgggaacctagattagtggtggaatttttccaattgcagttgatgatgtcgagacattcttcctcctgcagccagagcttttcaaatctaaatcgaaatttgaatttaggaggatggcaggttgagtcatcagccatcacaacaacttttaaagctcgatgattagattgaaagaaatcaaggtgtaacagtcggggtgctgaaactgcttgtccatgaggcatttacaaatatgcagtctaaccgttctttaatattgatgccattaatactattattgtgccaagtaaatcgttctccttcaaagcttaaattttgcaagccacaaaagtcaacagcatctctaaaagcatcaagttgagactcatgagataaaggcccaccaagtttgtcattgtgtgaaaggatttcattaaaatcacccataaccagccatgagagtaaatgagcaatatccttaagttttttcaagagtcaccaagtaacatgtctttaagaagtagtgggagctccataggaaccagaatagtgaaaagaaggaccatcaacaaacgccacatagcagtcaacaaaattagtatcacaattaaggatagttacatttacattagctttccaaagaaaaagaagaccccactaagacctactctaagactttcaataccattaggatattttaaaatattgtgaaatttattaatagacccaacactaagtttagactccata

SEQ ID NO: 325569 - DNA, 555 bp, Cannabis indica
agagagaggagagggtttgtggggttaacaatggcgtgaatttggggaattgggggagttgattttgagaatggtgaattgggtgttgggagataattaggcgccaaatgtgagaagggtttgggaaaattgcattgccttccccataactccctttctctctcgattttctttctttttttttatttatttattttttattttttattattattcgacgacggttcgtatttattctcagtggcttttcttttctcatgctaccacttaactaacaccacccggtttcagctacaaattccgcgcacgtgcaagcttcacgtgcctttttggcataacttctcgggataattactgtgacttttgataacacttttgttttaaaattttaaaaacaaaaaaaatagatatattttgttaattttatttaagtcgagtttaggattcgacgtcaggattgggttcgggttcggtgccgaggttgggttcagatcttaaggtgtaggatggagtcgaagtccaaaatattaattaaaaaaaaaattagtttaaaaa

SEQ ID NO: 325570 - DNA, 845 bp, Cannabis indica
tgatttagatgaaaaataagaagcaaagttgttatatatattcttagaaagcataaaaaggtcataggttggaccatatgagacattaagggaatcagcccaactatttgcatgcagaattcatttagaagaaaatgctaagacctcctgagaaagccaaagaagattaaatccaaatatgaaagagggagtaagagatgaggtaattaaaatgttaaatgtagggatcatttaccctatatctaacagtccatgggttagtccagtccaagttgttccaaaaaagtctagcccatgggttataaactaatttattaaaacacaaacatggcatccctattagttagggtgttacatattttattctattttgatatgatatgcattaatctctcaaactaggattcttgatctcgaaggaaaatttgtgggatggctttgatggagtctagagtcacaatgatgactaggcatatcaggattttgtctgcacactttctattagggctttacatcaggtgggtttaactgggtttgggtttttcgggttcaagtttcgggtgtaggaaattacataccaaacccgcccattatagcaccaggtttagagggtttcgagtccgggttttaccatgtaatacccggaattaagaaatggattagcaaaaccctaactagataattatgtataatggaggaattatattattatatagttcaatatatgtgattttatatgaattttaatatattaaagaccccgttggtgagccaggggcattttggtaattataacccgagaagggtaaaatgatcaaattaatttaattacgtgcttaatagaa

SEQ ID NO: 325571 - DNA, 1357 bp, Cannabis indica
aaaaaataaaaataagacaacatttaaattatgaaactaaaaataacaacataaataaaaataaatattaagtaaaataataattaaataaacatagtgtgattttatttaagttttcttttttaacaaaaaaaattatatataatatttaattaatttaataaatattttattttactaagttattttaaaattttaattcttactagtagttatgatataattatatcataaattaattattttaggctattaatgtaaataatataaaatataagatcttttaaataaaatatatttatttagtgtgatatttagtgttagtgattggagttgttgcaccaaaaagtagaagattttacactaaattggtgtacgttttagcgatacactataatagcaataaaattaaataatgtgagagccgaccactggtgcccatactgtggttccaaacttgttcgtgattcaaatcaaatcgaactgcctaattcttgatatatactataatatgatttttttaattgaatattaatatttaagaataattttatgcataatattaatataattattttttttaataaacgacattaaaactagatagttagacctcagggtcattacacaaaatttcgattggtatggaagaaggatccaccatacccgaaacattcatagcaaaagcccacctatccacgttatgggctgcaaagttacataatctagaaacaaataaaaaattacaacttaaaaaattatttgagagatttttacattgggtaacatagttaccaatactccaactggaacaagctcctgttagcgtcctgataactgtgcccgagtcactctctatcatcacaaaaaggtgattccatgaaactggctgtctcaacagctaacagacaggttgtagcttccctaataagaggatcagaaaatttgagcatgctggtagctatccacaaaatttcctctgaatgatccctagctaaagccaccacgcatatcgagccacaaccaactttcacatcatagttgatctagacccaatttacaggtggaggggtccaaacagaagacccaacattcctcgatgaatccaacagacaagaaccataatctgcgtagcaaaaagagattgaattaatacaatccttgaggttattactcagagaattattgtgtaccttatacgggctttccaaattgtgtccactataatcgaagcataaagaaacaatcttgaactatcactattaggttgtttttagtattatttttagtgtgtttttaatttagttctactcttgtttagagcaattttacgttttttatcttttattcttgcaga

SEQ ID NO: 325572 - DNA, 1092 bp, Cannabis indica
ctgagtgcatgtggtatagtgacacaaactaaccttacatacactagtacgttagaggtactgagtaaccatggcatagagattaggaggttcgaactaccttaccgacactagtacattataagtactgagtgcatatggtacagaggttagtggagcttcaaaggggtatgaactatttttactcttgtcaagagcgcttgtacgcgttgggcgcatgattattactttgtaattgggtgtatggacgcctaagctacgaatgcaggttatatgttatgtttttatgtttttcttactgagtatgccgactcacatatatgtacttcatgtgtaggtaaaggcatgacaaaaactgattaggtagtgtgtaacgctctaacccgtagggacgccacatgtctatttttataaattagtttataataataaactaatgatttaaaagaaaattgtgttttaattaaaatttacttattatttaagacataaactttattttgacattatataaaaattaggattggggatccacttctaaaaatattcacaaagattctattaaaattttacaaccaaatacttatttgatgcgtgtcgtaagccacaacaaatttactattttttttaattccaatacttccaattattttagtataatcgtaagtaagggtcgatcccacgaggactatgtttattaaattattcacaatttagtaacaagaattagaaaaaggggggttttgaagattagaataaaaatttcaataataaaaattaaagaaaagaacaaatttaaagtaaagaatacgatatgagaaactagttaaaggttattcgccaccctcaacaatcattcctaattcctattaaagaatgtaattttcagtttccaatcaaactattaatcccgcagataacgctgaagcagtcaattatcccaatctccctattgtatgtaatcaaggcgaagcgctcaataattaactcttttacctaaagcagtaaatccatgaagcatgcaatttatttaacttagataaagcattgagatttatggagatagactaatctaggcaacaaatcaatgaa

SEQ ID NO: 325573 - DNA, 2024 bp, Cannabis indica
ggacacaaatatgcttagtgcagagatgcatcctatttggctttatagtatatagggtgttatactctgccttcttctttgtgaggacaacactcacaacatattctgtgactgctaggtacacgcctagctcttctttgtctatgggtttgggcaacacaagtggctaagccaattgtttcttcaactcttggaatgtcgtttcacattcctttgtccactcgattttttttttgttgcctttgagaatgttgaagaagggtacacacttgtctgtagacttggacacaaaatctacttagtgcagcgatatgtcctatttggctttgtacttcctcgatgattgtggacgacttcatgtccaaaagggcttggatcttgtctgggtttgagcttcatgttgtagctgcaggggattttgaagcatccgtctaggtcctctatatgcccctagtcttctcagacttgacaaggatgttgtgcacacacacacctccatgttgcagtcgataggatcattgaacattttgttcacaagcctcagatatttgacctctgcattcttcaatcttgaagggcatgaatttgcagcaatacaagcctaagtctgtcatgaagcttgtacgctcctgatctagtggatgcatcttattattcatttttttttgctttggacaaggccaagttgtaacagtgacgggtaggttataaatctcctctcggcatctacctcatgccttgttgggaattttaggccaaggtagtagatagatgttacgtcgttaggttgcatagggctggttagcctatcatggcgttgaaagctaagggaatgctgaatacgataaactgcaccattagatttctggtatttgaattttctgcgacagtgaggggtaatctgacatacccgatgggtgtgatgccttggccaaagaggcgatacatcacttgactgcagggtgccaggttagcgagttatattcctaatttgtgttataacgaccagggggttgttgtgcgggaaactaacttgagcaggatctccttttgagaaagagatcgtgggctctctaagctttggtttcttagagtctcattctttgcttgccaagatgtcacttttgggttcgtaacgaagtgtccaagcacaaaactccctagctttgttggtcccgcctgcaatatgtggtccgccaatgaagacccctaagtgttctgccactggaggtttgggcaaagttgctggcacctgcttgtgcgcctagcaagagatggaggccgaccttcagagatggaggccaacctttgtactgttagttgttgacttgcccctcgtgggacgtctgggcatgctttgctttgggagttttggtaggaaagtgaagcatgcacacttttcctccttcttccttagacttcatggcataagggaatcgttgaatttccctcttttgccattatgttagtcaaagccatcgttgttgcgcttgcctctccattctcatgttacagaatcaacagagatcgtctgcgtcggtcggcatgtcggtcagtgcttgggtgctatgaggccctgtgtttgtttgtcattgacctaccctcttgtttgggcttgtcgaacaacttcttccaactttatgaagccatcagctcactcaaggaactcctccatgttgttcgttgagatcctcctgatatctttctagaagtcactcatcggtaggatgcctctgagtatggccgtatatcggccttcttctgtcaggcccttgaccttggtggtctacagccataaccgttgaatgtagtccttcaattgttcatcttgtttttgctttgttttgacaagatcttccaattgggcaagtatttatcttgaagtagagaactgaatatataattctcgggagaattctacccaagagttatgtcttcctgggtaccaccttgaaataccattgttgggctatttcagtctagagttgccagaaaaaactttggcatcacacatcttcaaatac

SEQ ID NO: 325574 - DNA, 1272 bp, Cannabis indica
ttggaatttttagtcttcactttcgatccagagttagcctccacttcaattgttttccccatcgatagctctgaacttcttgttttctctcctgcattaccactctctatgaaggaaatattagtactgtcactcttatttgaacctatcggtttctaattcagcaaagaagcttcttcattacttatagttctatgagtgtaagttgccccttgctcttgatctagtattccattaaataaaacaagagttagaaaaaaaaactaaaacattatgaatttatttttacaatctaaatgagattaaaaaaccagcaattaccagatattaagattttctgctgcctaatggttaatcccagcactgcactcctagctttctttagggtagcatccttagccatttgagtcactaatttatgtataggtcctccagtagttgaaaagcgaaccagagaaaacatatgatctaaactagttgttttgatcttatcattgtactgtaagattggtgagttcctgcctcaatctcctccaaaagcgctacacactcagtatgaacatgatccaatagaccacaaaacttgcaaaaagtattgagcctctcatatttaaaagagatccacatattagatagttggtcctccccctcaaataacattccctgtaataaaggacgatttatatcccacaatactctaattcgcataaaagttcttgagttttcagcatcgtattcagcaaaaactcctattatcattccaatttttgaccccaaagtttcattaatgttatttataggaataccatgaacttggatccaaaacgaaatattcttaaaatcctccactacaacctgattaatcccagatgactcaacaagcgacagataatgacccaaaaaatgccatggttgacctctaataatcctttgtttaacaaattctgattgaaaagttatgagaaacataccatcagtagcttcctccatcgttattcctggttgtttcctccacaatcctgaaaagaagtttctgcatgatttatttactcataggataaagagttttttttttggctaaactctctcaactattattctacttacacttaatcttttaagttcaaactttaaggataaaaccttccaaactatagaactgttagcaaatttaaggtgttatttatttttcacatttaactactaatataaactgtttatgtatacacttttatacatgtcacatttatattggtacacataatattatta

SEQ ID NO: 325575 - DNA, 720 bp, Cannabis indica
taatgcagaagaggttgtggtgggagtggagggaagggtatgcgaatctcgtagcacacatttccttgggaaatgcatgagtgacagtggttgcaccaactcctgtaggagccaaggattcgccggaggagcatgcaagggacttcgtcgacgttgtttctgttccaaactatgctaattaattaattaattaataataccttaattatatatatcatcgtctactacctactttctacttgtttccatatgctgttgcatcttctacctagctatagtaatatactataatcatatatatgattattatgtagtactatatatattaatatctataataatgaataaaaatgatattttgttttatacatcttcttaattcgtacgtatatatggtatatatgcatacccaatattggtattaattataagcctacactaaaataatataatattgaaaggggaacaaatataaaaatttattaactatatattataaattattcaaatatattaattttttaaaaaatagtaaattttttgtatgtgggcagctgcatgcccggcccactataaattaaataattaataaatgttcaatatattttcataactgaactgataaaaagcacatatggtgagtatattttttttttattaagagttcaaaaatatatatatttttttcagatcgtagtgcgtagcattttatttggaaaa

SEQ ID NO: 325576 - DNA, 2080 bp, Cannabis indica
tttactattttggaaaatacagggtctattttgtcatttaacaaaacacatggtccaatcagtaacttttgcaaaacacagggtacaaaatggtatttacccatataaatatttgtatataaaataaatgataattaatgctaattgcctttattaatccataaactaatcatgcgatcattataattattccccgttaaatggatttcgttctccaaaactaacctgaataactctagatattgggccctcatactagactctagctcccaggtggctttctccaccttactgttcttctagagtaccttgaccaaagctatgatcttatttcgaagaactttctccttcctatcgaggatttgaactggttgttcctcgtaggataaatcgaactatagttctagggctttgtatctcaagatatgagtcgggtatgacacatatttcctcagcattgaaatatggaatacattatgaacagctggcaacgctggtggtaaggctagccgatacgctacttgcctgactttctcgagtatctcgaatggccctatgaacctagggctcaactttttcttctttccaaagcgacttatacctttcattagtgaaacacgtaggaaaacaagggctcctatatgaaattcaatgtctctgcgcttatgatctgagtaacttttttgcctggtttacgaagcaagcatcctagccttgatcttgcctattgcctcattggtccgctgaactaattcagggtctaaatagttcctttccccagttttgtcgcaatgaattgaggaacgacacctcctaccatacaacatttcttagggagtcattcctattgtactttagtagctgttgttgtaggagaattttattagaggtaaatatttactccataaaccttcaaagtccatgacacaagctcgcaataagtcttctcatatctgtattgtcctctctgactgcccatcagtctgagggtgaaaagatgtactgaatttcagcttcgtacccatagctttctgaagactcatccaaaatttcgatgtaaactttagatccctatcccaaaaaattgattttggagcttcatgtaaacgaactatttctttaacatacaattttgcatactgatccactgtataagttgtttttatgggcaaaaaatgtgccgacttcgtgaaatggtccactatgacccataatgaatcatacattactgtggttctgagtaaaccaaccacaaagtccattgtaatgtcctctcacttccattcaggaagcgctaaaggttgcaataaccctgcaggtttctgatgttctgccttgatttgctcgaaacacacactcgagctttataaagtaacattccactgctcgagacggagaaatccttagtccgaccagctaacattccctctctagtcttcattgactcaacgtcttccaattatgcctctctaattctttttaaccaatatgactggagcattaggttattcaattttccaaccacgaactctataccagtcctaaccatatctgaagccaactgaagtgagatctttatggtactggaaacctacccggaaccttttttactcaaagcatctgccactatattaactttttcaggatgatataacattttaaagtcataatccttgactagttctaaccactgtctgtgtctcatattcaaatccttctaagtaaagaaatatttgaagctcttgtagtttgatttaggtagatacttgatgtggtgttgtgttcatgaattctattaataagatgatgtttgtttttggattatttatttagctatagtttatttttcattttacttaccaggatatttgaatcttatattttataatatatatttctattgagtgatttgtattttagtatatctttcccattattttattttgacataggctgaagcaagatttcccttcagtctaagatagctactttagctattactactactagataggggtgtgcagaaaggcatccaatccaatcccaaccgaccgatccaattccaaccgatctaatagaa

SEQ ID NO: 325577 - DNA, 676 bp, Cannabis indica
ttttcttactgagtctgtcgactaacagttattgtctgcatgtgtagataagggcaaggctaaggctgagcagccattagagcaagcggatggagattgtaaatgttagggcagttggacttggagcgtacaatcttgggacaacaagttgtattttgtatagtcgctaagcgatatcttttgtatcaatattttgaatcaattgtaaatattttaattactcatgatttataataaactcgttgatttgcaacgaactgcacagttaatataaaatcacgatatcacgcctaaattagtaaggtgttacataaagtagggagtatgattgggaccaccatgataaaaatagctctattttagctaaaaaaagaatactattagagatgcttgtggtttcgcctttgatcatatcctccacattataatattttaagtaattaaattatcataaatttctcgtggcaaacctcctcgaaatatattagttagacggacatcaattaatatattatcgaagtagtaatgaaatcattatttttttaaaaaaaattatttgagcattaatactctttaaggttaggcattcaatccaatctaatatttttctcctcacccgatccaatccaattagtaattggatttagaaaatcattatccgatccaatccaattag

SEQ ID NO: 325578 - DNA, 943 bp, Cannabis indica
ttttttcgttttttttttaggaaaattccagctcttttctttgccagcggttaatgtccaaatttataatattaattgtattttttagtgtatactctaaaattattgtatattattaatactattaagaaaattagaatattgattattcctattatactattatactgaataattataaaaaattaactcatcatattatatattgtatattatatattaattcatcatattattttaaatttaaattgatttttaccataaaaaaatactcagtgtaatcttttcaataaaaaaaacaattaatgaacagatatataagtttgttaattagtttattactaagcttatatattatttgctcttttatagctcactagcattgtattttttagcagctaaaatatttgtagtgacataatatacattaaacatattaatttggttttatattttatcgtgactaaataattagttggtatatataaaccattaataataaatgtaagtataaattttttaggactaatattttagtcattgaaactctttaacatttaccgaccaaatattttgtcacaaattgaggatttttagtgactaaataattttagtcaccaaaatttagtgctcccgccacaactattaatttggtgctaaagtttcagtgactaagtacaaatttagtcactaaaaatagcaaacagtgactaaaaattagtcgttgattcttttggttctatttaaatattattttatgactaaatatgtccgcgactaaatattagtcgtaaaagctaactattagtgactaagttgatttagtcacaaaaaatttagtcgctgaaaacctattttcttgtagtgattctaggttttatttattaattaagagactttatatgtctaattaataaatgtattaaatgacatattatttaat

SEQ ID NO: 325579 - DNA, 604 bp, Cannabis indica
attgaaaaattatcgataagagtcttatccaaccttggtacgcttactatcgataaaacatcgacatatcattgataaaccattaataacgtaaaaaatccaaatctcaccgcaaaaaactatatcctgccatttcgtagaaaaaacaacagcatactctttaaaatatttaaaaaattatttgaaaaatactaaactattattgcaagtgcagcaggtttcgtatggtcattgtgcgtgatttgtgactttagtgaaatctccgtcatcgccactggtcgtcatggtcgtgatggagcaaaaagatgagtgagttagagattttttttaagatacacttattaatatgagggaataaaaaggaaaaaagaagtcaaatatgtattatttggtataaattaataatggtacatttataaatatatacaatgaaattttcttggggtattttcttaagcatatgaaatttcccaaactaaatacaaaattttataagaagaaattacacttattatgggattttaaaaatttttatgataaatatgacacatttaagtttgaccaatttatatggtatttttttgtttttaggtctttttatggt

SEQ ID NO: 325580 - DNA, 1024 bp, Cannabis indica
ttctaattaacgtcacttatattctaaccttctatacaaagccgaagtctcacccatgccaccatccgacaaagttttcgatcgtattactaccaatttgtgaataaactactcacacatgccattaattaatggatctatctattttaaaaaaaaaaaattataatatttcaatgaactaaaaaagattatattctaataaaactaaaaattgttttaagtataaggtatgcaaaattcatattttatattcaaaaaaaaaaatctgattttagaaatgagacaaaagattatgttattgttacgtacgttttgttggggagtaaagagggtagtggggtcaagggatcacgtgcatggtgcattacccttctttggtgatgataaagattgaattaagaattaattaattttgtatgtccatggcattaaccattcttggaaatatgtatatatatatattatatgcaatggttattaatggattgaacacatcgcattcataaaccaccatcaccatctcatttggctttcttattattttcttttcaaagcgcgttctatagttcatgagtaaaaagaatcttcaatgatgtaattatcataataaaaagattattagctttggaattttacaaaactcatatataaatgtatgagtggtcacttaagaattataagagtgatgtgaatgagatagataaataagtccaaataaaataagcagtagtgatgcaagaaacacgtacataccttttacacgttatatataagggaagggagatgtgctgccataatcattacaacaataaagcttattaacactatcgcccactaataaggaggtcattagcggtggaaaacgggattcggttcaaaatttttattattagcagataataattcttaaaacaaacgaaaaaattcccacccatttaaattctgaggaaatattagtgatgaaatctgccactaataatattttttaatcactaaaatataaaaaaattattttagtacggtt

SEQ ID NO: 325581 - DNA, 3660 bp, Cannabis indica
catacattatgtaaataatcatgagataaatcatgtgaaccatgcaacattaaatgttttttctgatctttattaataagtaaatcagattatattgaaatgagttttatttagggcataaaacccaacagatgttgactaggcagctgaccctgatgatagaagatccacaactgggctttgtgtatgttttggtggaaatttgatatcttggcagtccaaaaagcaaccaacaatttctagatcttcccaaaggcagaatttcgaagcctagcagcagtggtgtctgaaatcacttggctcaagtctttacttactgaacttcaggttcctgcttctcctcctcccatgatatggtgtgaaaacattagttcggttatgcttgctgccaatcccattctgcatgctcgaactaaacatatcgaaattgatctatactttgttcgtgataaggtgcttaacaaggaaattcaagtgcaacatgtacctactgagcactagattgcagactgcctcacaaagccaatatcaagcaatcggtttccagttttaagaagcaaactcagtgtctcttgcccagaggacacttcatttgaggggggctgttttgagaagaagagttagttgatcctctcaactaactttctgttattcctctgttttaaaaccaactgtaacaactttctgttggtctgttatggttttgtttctttcttttctgcctttctcttttcctgtatataaatgattgtattggcttttcataatcgatatacagaaaacatttctttctcagctttcgtttatgtttacaacaacaaccaccactccaaactcacctcgctggcaatagaatctcatatatgagaaatgtcaactaaaagaaagaatagaaatttgacatgtttttttgtaactatttgcagttaattaggatgttttctaaaataaaataatttatcataataaagattctaacgagattaattttaaatatatttaatcttatataaaatatattatatgaaaaaagaggtgaagaaatcttacgtgaataatgggattgacacccagcaagtataattaaaaaaattagaatcatttacatgatcttgaatttcatttcatgttggtttgaaaagaaaagggtctattatgatgcttgttcatgactattgtgttaatagttgaaaaaatatataatacaccttttaaaaatggtctttttctacaccctttttcaatttcggcatctacaaaaatttataatttaatttgtattcatgattatgtatattaaaattatttagaattatttgtaaattttaaacggtaaattttagcatgtaagttttttaaaaatttcaaacaatacttttcagtgacaaaaataagattcaatatgtagtattttgattactacaaaaaggataatactaaaggtcatggtttatctaaggtgggtattagttgttgagggaaagcctcattcatggtagtttggtaaaagttaattgtgatgttgctctcaatattgatagccaaaggtatgagcttagtgttgttgtgagaaataacgttggtgaggttcatgtttctgctatcgagactatgcctttaggtcacgctaaggctagtgtgtctgaaggagttggagaatcaacaggttgttgatgcaccaaagtcatcattagcttgcttactttttttctgtattttgcttacgtattaaatttttttcctttcgttcagcacacaagactagtttcctcactgttatggcttcttgtttgaagaggaggaaatctatgaccaggactgatgattctcccacctgagaggttgtacaaccagctcatgtaacttcttcagttcctccaatgaagttcaggaggaaagagaagaaagtttttcccattaattcttccactgtaagggattcacacaaggggaaagagaagattatcaaaattgaagacaagccttctacttctatgatggttactactccagaagttatggatgtggtcgagttgaactcttgagattcagagctcatggtcaacctgtgggctcaaggcaccatgttgctggcatcaagggaatttatgattaactccaaggccaaatgcaaacacttgtggaggttggtatccaccaagcctcctcatgttatttctcaaggaggtttcggtgacatcttcgacatgagttgtttaatctgctctttcttctctttgacctttttatcaaagtcttatcgtgacctttttttgtcacttataggcttgtgttggctttgcttatgctatggataattagcatgtgagggttgttgagctgggtaagaaattggcagttgctgagcaaagagcttctaatgcggaggccaaggtcactaaattagagaatgtagtcgatgaacttgagactggtgtttcagattttttaggtgttgtggagtaattagcattaatttttatatttttcatgattatatataattaaatatgttatgggccttatatttaagaaataggcattagagtattgttatacccaaaattcggctgatacttcagagaaggacacgtgtcaacttgggagaatatgaatcaacaaatataatagtaattataataaatgatattaaaatggaataactcattaaatgctgaactggtagagtatatctataacttgttgacttaaggtcttaagcgagacacagatgtgcaaactattaattcacgtattgatgagaaaaccatttcgtatatgaagatatgatcgcaaggacgacatcattaatacaaaacgaggcaccaacctcgctacgtatgaagaaaagtaagagagacatgttaactattagaacagttatcgtataatgtacattatacaaactaagcataacagttgaatgaacttgaacgacgagtagcgaggcatccatcttggtataagaaggcatactcttggtgtcttcactgatcagcttcaaacatctttcaatgagattcactgctctgtcgagtaagctctctcagatagaagctgacattcaaacgatgttgactactgaagttcgtcttgccaagaattgcgattgtcagatggagcgttatgtcttcaagcacagaaatgacgagatttacaatatcaacctcagaaagacatgggaaaagctctagctcgctaccagggttatttttgccatgttgccagcgagatgtcccagaacaatacactttataacgtatttaatacatgtatgcattgacccggtaaaagcggatcaatcacagctgtgtgattttcaaataataaccgcatttattttacgtgggtcgtaatcaaatcctacaattttaggagattatagttctaagatattagtccaatttgtaattcactgccctcatatgtaactataaataggagcaggatacactgaaaagaggacggggaatccttaagagaaaaaaccctagatttgtatcagaaatatataataagatagactcgtggactatacagaattttaactgcaaaaccacgtaaaaaaactgtgttctttatttttttcctttactgctattattttctgtacaaatccatcacgatttgggctttaatatagctaacgaaaatctgcat

SEQ ID NO: 325582 - DNA, 1329 bp, Cannabis indica
ttaatatgtcaatatttactattacacatattatgtcaattaaaaaatggaaaaatttaaccattgtattttaataaaatgtgtcaataaaaataaactaaatatatgtatctaaactgcaaaacaacacacatacaacgaagaaaaaaaaaaccaggaattgaaactaatatacaccataaaaaatatacacgaccaaatataattgttaaaaatattatgaaaaacacttaaaaataattaaaaaaaatacacatatatatatatatacaacaaattaattgtgtggaatgaactaaaaatatataataaaaaaatacaagagagaaagatataagaggagtgcttttaattttttatttatttatttttttgtacgagagagaaagattgttgaaaaatatgagaaaaaaggtcaaagtaaaagaattatattttagtaaaagtaaaaagaaattaattaagatttttttataaaatatgattaattaaaaaaacaagttagatatataacaattcttaacaaaaatatctaaaaatacgagcatacatacagaataaccataaaaaaaaaaaacattaaaaaagagtttttcaaacaataagctaaaccaaatcatatagttttgttttttcattaataaaccaaatcatattagttatgtaagcaaatcttctttttcctggttttgagttgcatgcaaaatattatatagaaaagatcgacttactatatcagtgtaattaagtagtcacaataataattatatcatgtcatcatacacatattaaattttaaattcaaaaacgtttagtttattttatgacttttttcttttgttaaaaaaatttattttataatatgttgttgctccttctaatatttctataatttggattgtggccaaacttgaatatataggaagaaaatattaatattgaacaataattaatcataaaaaatgaatgagctaattaattaccaacttcaacttagaaagaaaataagttggatatataccaatgggcaattctttttatatttatactatattgaaataggttaaaattatttatttttcttttaagttataccataaatttatttagcaattcttacatcagttttttttcttgttgggattcgaatttaaaatctcatttttatgtagagaagtgtgaaactacttgattatatttataatcatgcgctacaacaacttaaaaatattaaatatcacaaattaagaaaattatttaaattattagatttagatataaatttataataaaactatggtgctgtttggtaacacttttgtttttcaa

SEQ ID NO: 325583 - DNA, 609 bp, Cannabis indica
ttactatgtattataaacttattaaaactaaaaaaatattgaaaaaatgaacaattatattgtaaaaaaaattaaaataataagtacgaaatacaaatcacggtttgaaccaaattaatccatttttgagtagtatggtttggtttgatcatttcattggtctgatttggttttgaatttttaaaaaactgtattatagtggtttggtttgaagaaattaaaatccggactaaatcaatccgtaaacacccctaattgttatatcaaaactttttttttataaacataatatatccatatgaattatacaacaaaattttaaataacaaaacatgaaaattgatcgatctctatattgtacgattgaattttaaatttcaaaacatactcttttgatttgtacaatacgactgaagaaaattcatcatattccttttaatacatatcatatacaaaatttaaactgtataaatatatatatatatataaatataattagatcaaaatcttaattttttaaaatccccaaattttatgaataataaaatcattagatcttcaattaatttaacaaatgtgactttagtaccacttgttaagatttataaa

SEQ ID NO: 325584 - DNA, 668 bp, Cannabis indica
ttctttttagaaagaaaaaaaaagattgaagactactttttaaagaaaaaagattgaggacttaatgattaaaattgaaatttgatatcgtataatatggagaaacttgcataccaatgtttttctttcctttttttttttgaaaaaggaaaataaaaatcttattaaatagtatgataaaaaaaacataaatttactattttatatttaattatatgatacaaattaaagttgataatcaaaattgcattaataatactaataagttctctaatcttttctttttttaaaaaaaaaatattaatatgcatgtatgatgtgattaaatctaagggtggtaaagcgagtttcggcactgtacacgaacacgaacacaacacaaattttatcagttagggttttggcaaaattagatgcgagtcgaaaaccagtcgacacgacttgatacaaaataaaattggatcaaacgacacgactcgcttaatttaaatttgacacatttgacacggtttgtttaatatgtaaaaatatatatttactgattcattgttgagttaaaaaaaaaaatttaattcttttaaaaaagaaattgaaaatatttcaaaacttataatatttgttatatatatatataaactatatatgcatatatatatatataaattttt

SEQ ID NO: 325585 - DNA, 885 bp, Cannabis indica
tttagaatagtagagctatctttgataccgaattctatcctttgtaacgactgtgatatcttaacttttaattttattttattaaaacgttttaaatttaaaaaaaaaaaaaataacaccatcaagcatcaccatcattaattatatacccaattatgtaccctcaacgtaaatagagaataattgattagggtaaccagagaataactacaactaattacttaatgatgttcatctcatatattttttaacaccataaaatagtatttttactgatattataaaaaatacccataaaatatataatttagacttattattgtacaatcgtttagataaagttaaaaaacattaaattacatatttaaaaaataaaataaattataatctcatgtttaatattttttaaaaaataaataaaattagtaattaatattataaatttctagtaaactaaattaaatgataagacatgtaactataaaacttctattttattattctttttttttttttaaaaaaaagaaccctatatttgattaaaataataacactacagaaaaaggcatcttcaactaaaatatatgattagattaagtaattatactagcatataaatattaatattcaaaattgagttaattttttaaaattaagtggtaaaagtaagtgtgagaccaatgattcaatgaataggaataggaaaaaaagaagtaaatttttatgattattttttgttggtactgccctataatatatagctttttaagtgtgccattttaacaattttaaaaacaagtaaaaaattaagtcattaaatgagtatatatatatattgttgaccgaggttttcggcaaccaacataataataataattaagaaag

SEQ ID NO: 325586 - DNA, 1003 bp, Cannabis indica
tcagcaaatttagtagctcacacgatagctagagctgctgtttcttaccctgatcgtactttcagtatggggatgtcccaactgatttgctaccatgtttggtggctgagtttgaaagttaaataaagtttgattacttttttcaaaaaaataataataaaaaatagaaatagttcaaaatttaacgttatagctaactatattcataaaataatatttgagttttttcttttttttactaaatgggttatatttcatcacttatttacatttttattcgatgctctaagtcaatttttttttttttttgtccagaaactttatttaaataataaaagtaaaacataagaaatatgagggataaaaggcattctaggggaaggtcccttatcttatcctcaatgtaaattaagaaaaaatcagtgattaggttttattttgaaatttagtaattgttttcttaagagtttttagcagttaaattctcttaattatcgttttatttgtgtttaattttttaagcttaaattttagccgtaaatttttttaaacaattggacctttaacaaatttaaagtattatatattttttttttacagttaactgtcaccatagactatttatgtgtatactcttgtacatatatcacgtttatattagtacaccttatattatttcaaattttattttaaaattaaataaaattatgatttttatattttttaaataataataatattaggtatatcaatataaacatgccatatgtataagagtgtacacttatttagccaagaaggataagtgtcagtggaataatagttgagagggcttagccgcaaaaaaaaaaaaaaaacttttttttaaaatactattagtgattgcttcaacactatttagccatataagagtactgagggccctaagcataaatacagtagaacctctatttaagaatactctattcaagaataacctctaatttgttataaaaaaatcaag

SEQ ID NO: 325587 - DNA, 2082 bp, Cannabis indica
aaaaactgttttggattgtgacccctttttgagtagattttgcagaggttgtggttgcattatggtcgagggtgaggagcagagataatagagatattaataacctctttttccttagcagttaatgcttgagagatatcatttaggaaagaacccatgaagaaatatgaaaggagtaagatgaagagaatcaagggaagaacatgaaaagagaagatggaaaaatggagacggttgtagagaaaatttgcaagaaaaaaactaatcaaagaagttagaaaagaaaaaaaaaactaccataactaccattatgtatataaaggatatgaaattcttgaaatttaatctccatttgcattactatgacagccaaatacaaaaaacatagaacaaaaaaagataatacaaacatgattttttgattatctaattaaaaggctatctagccaccaaagcttgaaaaaaaaatacacgattattggctaccaaattaaggaaaaagaatctaatcatgatcatcttagaccatacaaaaccaccaaactacacacttgaattgaatcaaataatctcatgcatttaaagatcatcacggactctaatattcagtcttctaagccaaaccgagtgaagaatcatgtgaaacacatcaaatctcttaggaggagagttaacctcaaagtgtttcctcactttaaccactctcctctgcattcttatgtattgcctaggagaaatgctcattagaattttcttcaaatttcgaatttcgctaaccggtacctccaccgagaacgatttccaattaagaacatcgctaaaaggcggtacatagtgatcggatatgaggacaggcacgcagcctgtgtagatggcctcaactatccttggactcgcaacctcatatccactaggacaaatgcagtacttgctctttctcaacatgtcatagtaagatacccctttgggaaggtactgatgtattttcatgtcttcatctttgttctcccaatgctctagtaaaataggcctaattgggccatgaagccctcctgcgaaaaaagcaagaatcggacgcttcgaagctgaaggaccgcctagaaaaccatcggttagcccggttaggaggttgatttcggggaaggaaacatcttttgtggggttaaaaccttcggaggtgttggcattgcataatacccttattgagtttttgcgtaggttaggaacagaggatgatgcttctggcccctgaaaaaacgacaatgattcatagtttagaaacaaagaaacgacactaatttattagtgtgtaatataaacgtaatttacccaatcatggcaagagagcatgaaatggtcagctccaaggctacgattccaaaaggggtatttggaagaaacgacattaacatagtcaattacggtttgtcgtatgggactaaaatcgtgtgagtctcgaacataaacataacgaaccaacattgtaacgctaaaaggtaagaaaaaaacgtgtgctttttggggatcttttgttcgaaactgtctattcatttcaagctcgtggatgaaatttccttccatggaatatatgctcttacaaggcccattgtgaaacaatggtggttctccttcttcataaacaaacaccttaaattgtttttccatttctaagtagctcctgcatatatgacattaattaataactgatattagtaatatacataagtttcaggatttttagcataaatacccctaatttttttccttatttggtcattcagtccctaatgaaaaaatatttggcaataaaatctcagttctataaacacatccaattaagtcattggttttttttttttcttcacaaatcatatatctttttttgaataaatatgatgatgtctaaaagtgaagacattattattttttttcttttgggataattacataaaaaacgtttaaagaatttttttacaatttttcaaagaaataatataaaaacaaaaaaaaaattaatataaaagtaatatgaatataatatttaaataatagtaaaaatagcatacaaataataaaaaaaat

SEQ ID NO: 325588 - DNA, 1225 bp, Cannabis indica
aaaaaacacttttaaatattgaaacatataggagtgttctcctagagtgcactacatatttttcttatatatatttagtttactaaaaaatgaaatatattatattttaatagaaataaatttgaattgatttttttttatatatatatagaattggctttttaaattaaatttaagctaattaggatttttgtccctcgaattttgacatgtaccaaattatgtcttttgaacttttaaggcctttaaacatctccctgaactattcagaatgttggattgaagaaactttgtccaattttagtaattaaggtataatatggatgaaagttcaggaggcacgatttgatacatgttaaagttcgagcaacataatttggtagacatcaaaatctagggagtatgatttagtacataaacaatcattgaattagtaaaattaaatgaaattagataaaagtccttaaatctaacaatcttaatagttcaaggggaatttttaacggcaacaaaaattcaggagacataatttagtatatgtcaaaatttaaaaggtaaaaattctaacaaatcaattacttattaattttttttcttctactactttctttcttttcttttatcaataagttagcaacaactattattattattattattattattattattattattattattattattaatacacatttggctcaaaatcatttactagtttttaacttttatttttaaagtagaaactgagatttgtcttctctaattaagtgttggattttgttaaatataaaaaaggtgtactttgattacaagtgtattaatattcttaatttaaataatataaggtaatttttgttctattttaatattttttaaaagattttgacatagaaaagaaattattttaaattttaatattgaatataaatttaataattatgtgctatagattttttttattgaatattaaagtttaaaatttggcccccttgcaatgaattcttggctccgcccctaagttacacaaagaattgcttgaacaccacacacaccgctattgttcgaacaagtcggttggtgtgcaccttattagtcttgttaattccattttttggcatatttaattgacaaaaatattttattattctttgtatatttcggctggcatatattgatatggtttccctatttgtgtatatctaaacttggaaggaaagtt

SEQ ID NO: 325589 - DNA, 1358 bp, Cannabis indica
gggccacagtcggcccgtcgggccgggggcccggcccggcccgcgaaaatagcccagactgacattcctacaggcaagtatgtgggttaaatggatgcactgtgtttatttaaagggtgccgattggtgtagctatagtgctccttcttatagtagttagtactacggtcacattgttcaaaagaatgaagtaaaagagcatttctcttctcctatttttttagatcacacaggtataatatagctataatgtttaagacattgaaaaaaaaaataaaaatatggtgacatgaaaatattctcaaattttggaaaggcttcatactcccaagcaaaaatttcttttacggttggccttacagaaccgactataaactcaagataggcttgttaaattttgtatcacctctgtttcgctttgtgttatctgtgggcatttagacgagttgcatgaccatttatttttagagtgtcattttagaatgcaaattaaagagcaaatttggaagtagcgggatattacgtataacaggtagaacctcattggtttatgaaatagattaataggtgtagacataatgcttgttgaaggaagatttatgtcctcttagtgtcagtttccatcacatctgaaaatcttgaaatgaaaaatattgcaataaggtgattccaatgatttctagtgttgtacaaaaaattaagtacgacgtttgtaatagaaaattctttttgaatacaaggaaggtagggaagatagatacatattgggttggggatttaaaatgtaattgttatcccaaattttgtctgtctgacgtggcatgttcacataggccaagacagagtatgtaaggccctaacaattaggaactctacgacaaccgataatgaaaccctaatcccgctaacccgagattactagaaagataagcgtgggaaatttaaacttatcttgcagcataataaaaatatacttgtaatagttttcaactttacaataaatcaaaagatataatcctttggatcccataaacattttcacaatataatacaagtttacttcacgtgccgacctaagcagcaaaatcagatattttcaaatacattcactagtagaccccaacccgcttggtctagtgtggcccgaacatgtacaagcaccgccaagctctcgcactcatggctgatcacagactgatttacctttttctggacagtagggtacccgttgtaacgtccccgcttcaagcctccattgggtccttacacccacggaatgaaggactcttatacacgagtacgtcactctggctgcttcatggactggcgacgggccctacaaaccaacacgagtgttt

SEQ ID NO: 325590 - DNA, 971 bp, Cannabis indica
gggatgaaaaatcactcaaaattcgcttgtgtatttcttttgagtgtttgggactttgaaaatgggattgtattgtctatgttcaaagttggacttttgtgaaggtgggtccaacttcaatagagcaactatatggggtgtaccatgaacttggttagtccatattttgagatgggcaagttgaaaattttacttttatgtcataaaagaaataaaataagaaacactatagattataatgtgtttgcatatatacattgtaacaaccttttaaatttgttgattgttgatgataagcacgcatgcatatgatgatttcatcaaaatgaatgtgtttatattagtcaatggggttggtaacttggtaggagtgagttaagcagaaaaacaaaatggaaaaaaaacttagtaagagtgattggtatgaaattgtcaactgagatattggtggggtccatgatcacgtaattttttttttttaatttgactaaccaaaaataaataaagattcttctgattctttgaagattcacattcatgtcatgggtgtccaatgtttatttagtctaaagaataaacaagaccacaattaaattcattgattggccatattgatctttaagtctactttccctaaaagctactaaaacaaatatgtatctgatccaaagtcattgattgatatatcacaacaatatttatgttagaatattagattaattgtaatcctatccaataatggtattttgaaagacaaattcaatgaacccttcttaccctttatataattaattcattaatttcaatataattttatatcaaatatcctagtataatattaaactacatagagagatatattttagaaatttcctaaaaataatttaagttattaattaaattttttttatataaaatgaataaaatatgaatattgttataaaataatataaaatagataagaaaaaaga

SEQ ID NO: 325591 - DNA, 593 bp, Cannabis indica
aaaataatttccaacatagacatctcagataaagatgttaaacaacattttgtccacttcttgtttaaaaccttcaaatttgaccgagtcaatgggacgtcttttctactatacgataggtatgtctttgttgatgttcaaaacatgggtagtgatgtttggattgatgtcggtcatatctctatgactctatgcaaagacatttgcagactcattaatggcctccacaatttcatttctttcatttggattaaggcctttcctaacacgaattaccttggtcggatcctgatcacaaatttgaatttcctctacttcttccataggtttaagaatggcctcagctcccacttggggatccaattcatcctgcacctccactgggtgtccttcttttgtgtgttggaccatggggatagcttacttggtggctacactatagcattttcttgcttccccctggtttccttgagcagttctaacactcacaagatgggtatggaattcgaggcataagtgtctgattgaggttagttgttgggctttgtgacctaaataaaactctatttaaatgtaatcttttatattcattt

SEQ ID NO: 325592 - DNA, 836 bp, Cannabis indica
gatcatatgcgtccaactgaagccgttcttgcccttccgcagtctctgctcaagcttgctcaaaagaggtacttaaactttgtgtctacaaatagataatgttgacttcacattcagagaggaagaaagtgtgaataaacaagtattggggctgaaactgtgattttgtttaggttggctgtgcaaaacctacatgatgaaatgatcttcaaaataaaaatcaagagtagatggataagcagatagaaacttatcaggtgagccaaatcaagatcatttttttgttttctaggggctaagacatacttttctgattactttgtacctagttggagttggactgagtttgatacaacatggtttgcttcatcatttctaaaatgctgaactttgttcttgcaggggaaaaatgcagcaacttaggaacaagctctgttaaaagtaatatattggcttgaaaatgtaatatctttttgttttgtacatacaaaaagcttgacaatcatatacaacaataaataaaggaattatttcagaaatgcccaaaaacaataaaaatttaagttttttaaggatactgtttttttaatatttttacgggttttttttataggttgtttttaggttgttataaaaatgaccgctttttacacgtggagatatagtataacattgcgacaacatcaaattttttctctaaaaaatcataaattcgtaaaaatgtgaaaaataaaaaagtaaaagtacgtaaaattataaaaaaaaaagtataattttagttattttgtgtaaattttttaaaaataaatgaagaccaatatgtagggatggcaaaa

SEQ ID NO: 325593 - DNA, 601 bp, Cannabis indica
atcagattgtaatgagttttatttagggcataaaacccaacattcttcaaccatcctgctcggatgtctgaatgttacaggtactgagtagtcattaatgggctactagggatattttcctccgtacaggttcgaaaatatgagacgagtgtcatccattcctattgccacatcatggtacaaaaaacaggataacatttggcccccaagtctgcgtgggaccttcttggtcgcatgtggacttcactcagcctggagtcttgtccggataggtgatgtgtgttgttgatgtcagatgatgaactgatgtgactttgactaggagtgtaacaccctatcaattaggcacgctactaacaactattaatataacctaatcttgctaaactgggattactaggaaataagagcgggacatttaaaactttaaatcaagtacacagtgaaaatataacttgtaattatttaattaacaaaccactccaaaaggttacacatgtttcgggatcccataaaatttttacaaaatattacaagtcattttaacatgtcgatctaagtgacgaaaaccgagaatacaaaatacattagtgttgggttt

SEQ ID NO: 325594 - DNA, 843 bp, Cannabis indica
gacaaaagtccttaaatttaacaatttcaatagtttaggggaaatttttaacgaccttaaaagttcagggggcataatttagtatatgttaaaattcgaagaaaaaaaattcctaattagccataataatatgcatatataaattacacacaaatatgaaacacttatgtggcaactcacttttaataggcggaactcattttaaataaagatgagtgtgtttgagtaaattacctcagttattcttaattgggtcatttgtaaataaactttaagccttcaagggccaagcaaatccctttcaagagggattgtaagtggatttcgaacccttaacctaccaaagaaagatgtcagtaaagacaattcttactactacactacaatgcgtagtattaaagcatcttcaataagagttgtctatagaatggtctttaccacacgtgtattttagataatatttcaaaccaattttatgaataatatatattgtccaaaataaataatagtcatgtgatattatttatttgtttattttgaaaaaaaaatactttattaccaactagttttttgagagtatatataattataaaatttaattaaaaagtagtaggagatcatagagaattatttttagagttgcccacaaataatttatatagataaaaatatatgtattttaaaataatatgtacatataatttaaaaaataactcttaaaaatatccaaaaatcagttgtacccaataataggggtgggcatccgatccaatccaatcttttttttccatccgatccaatctaattagtaattggatttggaaaatcatcatccgatccaat

SEQ ID NO: 325595 - DNA, 614 bp, Cannabis indica
atgttggtgtttgattcaaaatttgaaaatgaatagtaaaatagtaaaagtggtgggggaagggaacactaaagaacatgagaagactataataagcgccgtcatctactttattatactatcactagactactcactactgccaattagcatatataatatacatagtgcaatgaaattcaattcaattttatcttgcacataacacaaggtcatctaataatatacatgtacaattaataattaacaattaacaatatagtcaaaaaagaaagccctttcaaaaaaagaaaaagaaaaaaaaaaggaaggtaagtgagatggcagtgacacgtggagagaggacaggtcagatccaaatatggttgtgctaattgtatttaccacttgcccgccttcagtgtcagagtggtaagaataagactcttttttgttatattttgaatgttcaaaaactcccaaaaagacagaccaagagaaaatgaagactgaaagagggaagaaagaagaaagaagtaaaccgaaagtgatcgactctactcgactcagctcaactcgccctcttcactacgtctcctgtaattgtcttctttaatgctctctctctctctctc

SEQ ID NO: 325596 - DNA, 680 bp, Cannabis indica
ttgatttaggggtaattaaggttaaaaaatggtaacgtaccctgagacccattattatgtaccctgagacccatctaaaggctgttgtacatcacctaatagcttaagtacatgacggaatacattccgtgaaagtacactaacgagacaaaatcgtgtccctatttatgtaaatatatagatttatatatgatttattattatttttttaatttacaaacctttaaaagtcaaaagtacttttctgacaaggctttctaggggccactttataggtattagaggcaatattgtcgcccttacaaataaagtttagaatttcatagattacttttagggccgacattagcgtccctaattagaggcgaatttttttatcgcatctaatagtacatttaggtaagaattattagagatgattttttaagggagacttgtcgcttctaatagtcattagaggcaattttctatagttttgggagcgacttttgtcgctcttaatacatatatttattgtagtgagaaaaattaagggcacgtttagaaagtcaggatgtaattaaatttgtgtgtaattggagataattacacaatttgacatgtttgtctgaccacgtattacattgtatatctgtgcaattggaggcaattgaggagttccaattgcactctccaattct

SEQ ID NO: 325597 - DNA, 862 bp, Cannabis indica
aagaagaagaagaaatgggaagaagagagagagacatgctcttctcttcaaagggtttagtcttcaatggatgactgtggtggtggcctcatccaccgaaggaaagccaaccaaagtttcaatctttgatatgatatgagactttctcttactctatctctgagttctcagctcagcagctttagaaatagaaacacattatcctttcattttgtctttttatctctcaccgcgattcattttttattattaaatacactacgtttttcttttccctctaacaataattaaacacacttatattggtaattaaataaaaaataattttttacctaaaaaaaatataaattgatattttatttataaaaatattttcataaggtatgagtaataattttaattttaatgagcttttatttaccaaaatattacttacacatattcatttatatcagctcaaaccacatttcaactattatcctttcaaaactcacgttcaaaacccacgataactacctcccagtcataaccttcgccattttcttcttccaactgcctcctttatcaatttttttttatatatctttcattttgtatatataatgactattacatgtggctctgtttctctatctccattgccaaaaaaaaactttaaaaataggttataaatcagttgctaacaacgctaaagggaaatgcccagtcattgacgatgatgactccagtttcgctccccacgtggctaaaggtggtcgtcgtccaatgaagaagaagttgaatgtgtctttgcctaaaaaaaattcaacttcgacggccaaaagggaaagaagaaatcaactttaagacaactgtgatgaaa

SEQ ID NO: 325598 - DNA, 1357 bp, Cannabis indica
aatgaagtggagaagctctgtagggatttcctgtggggagttaagggtaacaggagcaaaatacacatagcctcttgggaaaaaatctactatcctaaatctcatagagggcttgggtttaaggatagtgctaactggaatagagcaatttttaccaagtatctttgggctgtgataaacaaacatgacttactatgggtcatgtgggttaatgtggtgtatttgaagaacacaaatatatgggagtacaatcttaccacggatgtgagctggtactggcaaaagttgtgtcacttaagggtaagatttactgttgaaactcttactgttgcaggtaaaaatggtaaaatcagtctagctgctgtgtataacaacactttgcaggtgggaaaagtctgctgtaatgaagaagtttggtacaggagcagccttccgaaacatatgttcatgttaaagcaggtggttaataatcaattgctaaccagggataagtttttcagattcaaattgctctggaaaatgttaattgtcctatttacaatgctgagattgagagccataaaacctatactttgaatgtattttctcaaagcaagtggtaactgctgtctttgattggctcggggtccaggcttggcctttgaattttgatggttggcttagttggtgttggaataggggcaaagggcagagcatgagcatctactatgcctgtcttgcagcgtgtgtctacaagattggaggaaccaaaacaattgtatacataaaaatttctcttttactactttgtatatagtcaatgagattaaagttgttataaaaaataggttgtatagcttacaaagggaaaaattgagtctggaagatgatttcttttttatcaaattgattgattgtaggctattgtgagtgggctggctctttgacttggctggttgtgtatttggtggttgattaatgaaatcctttccttgataaaaaaaataaaataaaatcaacttaaatattaattttttttatttaattaaatgtattaaacattagaaacaaataattaagtatcttgaatgaaattaacttaattattaattctaatttaatatctaaaaaaatactctactttaatttgatataaaattaattaaaattaatttctgattaaaatttatttttctaattaattaaatattagaaaatataatttagttactagaaataacaatctagaatttatttcattaaattaagtgtgtatttctaaattaatttaaactaatctagtgaaaaattaattttatttattttaaaattaattatgttgctaatcaattttaattaggttagactaatataatta

SEQ ID NO: 325599 - DNA, 1191 bp, Cannabis indica
tctctctctctctctctatttaccgtcacacacacacactctctctctgtctctatctctctctccactttctcttccccttcttctctcgctcaccaaatctctactcaccttctttttcgttcgtgtgacacccattgaagaccagagcttaggccatcactggaatttctcgctataccaagatcactctcttcactttcttcttcgttcgtgcgacgaccattgaatactcggagctcatgccatcaccgacatatgatggtccatatatctcttgcacatctctctttgttcatagttttgtttttttaggtggttagattttgggttaatattttgtattattttttcaatctttaatctgttatggactttatttattatctgtttgtaattttcgtttttcagattttcttaatgagatgaagaccattcttttcttaaaatattatactgctagattgaatgatatgctgtcatttttttttattttcatattgttttgattaaattatgagcaaaatatttcttattactattattagggtaaatactattttggaccgtgtgttttgcaaaagttaccaattggactgtctattttgttaaatgacaaaatagaccatgtattttctagaactatacaaataggacactgaactgattttttattaaaataaaacttaataataatctgatctaaagatgttatgaaaaaactagttacattttatttatctgttcgtgctaaaaattgtcttaaagttggtcatattaaaaaaataaaattgttaaaaattgagctcagggtcttatttttaccatttttgaaaatatagggtccattttatcatttaacaaaatagtggatccaattgataatttttacaaaaacacatgatccaaaatgatatttacctttgttattattattagaattttattagaaaaattcatggacatataattaagaaactcaacaatccaatattaaacaaaaatatatatatatattataattttaatatagatactatataaattatgtaatattatatgtataaaaaataagtctataccattttaagtttgtaatttcaaaattactaaagtctatttttaagaattattttttttttcgaaaataccttttagggctcgtttggaacgccgtattaggtcgtattg

SEQ ID NO: 325600 - DNA, 553 bp, Cannabis indica
tatataccctttgtactaaagagatcatcagaaataaaaacatttttctctcatttgcttcaaaaccttgtcacattaactctatttctagaacgatgacaacatctcaaacaaacttttcacgctttcatcgaagaacttgggatcaaatttatctttatgaaacattttaggcctacccccattaatcaaaagtactgatgaagaaaaaactaatatatgaaacatttctgttggtccacctcagaattagatttgtgatacccttcaacaagaaaatcccttctcattttatagactggtggatgggaattttggactggacacaattggcccaaaagtaccaaatattaagttgggtacccatgtttgatcaaaataccaagttggtaccttatgttttaataataattatttggtaccttttctttgccaatcctacatacttggcaccttctctttgaatttaatggactcaaatttatagaatgattaaattaccctcattttattttaaataattttaaggggaattatcctatatattattttt

SEQ ID NO: 325601 - DNA, 1201 bp, Cannabis indica
cgatggtcagtcaattttttgggccccatcggactagccatcgggcctttgtcttcaacccaaatcttttttatcatgattcagtgggcctgcatcggacctgcattagacctgcatcggacgtgcctagaaaatgtattttttaacccagaaatcacatatttaaaaacactaacttttgacattggatctgtgggtcgtggtggtcgtggagaaagagatctttagtccgtcaaacacggtggtcgtcagtcacaatcgtcgtggatggtgaaaaagggtgttgtttgggtcgtgggtcgtggtgatggttgggtcgcgtaaatcctcagatggaaaattggtggtggttggtgatagagagatagtggctgtttgaaaatgaggaggatattttgggaaaaaaataaatgttgacttatttagcaaatattaatacatatagggaattaattttaaggtattgtaatatacataaagaattaaattttccaatatatattcatatgatcattcacataccatttccagaattaactaaaataaaatattaagttgtgtgtgcaaaagtccatcgtgactaattagtgagaaataacccatcacctaataaatatttatttaaagagaaaactaaatcacacctaaatggctattcatgtaatataattacatcatcaacgatccaaacaatatggattcgatggtcaatacagatccaatatctgctggatgattatgacatcttatcattattaacattaaacataattacgcaattctttcacatgtttttctttttcttttttcgagttactacttacactataaaactaattaaatgtcataaagctaattaaatgtcatttctcataaagctattttgttgtttctttcttgggatgggcgcaaattattattagaataattaataattttgccttttgaattttaaataatactactaattttgttttttaaaatatacggtttgttaaattttttttaaaattttaatatttacagaaatttagtcattctgtaaagtaagtcctattattctgtttaaatgctcatatattttcgttaattagtaattttgctcttaaactttgacaactatcaaatcgtactcattcaaaataaatcttagaaaattaatttagatcttaaaaaaattatgttgaatgattaaaaaaaa

SEQ ID NO: 325602 - DNA, 1587 bp, Cannabis indica
gttggcctagtaacagtcttccatgttttatttttcttgagtgatgtcatttcttcatcaatagcagcaagccatttatccctgttcttgcaattgacagcttcatagtaagtgctaggaacaaagcattccacttcttatgcagaagcaagggcaaatgcagtgtagtcagcaaaaccaaatctatcaggaggtttgactaccctcctttctctgtctctaacaagttgatacccctgtgatccaccttgatctgtttcattatcttcaacttgttcctgatcagtttcatcatgtctgtcatcattctgagtttcttcaatttgaacctgcatactatctgtgacctttgtctgagtttggttcctttgtttgattctttcataggcatttcattctcattgaaaatcacattcctacttatgttgcattttctgaaaccatcttctaggcaccatagcttgtacccttttaccccatcagagtatccaataaaacagcatttcagagcccttagctctagcttgtcctgtcttatatgagcataggcaatacacccaaagacccttaagtgatcaattcttggagcatgtcctctccactgtttcttgatgggttttgaaatttagtgttgcagaggggcacctattgatgagatagcatgcagttttcatggcttcttcccaaaactattttcctaaaccagcaaccgtctgcatacacctcactctttcaatcaaagttttgttcattctctctgctatgccattttgttgaggtgtcttgatagcggttgtgtgccttcttatcgctgtctcttggcaatatccgttaaactcatctgaacaaaactccaaaccattatcagtgcacaacattttaattttcttatttttttggttttctatcaaagttttccaattgacaaatgtgtaaaaagagtcatttttgttgttgagtaagaaaacccaaacctttcttgtatagtcatcaactatacttagaaaatagcttgccccaccaattgtttttgttctggatgtaccctagagatcagagtgaaggtaatctagttttgccttttttgtatgcgtagcttttgtgaatttcaacctgcaacttttaccataaacacaattttcacagaattccaatttcttaccaagtttatctttgagtatgccttgtttctcaagctcatgtagtcatctctcactgacatgtccaagtctcatgtgccaaagctttgtctggtccattgcttcatttttgactactgttgcaaccctaccaataactgtattaccagctagatagtaaatctcatttatgagatttcctttcatcaccactgtaaagtcttttagaacactaagtgaactatcaatcttgatgatgcagcctttaagagttagtgcaccaataaataacaaatttctatttaggtcagggacatacctcacatcactaatggttctttctgatccattgttcattttgatcaacacagaaccaattcctgcaatcttgcaggctttgttatcacctaacaagactgaaccactgtcttgttcttgaaagctgcaa

SEQ ID NO: 325603 - DNA, 900 bp, Cannabis indica
caatgtaggatcatgtatcctactcccatcctgttgttctattgcaagaattcgattttgcctcagcctatgtttaatactggcatgaaagaaagtagtattacaatctccatcttgtaaccatgttatcttagctttctgttgcaaaaaagaagcataatctttttgtgttcaaatcaaaatctcccttgtctcctgttcatgtttatgtaaattggcatcaagcggctgaaggtggaatttactctacaaatcatctagttcaagtttaatttcgttaactgttgcctagaggttagcaaagccttccgtatttatctccttaagcttgattttgaattgcttaagctttgagatcacctggaacataacagctccctcaattctctgtgaccaagtctcttttaagtagccttcatacttaggatgtgatttccacattctaaagtatttgaaaggcttcttaccacatgctaaaccaggataaagggttagaataccaaaggagtgatcaaataaccattcattaagataaacagcttcagcatggtcatatttgttgatccaagattgattggccataaccctatcgatcttataaaatacgttaatatattactatcaaataaatagtctatcacaaaataaattcaccatgcttatccatcgatggcttgaatctcttgccacatgttttccttcttatgatcttgattgatgctctcccccatggataattttctttgattgtatgacctccatggcaagtcttttagaaagaagattatgccatcaaaatggcttttagattgttggaaaagttctcattacaagagagaatagggggattacaatcaaaatactcaaaatacaaattaaagtactacatttagattacaa

SEQ ID NO: 325604 - DNA, 577 bp, Cannabis indica
atccactcatcaccagtggcttgacttgatgccacaagagcatcagcatactcatatccatcaagaacacagcctgcatctccataacctttcttcttttctttgctgagttttgctttgagagccctgcactcatctctgaaatgaccctccttcttaatagtagcattgttttcacgcctttgggtttgtgctggaattcgatcttagtctttgaccattgctactgccctttgaatgttacccttgtttcttgacttgtgattgccattcttggtatccctggactctgttttgcttcttgcaaacattcctacaccattgttgtcaagtctttcttctgatttcttctgaatttcctttgaattcagagcagctttaacctctgacattgtcaaggtttctttcccatatagtatggtgtctacaaaatgttcataacattttggcaaggaactcaacaacagaatcccttgatcctcatcttcgatcttgacacctatgttgctgagatcaagaatgattctgttaattcatcaagatggtttctgaggttctttgtatcatccatcttcaa

SEQ ID NO: 325605 - DNA, 1272 bp, Cannabis indica
agaaagatatccagaggatatccacaaataacatgaaggagttccttgatagagcagaagactttatcaaactggaagaagccatagataggcaaaggtggggcatgtaaacaacaggcagtcgcgaggcacccaatagcctcatgacccatcaagcgcataggcagacaatagaaactctccctagacatctagtggtaaaaacactagaaacaagtgcgacaccaacagctctataaggaacaatggaaaaaaggggaagtttaatacttcgcccatgccacagaagaaataggaggagaagtatacttgcttcaccctcataataaagaagcccgagaccatcattatggcccctcagggaaaggtcccataccgaaagccctttcctatcagaagggagaagggcaagagggacatgtcggagttctacagatatcacaacaactttggccacgacactaatgagtgccaaaatataaagagggagattgagtacctggtaaggcgtaataatccccacctgcatcattatgtgcaagacgactagacccaggcatagggaggccaaaaaggagattcgatgccaccgcccgtggcaggacatctagggtcataataggtagaccccaccattttggcaataccaataaaggtagagagcgatatgctcgaacactctgccacgagcctaaaggcaaagtcctaattatcaaagactagagctctaagcaacagaagctcatagagcccacgatctcctttgccgaggaagatgcaacactagttagtttcccgcattatgatcgtggaaagatgtatggtggatgacggagcatcctccaacattcttttcaaatcaacctatgaaaatatggggctccaactcaccgacctggccttgcaacaaagtaatgtatggcttgttttgccaaggcatcacacctgtcgtgtatatctgattacccctcagagtttgagaaaatcaagccacgagaaaattgattgtgtagttcgtcgtgatagacattccctctccttttaacaacatgtttgatttgttggccctcaacgacatgaaggccgtgatgtctatttaccacttatagcttaaatttcaaacaaggcatggaatggcatgcatgaggggacaccaatggtgtgctcgtcactgatgcaacttagccctatccaaggctaaaaaggagaaaatgcttgctgaaagtccaaaagacgagcctagtaaggggtaatgaagtctagcccaaggcg

SEQ ID NO: 325606 - DNA, 544 bp, Cannabis indica
aagaaaatatgaataatttcctacaacaccacattaaccaaggaacaacatacaattatcaatcttcatatataaaacaagatgtagcttgttcaggtagatgaacatcaagcgcacatgcttgttaaaccacatgttgacaagacacgcatttgatgctctaggaaaaccaatcatttttgcattcaggataatatcaaacttatgaaactatctagaaattgaaagaacttacacacttatggaatgcatatctgcagagagctagtaacatgcataatgaacaaaaataaaatcaacctacacatgaattatgttttacctcagatatgttgactttcttagatccaacatcagatccaaaatccacagtagggtaccaaagtcatgccaagtagatttctttctcagtcttctcatcaagcttcttttatctattggaatgtgactgtaacatatgcagccgaaaactttgagatgctttacagatagcttacatccattccaagcttcaattggcgtcttattctgcacgactttggtt

SEQ ID NO: 325607 - DNA, 1504 bp, Cannabis indica
aggcctatgatcgagttgggtggactttcttagaagccatgttaacccgtatgggttttggttctcattttgttgctcttatcatgtcttgtgtcacaacagtgtcttacaatgttacatatggggggagagttatgggccctatacatccaggtagaggcattcgacagggggatccactctcaccttatctttttctggtgtgtgctgagggattgtcttcactcttgaaacattatgagcaaaatcggtggttaaatggttgtcaagttgcaaggggggcgcctcgtgtttctcacatgctattcgctgatgatagctatgtgtattgcaaggccaaagatgatgaggccgaaagagtgttgcaacttttcaatgtgtatcaaagagcctcgggtcaacaagttaatcaagccaagtcctctatatttttcagtaaaaataccaatgaaggaactcgggatagattgtgtaatattctaggtatgaatgaagccatggagaacaatatgtacttgggcttaccttgtaccatgggtcgaaacaagaatgcaatacttggttttcttaaggacaaaatgcagaagaaaatattctcttgggagagtagctttttgtctaaagcgggaaaagaagtccttttgaaatcagttgcccaagctttgccttgttatgctatgaatgtcttcttactcactcaggagatttgctctaatcttgaaggaatgatgtctaaattctggtggaaatcttagtccaattcttctagtaagggagtgagttggatgagttggaagaaactttgtcgcaaaagaatgagggtggtattggctttcgggactttcgtaattataatctttccttccttggaaaacaaggatggagattattgaccaatgagaattcttggttagcatgatctacaaagcaagatactatcctactggtacttacctcacggctgagattggcccgaatcctagttttatatggagaagtatcttagaagccaaagaactagtttgtactggtgcaagaagatcaattggaggtgggacatctgttagcatactgagagatccatggctcccccacaaccaaaatccctacattctttcaagccaccctgcactggtaggaaagctagtttctaatttattctcggttgggcagaagagatgggatatagaggtgctgaatgacttatttgaggaaagggataaagagttaatcatgtcaatacaacttagcgattcagtggaagaggatctctggttttggaacaagtcttcatcgggcttttacacaattaagagttcttactcttacttgcagcagaaaactgccacggccgacttggtacagaacacagaaggctttaaaaagctatggcaactggatattcctcaaaaggttcaacacttcttatggcgtgcaacatcggggtgtcttccaactaaagtacagctgaacacaaagcatgtgaatattgaaatgatgtgtc

SEQ ID NO: 325608 - DNA, 2074 bp, Cannabis indica
tgaattatctattatttcaatcataacaataatagatcctctatagacggtttacattgagtatggacaaaattacttgttacccgtcaatgtattttatccttaaaacacttagctacttgaaaaataatatttcgaaaaactaatataattatcaaaataaggcatctatcatttatcgagttaagccaagctctaaggaaaccatcatctcacttataatagacatataagctatagatgtccatatttatgattaacaatcaattacactagcgtgttctcaagatgtaagtattgggaaaattctattggtaagttgtagcgaacaagtcaaagaaaatatgcaataaagttgagctagaacctaaccatctcaagaatgagatcaaatgatctatgatcaactaagtgacattgacttagaaaagatataacagtaattttatgatatcttttccactatcaatatcggttcagtcggatgtatagctgatacattcgatattagtttattttactaatgtcttggaaatggcattccacttatccaagtgtaagcaaattcaatagtgattatcacgtctgttcaaatctattacattgataaatcgcgagacttaataatttgaaacatataattcgaattacttttcactgtgatgacatcactataattgtgaataactatatgtttagaatttaatagaacttatatattaaacatactaatcatatataaaacatgtgaacaaagcatatgacaaggtcaaaatataatgtttgatctttattaaaagtaaataagattataataaaattgggttttatttagagcatagaattccaaaaagctccctcttacactaatataaaactaaaagtacatttcaatttaatcacatatacttgatgtcctaatcaaatgtggtatttggcataaactatgtaatagaatctgatagtttgtactcagtatcaacattctccaccatcacattttctttactcacaaaattcatgattttgtgaattccccatttatatgttttactcctcttagggtacaagattctttactatttggaagttgcacttttattatcacagagtcacactagcattattccatgtcaagaattatgccaaagtttgtatcgaactttccttgagtctgaataattccttaatttcccttagagcagccttattatatagccttactgatagaattagtgatttcaaattagtttttacactttcacaaaaattccttaattccttaatttcccttagagcaaccttattatataaccttactgatagaattagtgatttcaaattagtttttacactttcacaaaaattcactactccacccccaaagtaatcaccatctcttaagtagactttctagcattgacgcaagtctagaaacttgagtaggtatagcctaaggattttaaaataccacccttatcgactaacatatgattcatctttttatatttcgggatatgtttgactatcttctaatgttccttttctagttttgattgatacttactcacagctctcacttaacagtagatgtctgacctagtacatgcaagagcatacataagacctcctactattgatgcttagtaaatcctttttttggccatctttttttgaagtagttaacaactgctaagataaatgaactccatgtctggaagttatgtgactccattagagttagtcattgaaaagagctctagaaccttactaatgtaagttgcttgtgagatagcaagtaaaatgccatgtataccaccatccataggttttgatgttctcttcaaacccttaatactaggaataaaaagttttcttaagtccattgaatagattgagcatggttttacatcttaccattgtattctgaaaagtctaggttgctccatgtcaatggctaaaccatagttctctaggcttcagtctttgttccctaattggactatctattgcttgtttaaataaacaacgaatcgttatcactattgtcatccaagtcataataaggtgggtt

SEQ ID NO: 325609 - DNA, 1282 bp, Cannabis indica
tgaagaagcaagaaatacagatcaggaaactttgaatcctgatgccgaagcctcaacacatgaaaatcaaaatctcactgctgtccctacacatcacatgattaccagatccaaggctggtatttttaaacctaaaacatatctcagtcaagctaagtggatgccaatttctgaagagccaaggaatgtaactgaagctcttcaacacaagggttggaatggagctatgaatgatgaaatcacagctctcaaaagaaacaaaacttggatacttgttcccaggtcagaggcaaacaatttggttggttgtaagtgggttcacagaatcaaaagaaatgcagatggctcatttcaaagatacaaatcaagactagttgctaaggggttccatcaaagggctggtttggactatggagaaacatttagtcctgttgtaaaagcttcaacagttagaattgttctaagtattgcagcagcaaagagttgggacatcaggcaactagatataaacaatgcatttctgaatgggaatcttgaagaagatgtttatatgtgtcacctgagggctttgaagattccacaagacctgatcatgtttgcaaacttctgaaatctctgtatgggctcaaacaagctcctagagcttggtttgacaagctgaaaaacacattgctgacctggaatttcagaaactccaaggcagacacatccttgttcttttacatcagcaagaaagcatcattcttgtgttgatctatgttgatgacattattgtcactggtaacaataaccccaatttgaacaggttcattgagaaactcaacaaacagttcactctcaaagatcttggggcattgcatttcttcctagtcattgaagttgctagagatgatacaggtctctaccttactcagactaagtacattgaagatctcctagaaaagaataagatgcagcacttaaaatcttgtcctactcctatagcaactggcaaatccttatctctcacagatggcaaaccaatggagaacctaactaactacagacgtctcataggagcattacagtatttgaatcacacaaggcctgacattagctatgcagtgaattctctaagccaatttctcaaagctcccacaacttcacattggaatgctgccaagagaattctaagatatctcaaaggaactagcacacaaggtcttcatctcagtagctgtgacaaactgaatctagtgggcttttctgatgctgactgggcaagtaatgtagatgatagaag

SEQ ID NO: 325610 - DNA, 786 bp, Cannabis indica
ttacttatcgtttgctttatcgggcaatgatagtgacatacgcagctcatggttaacgagtggtaggattggaaacggtcattgccgttacgaataattactcttgaaactgcggatagatttcttacttatcgtttgctttatcgggaaacgatagtgacatacgcaactcgtggttaacgagtggtaagggtgcttaatgaattaccgagatggtgtgtttacaagtatgaaattgtatgagcatgttagtgtgtgatgtgttacgtttacgtttattctattatagtaagattcattggatttaataatgtttatggatttaattactattcttgttgagtctctgtgactcatgggtgctaaatggtgcaggtaaagggaaaggcaaaattgggcagccatgagtttgaggtctctgcagcagtgtacatatcagccgtggtgtcttggcttctgagaagccggatcaatcctttttctatgactaaaaatgtaacctactttttgtaataatgtaataacagttttataactagttgaaaaagaattttataaacaggggatccccgtgttatgacagtatttgtatgaagttttattataaattttaatcaatagttttatttagaccacactttccctaaactaatagattagttattaataaatttgtaagagtacacacataacgtccttgggagtcagggcgttacagtacaaacgacacaattttattggtccacgtaaaaagttatttaaaaaaaattaaaaaattcaaataaa

SEQ ID NO: 325611 - DNA, 2123 bp, Cannabis indica
attaagtctgatatttttactatttttaacaataacatcaacctgttacatattattgaattagtgatattattattattaaaattctaaaaatatgtattgtaagtcaaattatctttaatacacggcgtggacaataaaaaaagtgaattttggggtcccaactcctaacctgaataatttatttaaaatttaaattggggtcctaactcgaaacctcaagttggaatcttaatttgcggataaattaattaaattacataataaatgaaattacttgaagttgtcgttttatggacgcggcaatggttttagtaaccttcgcccgtcgttttggacccctcattttttaatgttatgacatttatttacttaacgaaggttcgagggagggagtggcacccaccctacatttcaattgggaaaaaaaaaattacttaaataaattataagagataataataataataataataaaaaataaaaaaaaatcaaagttttttttcataattgataggtggggcactatctccctgtcacctaccactctctctctttcaatttctagttgaaccccaaaataaatgtaaattaatagaaatttagtttatatatggccaaacttgtaaagagtttcaagtatcccatcaaatatctttggttcataatgtcaaattttttttaataaattattacaattattattttaataatacatacaatataatactgaatataacacaagaaagaggaaataaaattatgttgttgtatctagaagagacctttttctatttttgcatataaaaaatgtattattttatgtgtaaagaagatttcatatttcattggaagttactaaaactctttttaaatccaccaccattaataatatatatatatttataagatgaagcatttcttatattaaaaataattaaatccctactatattcataccaaatctcatacttaacgcatacaatcaataattaatgcactatttatttattttttttaccgaaagttaattaaataaattttattaatttatggggtgaaaaataacattttccaagtagatattttagtaaataaagttttatacaattactatctaaactctagctcaacatcataataatgctttaatgatattttggacacgtgttaatgttacagatcaaattagatcagaaaccaaccgcactccaataaagacccaatttataaaaaaagaaaaattctcacccaactaaaacttaagaaattcagaagaaaaaaaaaaaagagctaaaacttaagaagaagaaaaaaaacagtaattatcattatttatttattctttttagaaaaaggacaaaaatacagtattaccatcacaaaagctttaaattttttatgtaaagatatataagtaataaagggaaatttttactttttttatttttttttttgtggtgtaaattttggagtaaataccattttggatcttatgttttacaaaagttattaattggacattttatttttttaaatgacaaaatagatcctatattttttaaaatggtacaaataggactttgaatttgattttttatcaaaataaaatttaattataatccaatctaaaattgttataactaaactgtttatatttttgtatccgtttgtattagaaattgtttcaagttgattatattaaaaaacaagttgtcaaaaattaagttcaaggtcctatttttactattttagaaaatacaggatttattttgtcatttaacaaaatacaggatctaatcggtaacttttacaaaatacaaggtccaaaataatgatatttatcctaaattttgtttcaaaaatattgtcttttgtgtaaaatttttactattgttttatagaaagataatatttttataaaaaattctagcaaaattataaaattttacacaaatctattaattttataaaaactccaataataaataacaaatatttttcaaaacaaaagataaacataacattataacatacatttcattcattattaattatcatcatttgtatcttccattccctatcccaaaagcaactctcaatttccctttctcacctcacct

SEQ ID NO: 325612 - DNA, 1607 bp, Cannabis indica
ggtatataagttttattgtatagaatatcatctaattatctcagatcatgcatgttagtttttattttattatacataaaggtgatatatacttttgttaatataatatatataatttttttaaaaaaatatattatattatctggctaattaagatttttgcccccccgaatgtaccaaatcataccccttaaacttttctgatcgttaaaaatttcccctaaactattgagattgttggatttaaagatttttgtctaattttagtaaggaaagtctaacatgaatgaaagttcgggacataatttggcacatgtcaaagtgcgagggacgtgatttgatagatattaaagtctgaggtacataaacaatcactaaattagtaaaattgaatgaaattagataaaattccttaaattcgataatctcaatagttcaggtggaatttttaacgaccgaaaaaattcagggggcatgatttggtacatgtcaaagtttaggaggtaaaaatcctaattagtcattttattttattttttattgtaggtatatatatatcttattgtatgatagtttttgttgtctatagtatatcatttatttaaatctatatttaatttctattttattatatataatcgtatcatatatatattttaatagcggtatatataattttgttagtatgatatatataaatatatatatatatatatattttgagtattaatttagtattgttattatttttgtgatatataattttattactacggtatattaatttttagtaatacgatatattaaatactattatctatatattatttatataatagtaaattcccaaaaataaatactaaatatcatttaatttattcttttagttttaagattatgcttaaaatttacttacgaatgtataaaaggatgtattaatagcaagtgtggttcaaatttaaacagtttaactaaataatttcaagtggatctttatttagataaattttaatatttataatattttcaaaatagatatatgatctgctttagcgtggtgagttattaaatttatactattttgttactattaaaatgctatcgatcaataagaagttaggtaaagagttaaaccaaaggggtttttctttggtggttgactctattacaattatattctaatattttttcgattttgaaaattaaaagaacttattgcttttaaacttttcgtttgtaggttctttttcagttttctaaacagaagcaattgctttactagtaggtctgcgttggcctcaagacgtgaaacttctagtggagagggtctttcctgattcactttctttggtctcagctttggagcgtcacacaatgtttttttttcttttttttgaactaggtgttatcttttcgataaaattttattgtctaattttttggacatctctctcatgtcagtctcaactttaatgttgaggctcatagattggcttagcatgtccttaggatagacaataaattttcttggacggaagaaaccccctcctgctgtgtaactttgttacctttgttactttaacctttatcggttactccaacaaaaa

SEQ ID NO: 325613 - DNA, 705 bp, Cannabis indica
atattctcatctttatgtaaatagtatatatacggtaataaatttgtatatatactaatttaatttagtactagccttgttattaattaattaatcttgatataatacaattttattatattattaatgaattaatcttagtcatcattgttaaatattaattcttgtctttggctgaaacttcaacctccgggagatcctttggatacctagaacctgcaatggtgtggcacatgattcggtgactcaatgggcaaatcgaaacaacaagtttggatttatcgatttggctagttttgaccatttcttgaaattgttctctctctgagtctgttttcctttagttttttttagctagttgttagttttttctctgtgctttgtttagtttctattcttggtgtctgttctttggcctagggcctgctttgtttttcaggaacctttaataaaaaaagtttattattgtaggcggaatgtattgacttataaataatgggttaacttcaaaagttcttattcttgactagctatagttgacttatcatcatatatgtatgtaatacctttcaatatcatccatatacaataaaactattataattaaagggatcgatagaactattataatttaaggggtaaataccattttggaccctgtgttttgcaaaagttacaaattagaccctgtgttttgttaaatga

SEQ ID NO: 325614 - DNA, 1007 bp, Cannabis indica
tttattagtaataatgaaaatgtgtgttttgttgtgttttagaatttgaggcatctcatccctgaaaattgttcacctgcaatgaaagtcttaattgagcaatgctgtttacaaccaaaaaagaggcattggaaaatagtggaagtgctagagacttagtcttgcttaatctcgtaatattgcttctacttatacttctactagatattctactactactactgctacattacgtgtgcctaaacaaaaattcatttgaatatatcattttattgtcaaatattatgacttgggctttggtagtttgaccaagtcaattgtaattaaggaaaaaaagggcattcttttcactgtgttaattccctcctctccctccattggcactgatattgcttttcaattgtcttttattattagttaaaacattgatttttatatacacaattgtattgtacacatgtagatagaggtagtttagaacattatgatgatatgaagaaaaatattttgttatatggattaaaaattatcacatgcgggcctatatggtgtgttgttatttgttctcttcttttctttatattgttaattttaaaaattttactttatttataatatctattctatataaaatgtacctatataactgaagtaattttttttaaaaaatttctattcaaaaataacagtgaggtgttcactactattgagaaggtgacaatgaagctaacctttttgcttaaatgaagcaagcttcctctactttctttaagaaaacataacattaatatgcgtatacttaacagttgtcgactaatatcatcattcgtaagagattgtacaattactaattgttgacaccaatttatgcaatccaggatctaccagaggcaaaaaagtcaagtgagtctctaaaaacaaaaattttaaatgttttgaagatgatctttttgttttatggcaatttgatttctatacttaaaaaatcttaatattttattcttaaa

SEQ ID NO: 325615 - DNA, 851 bp, Cannabis indica
tatataaaattctataaatatattttatatcaaatctgaatttttttctttttttattttagtgggatgtcatattattattatatgtcctttagtagtatttatataagtaatcaatttaagcaaaaacaaagcaatagaatggaagaggaagatctccacatgaataatggtgttggccaaactagctatgcaaataactccactcttcaagtatgtcaacatatatttcctttcattatatataaatatatatatatatatacatatatatatatatttatatggataagtttataattgttatattaatatgtaaccgtgatgattacaattagctttaatcatttgattattattgaattattgtaatattttataaattaattaaaaataattaataaattactaataacttaatataacttgattttatatttatttattaataaattttatttctttatctaataataattaagattaattttattttaaaaattaaatttaattataattactttgcaattaattactaaataagattttcttttttgcaattaattttttagcactcaaattattgtaatatttgcagtaaaactccctaattgaaagtattacacataccttgatttagaaaaaatgagaataatcacaaacactaattatacttttatacaaatgtaccattttagctaagtataatcacacatatatatatatatataaatatgttcatatatttaattaaaaattgacaaaaaaatggacacttatccttgtatttcaacaaaatagaaaaatatttgttggggttgatttttttttaataaattatatatatatat

SEQ ID NO: 325616 - DNA, 1356 bp, Cannabis indica
cctggtaaaatatattccaataaaattttctcgtggggtctgaaagcagcttcctcgactggtgcacgagagtttggtccctgctggatgctgcttgtgtggctactatggtgatggtgtgtgcctccttgtggacaacaaggaatgatttggtatggcgtaagaagcaaacatcgattgaagaaattattgtgtcttctaatctctccctttatcattggttacgtgctcaaaataatcctctcattccatggttgaattttcttactcttgaagacggaactgagcactggactaaacctattaatgatttgattaaggtaaatgtggacgcaactatttttgataatcgtgattgtcatagctttgcttgtgtggctagaaataatacttctcttcttttaagtgctatctctagttgtcggcttggtgtttttcaactgggtcttgctgaagcaataggcgtgaatgaagctttaagttagatcaagaggaacaattgggaaaaggtagtagtagaaatggattgtcttgtgttggttcaagctattcataaccctcatcctttgaattcttatttcgatgcgattgtcgaagattgtcaaaggttgttatctactttaaggcattgttcaattatttttgttaaacgatctgcaaataaggcgactcattgtcttgctagagcttcctatttgactgttgatcgtattttttcttaactttctattagttctacttttagctatgtacttctaaaagattttatctaatgaagttttctctttttgattaaaaaaaaagacacttgcgactaagatgtgataaaccccattttgtgtttcttaaaccattaatttgctgctttagtgaaaattaatggtaaatcgagacatctcatgtccgaaatgaccctaatgcacgaggggaatatgtcatccttctatacataatgattttaggcagaatgaaacccttaggaagcggaacctcatctatgtgcttggtgcacaactccgcttcctcttattcagagttagagtctccttcgcactatctcttggccattatggctagatatttacttactcattggccttgccttgagcgggttgttatcttcctttccaaaattatttctaccaaattttatagagttcataattaaattttatttagtttttaatacagtttggagatggtatttttacgatataatttttagaaaatgaataaataaattggccgcacttgcaattgctacctaccagtaggggtattcataaaatcgttcaaaccgctcaaactgctcgcaccacaccacaccgcaaaaaaatgcggtttgaaattctttac

SEQ ID NO: 325617 - DNA, 1411 bp, Cannabis indica
aagacggtggtaaccaaacccgaaggagagaaagagatccaagttcaaatcttgataatgctctgctaatcaagggctagagatcttaaacggaaggagtcattatattccgctgcaatcaatgtatggtattcttaaatccttaagtgtttatttcattgttttagagaattcatatttaggatgttaatcaacatacttgttagtaaatctagatcctggtaaaatattcccaacagttttttgattgaaattctagtttaacctattgattgaagttccataagtggtagtggtagttttattatttggaggctcagttatttgttagttagtttgtttgtttttcattttagtcttactcgagggtgagtaaggaactagtttgggaaaatttgttaagctaattttagcctaagtttcgggttgatatttagagttgtttttagtcattgctaatgcttttaggatggaattatgcttgttttctgtgttttcatgttctcatggcttttacaagtcaatttcatcaagatttaaaaaaaatggctgaggcgagacagatgagaattacaaacttaatttgtattgcattctcatcgtggcaatcatgacttatggtcacggcgagatcaatacataatggaggtgtttcgactttgctcaatggtcgcagcgaagaagagtagggtcgcggctaggactttccgtcgtggcaaccacaacttatggccgcgcgagacaaatggcagaaagcatgattttaactttgtgaagtcgccgcggcaaggccattggtggtcgcggcgacgaagtccgtatgactcgaggggcaattttgtatttttgatatttttagtttaaattggttctattaaaggagactttgaatttggaatgacggacactcaaaaatacaactctaaaagcagagaagatgacagctagaacgagtgtggcagcccagatccattttaccataagtttctttcttcttctttttatttttttatgttaatttctgtttttagtttaattgtggatttgaacatggaaaatatgaactaattttccaacttagggatatgatgaatgttagttgatattttcctaatttagttaatgtgattgttattttttattttggattattgtgatttgttcttatttgttttaatatatattttagattaacaatcttgaatatgatttatgatcctgatataaaatcagagaagtgaatattaggaatattttaatagaacaaacatagatttaatgtaaaacgagagtatttacataacctgtgtgacaattagattatgtacttaatgcagattatatgttaatttattttagaaatgcaaatagataatatatgattaaagaccttaatgatctgagaagagtt

SEQ ID NO: 325618 - DNA, 610 bp, Cannabis indica
ccttctctaatttccttacagcttttttttaaatattttattggtttccgaaaacctcggtcatcacctatatatgaacaaactttgcacagtttaaagattggactgaaggatgtgaaaaagataaaaggtggtactaaacctactggtaaaatattataaaaataatttaaaaaattataacaataaataaattataaaaaatattattttatttatttttttcttttcttttccctggaacctaattctctccaccctaatctatcttgcttctccttcttcttctccattatcagcgccatcacaatcactaccactaaatccactgctagaaccaccaccgcagccaccaccacactagcactaatcttaaatcacaaaaaaaattatcaccacaaatcacaaaagccaccaccaacttaaactaaatccaaaattataaacaaaatcgggacccaaagatagctcatatgggatctaaaacttttcaacgagggatcaacaaaaccgagcttcaattggctcaatgggacctagagatggctcaatcagagtcatggagcttcagatctggtgaggtccaccatgaagagagagagagagagag

SEQ ID NO: 325619 - DNA, 810 bp, Cannabis indica
tatagttataaatattaattttttttaacatcacctgttaacttcttaaatggattataaatactttggcattaataccacaaactttatcgaaaaaataccatagatatattattaacaaaagaaatggactatccagttattgtgaacccaggcagaataaaaagttcaaggagtttttacaaaaatactagattttgaataaaagtttacaattttactgtcacgcggaattttttacaaaaatactgtccgtaaaataacaaaacagaataattaaaataacagtaggaataaccaaaaaacaatcgtaggaacaatcgtaaaaaattaacacagtacacagtatttttgaaaagaattccgtcccacagtaaaaagtaaaaaattaaaaaatttagtatatagtagtaaaaacccaaaaattcaatatacaagcattacactattctctcttttgaagcaaaagatgattataacccaaccattatgattactcttacttttcttgtctacaatttttatgccactgttttctatagttttcaacactttaatttttttttttcttttcttctattttcaaattttcacaaaatggttgtttgctttatgattcaaatattctttttttaataaataatttacgaataatttacaattacattattatgaaatcttcaagcatcggaaaattaaattaatatcactaacatattgcattcagcatttaattttagattataatactattatttttgtgtattgaatatataactccacaaaatgtttacattaattattcttgtc

SEQ ID NO: 325620 - DNA, 515 bp, Cannabis indica
ttactacataacttagctttcatttcactgataatcaatatgagaataggtgaaatatatttactttaatttatacacacctctttagttgtattttcattgcagggactcttaggatcaaactcacaatatgtgtttcatttcccttgggagtagcttctaccaattagaactgaaattaattagtttaatgaaatatggggtcgaagatgagcttgctagaaattttattaccaattgattttgtttgaatataatttatttttgtgttggttagattgtggatttatttttttatttttatttttggcattattatccctcttatagatttcattattctcaaatattatttttgttgttgtgctgctattttatttgtctgatattctgcttgtttttatttactttttcatcaagttttggtgtgagctcttggctcttaatctttttttcaagcgtccttttactgacatgtctagttttggtgcacttagtttttttttttttttctt

SEQ ID NO: 325621 - DNA, 1168 bp, Cannabis indica
gagtaatgtttctcgaaatttttagaaatgaaataaataataaaaactgaagaaacaataatcgaaagaaaaaatataataagagacaaagagtttttacgtggttgggggcgttaactagccttagtccacgagtcacttttattcaataatgtatttacttgtaaatattctcaaaggtacacaaggatgtaacttggtatgtttgtctaagcaaaaatgcatgagagaattaaactgataattcatgagattagtttggtatttatagtagttagtgaattataataggatttccccttttccctttactggggagcttacaactgaacagtgtctttgggcctactcatgaagtgtagcccatgaagaacatgattgctgactaggtcaatcgggcttcagttaatcaggtcaaaaccttatccaattataatgggagaataatctgaaataactactctgcgtttgttatgggaagtttcctctttaatcgcgatatgatattttggccaaatctgataactgagttttcctttgtgataggagaaaacaaataaggaaaccgaaagagtcttctgagaaactcctttccctccggcctcatgataccagagctgtcttctgtgtttgatctgccgagggcggaaggcactgtgaggacgagactaagataacaccttgagggtcctatctaggtgggcttggccaaccgtatccatgatgagggtcccattaatgagtcttaaatgtcaacctggaggccacgtgtccaatcccagaaatgcagataacatttactcgcaagctttcaggatgctgcacatggtggaagcttgctctgatctgtttgttctagacatgtggagattttagagagaaaataatgaattttcacgagttaatcgaccataaaagctgacttttgcctatgataatagcgtgtccacgtcgcagtcaagcgtgtgtcaagatgtggttatcgaggagtcgacttccaagaacgactatgtaacgccctaatgctaaggtgcgctacagtactttttcattgacagtgctatctttgctaatcaaagaattttctcagaaaacgtgtcaaattaaaacttttgtattaaatattaaactttaggatttataaaactatttacaagtaccgggatcc

SEQ ID NO: 325622 - DNA, 1049 bp, Cannabis indica
taaataatgaattgtttagagtatcttttcctcactctaataagaggcaaaggtttcgaatgatgatgaacgtatctatggcatttacgtttaggccatattggcctagatagaattaattggttagcaaaggatggtcctttgagagaactaaaagttagaactcttctggtatgtgaatcttgtcttgaaggaaagatgcctaaagacctttctctgcaagatttcttcggactctaagataggttctctaacctcattatattctccaaacggaagagctcgaggagactcttccacttactctttcactgcttcttctccttcaccatcaggaaatgcggctacatgaaactcactctagtcctcgacttcttagacttctttgtccctaacatcaattttaacatcctccttaggaggtccagcttgttatacaccaaccatcgcaaaaaaccaagaaaaatgtgggtccttatccaaggcctttctctaagtttatttggtttttcccataaccttaaacgtagaagagggtttggtttagtggtatgcttcgcgaagcagacagtgatttttgctagagtagagtttttctttgaaggctctgaacgaccttttagcaataggtctgggacatctgcgcagatcttgtacgtccacgcagctggctgataataccttcagcctatgttcattccccaaacttaaccagtcgtatccttctctactgattaatttggccggggtaatgatggtgttgtatcgcgagctccggggactccaactgagttacttgtgacctcccacctcattgaagctcgaggtcgatgaattttaactcgatgaagatgatgctgcacgaagtcttggttggttctagtgaagaagatgaagtaaatcgttatctatccgatagttacctctccagtaatcgccagggttcatctacaaaagaggaaagacagcagggaggtaagaactgaatgtatgattttttgcaagagcaaaagacgtttgatatgtcgatctaatagattcaaaaagat

SEQ ID NO: 325623 - DNA, 926 bp, Cannabis indica
catcacggattacaatccgtgaaagtacaataacaagacaaaattatatccctataaatatattatattatatgtagctctataagaattggatttattgctttgtcacttggaaataggtcatagtaattaatttcatgcgaattaagttgatgagaagaacaaattgtaatagttaggttgattagataggtaattagttactatacatattgagaattaaaggtgagcatatatgactttgcttaaatattttatcttttcttataagacaaccccttcttgtagttaataatttttttgaaaggtaatcaataaaagtttaatagaatgtcatctgtatgtataaatatataggaatgtttatagttaaaaggtattatttttgtttacagttgagaaattttgatttgataatatatataatgaaataaatattattttattaaaaaatatgaataatttatagtgttcaaaaagttcaaatagattaatttatttttttatatatacagataataaaaattattctaaatgtttcaaaatcttggaaaatgcttgctataaatacaccatacacggttaaatatatatatacggccggccctgaatatatatatatatatataggcgggctaggtctacgcttagactcacattttagggagaggcccaaatagaaaactattttttttaaaattataaatattttttttattttttttaaaattataaatattttttttaataatttttaaaaatattatttatctttatagtaagagttaaatttttttttttcgtttatgacctatttcaactcaaagccaggccttgtatatattattattattagtgaaatttacatgatatattaatttttgtcattttttttacgaaaatactgtcagccggtattttttact

SEQ ID NO: 325624 - DNA, 575 bp, Cannabis indica
aatctattgaaaaataaatattattaatttaaaatatgatatttaagttcaaatatatttaaaaataatattttattttaaatttggggttcgaaaaattggagaaaatagatttttgggaaaatcccatgaaaatcgagttgttggggtgagctggcaacaaggctgcacgagcagccccaggaggctgcacgagaggccttacgcgcgcggaggagggactttgcagggtcccatgtgcggctcatctcagcgcctgcagcattttcattggcggacagcagggtcctacgtgagacatatgggttcagacaatgcttgtccgaggctcacgcgcgcgcacggcttccttgttcgaagcctgatgcgtgcgattttccaaaattcataactttctcaatttttattagaatcgagttccgtaaaaacaaaaattgcttaatttttcaaaaggaatccaaataaaatattttcaaaaatgtataaaaaaatatttttcatggaaaaaggttctgtacaacacatacatttatcaaataaaacataaaccacatgaagccatccaaatcaacaca

SEQ ID NO: 325625 - DNA, 603 bp, Cannabis indica
gagtgtataggatcatgtctatattttctaaaaaaaattatgtaagccattaatgaagcataagaatttttctgtaaattttttttttttctaaaaattaattttaggtaaaaaaatttacggtgtaatgctcaaagcatatgagcttggttttgtaccaaaacccggccatgcacacgaccaacaccattcatggaactgagcatttattgctttggccatgtatgaagaacacgaccaccatccttgggtttcgtgccctcaaataacgtacagtacgagagctaatgagccatgcacaagttgcatggatttaactcacgcaaaaggacgatcgtgccagccatgagaagctaagagagcttcgtctctcggcagaggtcacacggaccgaaaggtccttctccggctcccgcactcacaactcctcacagagccaataatgggatccaaacccccttcgcttagtgtgagggagggacatacatttggagtgtatcaagatgatggaacttaggaggcgtttggttgggaagaatgaaaatataggaataggaatgagaatgggaataagaataggaatggaatggaataaaattaaaa

SEQ ID NO: 325626 - DNA, 1070 bp, Cannabis indica
tatatatattccactatcaaacgtattttgaatggaatataaaagattgaaaaaaataaatagtaaactaacataaattgagagagattctcggtaaaaggaagtgggccattaattacaaaaaaaaaattgaaaaggatttaaatttaaaaaatgataaatattttagcttttatttagttgggccctatgtaaggtttggccctatgcaattgcacagcttgcacagggttaaggccggccctgagagggacaatatagttagacattgagaatgtcggaataatctgaggatttagaaatgaccattttacccctagaccattttactagttaagcttgtggaaaggatatttttgtcattttgccttgggtgaggtgcttggtttttaatgtggcagttggccactatttgattaaatattggaaataaaaggaattaaggaaaaatcaagataatcatctctctttctctctctttttcgaaccatcaagggaaccatcgacaattggatttttcttagctgtaatttagagtagtgtagccaagttttcaaggtattgtcctagcctctccctttgtgtttttcttaagctgaaagttaaggtttttgtatgaattttagaattaaggttccgtgcttgtttcagttgtttgaatttgtgttctgaagtttaaataatgttatttgagcaggttagtttgtagcttggttttattgtaagacaaagtttgagttttagaactcaaactttggtctttaatggtgatttgagtttcaggggttgtttctggtttttgttgcttgaattctcttcattatggttctttaaggtattctggaggttttgatgtgatttgggtttgaatgaggttgttgtgtggttttgtaggttttctgcactgaaccgaaattttgattcagggggaacctgtaggaatcgggattctggttggtccctaggaaacccctcagaactgaaattctggttggggaccgatctaccggttggggcattttaggaaaccctagtttctaccgttcttgtgatatttagggtattgccat

SEQ ID NO: 325627 - DNA, 1709 bp, Cannabis indica
attacaatatccagttcactcttaggaatttaatataatctttacaacaattagtaatgaattaccaacaacaatcaagaatcttgatcgcaagtacacaatcccttgtgcagcaactgagttcgtcttcgtcacttctttaatctgaaatcccttcaaatctgatgacgaggatgacactgaactcccttcagtctgaactttgtatcttcaagctctgatctttctgccatagatctccatcttcaagctatacaatcagacctgtaagaacaacaacaagaaaagcaagatactacactaactctcacgaagaaactcaactaactgaaaatattgatttttatggatgattagttcatagaacaacagagactatttatatgcagtagatcaacagacctaaccacaactaactccaaccgttaagtcataacagagacaaccagattttaacagaaggcaggtgtgcagatgtaatagactaaaaccgccagatacgacaagacattctattaaaataatctgtctaaattaacgacacttacagttgcaaatgaagatatcagggtaatgatattagatatgaaaacaaggaggtataggatggctttgggtagaaatagggctattggttttaagttagagaattgaaggtttgatgagacaatttctatgtaattatactattgttatttaaattgatgcattgaggtgatctggtgctttgtaaattttgtgtatatgttatttatctctactggagctgttggacaggtttggagggagtttggttcgaagttaggggatgggattctggtctgccataaccgatcgatcgattggttctggtgcaacagtaccagtcgaatagttgccttgccgacggaatttcccaaggttttacttgaattttgttttggctcggggggtgcctagtatctagttgaacttatttaggtgtagtattgcctattttgggttgttggagattaggctttgtccagttttggattagggtttattcccagagttttgatttaaggcatttattgaattttggttgtcgtgacataggactgggatcgcccagctttgcttccactcaggtcgacccgcatacctgatttctagatagaggtatgaaaagtgatacgcatcactcatggttaagtgattaacgattgtgtttgttatagccttgattatgatcgagacctggttatgtgtttgttatgcctcgattatgaccaagggttggaaacggtcattaccgttacgagtaattactcttgaaatcacggatatgtttcttacttatcatttgttgtatcgggcaacgatagtgacatatgaagctcgtggttaacaagtggtaagggtgctttgtgaagtaccgagattgtgtcattacaatgttatgaaaatgattgttgacctcgcttttagccaatgactatgagtctaatttgtaagcgacaagtagtatactacgagtgtaatataataaaacaaataaagacacaagaattttatagaggttcagccccgaacagttcgataatagcctaatcctggtagtttgtattgacttaagaataatgagaatggttccttttcttaaagctcttacaataatatctctaaatatagattcttagaccagttttttgaccctttgcccattgagtatgaatcactatttatag

SEQ ID NO: 325628 - DNA, 946 bp, Cannabis indica
cagattatgaacatgtcccaatcgccctcgtaagtttaatgggtaagcgaccttcccaatcctctcgataacttcgaaaggtccaacatacctcagggctagcttacccttcactctgaatctcgttacgccacgcataggaataacttttaagaagacatatataatcaccaagatcaaactcaacttcccgtcgattgagatcgacatagcttttatgacgactctgaataaccttaagtctttcttggatttccttaatcttttcagtagtactagtgataatttgaggtccaatagtgacatgctcatctggttctacccaacacaatgacgatctgcatggtctatataaggcctcataaggagccatgtctatattggcttggtagctattgttgtatgtgaattccaccagtgaaaagtgttctccccagctacctccaaaatccaaacaacaagaacaaagcatgtcttccaaagtttgtatggttctctcaaattgtctatctgtctgtaactgatgggcaatatttaagtgaagtttaatttaatttctaagggttgttgcaggaccttccatttcatcatgtctagtaatgcttaataattaaagaagaaagaaatcaattcgtgggtggatcgatgaaccataaataaataaataaattatcacgtttttgtttataaattaatattacatatatatagtgccagactatacataataactcccagcaaacagctatagagacgagttttcatttttctaataatattatttcaagtcattataactatatataaaactagggaatagtaccgcgcttcgcgcggttttaataacttttcaaaattatatgtataacaaatttaatattttgttttattatgaataaattttaaatcgaatattattttcttattaaattaataaataatataa

SEQ ID NO: 325629 - DNA, 1246 bp, Cannabis indica
aaggagggccagtcaatcaagtctcttcagcaacagcaacagatccttccatgcaagcatagttgtaccaaataagggacataattaaggaccgttttcctctgaaaatacgtctgacttttctttctaatcaagagatgctttgcagttttgtggttcagacatggagtctgagtttcatatatatttttttttgtggttgttcctttgtctgtagcttatggttcctcaacctttggggtttaaagacaaaaaaatctttctatttcgacttttgaagacttttttgcttggctttacagtgtgaaagataataagcttatggtgtttgtagcatgtttattcgaaacaatctggttctgaaggattgacattctctttcgtggcataagtttgagtgtgatgggaaatctcaactgtattttgaagagggtgaatgaatttagtgctagtttgaatactgaagtcccctcagtgattcaaggtgatgttgctcttcatcagctttcagatactgaagtttgggatttgtggttgagagttgatgcctctattttggatgaagatgttaggattggtctggttcaatatggttttgttgatgatgtcgctgttatgaaccaatctcagtatgttgtgggtagtgttttgaaagcagaactggtggccatccacagggctttggcactggcttttgaggaaaattgcagctctattttgatcaagtcagattctgcagttgcagtcaaggctcttcctcaggagagttaccttttgcttgggggtcttatcctatttttaaagattgcttgtctttgtcaattaatttatagttgtgtttctttcaagtttctacctcatgcagagaacttagttgctgataagctagcttatcttgccagagtttatcgtgtttgcaggcggtctgttgttagggaagcaatcccctttgtgattgctatttgaactctgtttcggttgtgttttcgttttgtttaatataagtcttactgataaacaaaacactcttacctcacgccttctccccaacaatgtaattgtattcgtaaaatagtcaatctaatttaatttgtaaagtgcggatatctgcacggattggattggtttaaaaaattcaaaattcgcactagtgcgaatggaatgttatttgatatgtaaaagtaactaatctaatttaatccacacatatttaaatatttttttaaaaaattatatataattaaaa

SEQ ID NO: 325630 - DNA, 1347 bp, Cannabis indica
tgtaggtaaaggaaaggcgaaagctgaacaggagtgaaccagagttgggatgaagttgtacatgtcgaagcagcgtgacctggagtgttcggtctcgagacatcttgggattttattttgtagtcgctgtgcgacctggttattgtattttcacgtatttggtattaaagtttaaaatcgggatcccggtgtctgtaaattactatgtaaattataaagtttaataattaatataaaagcaaagacacatttttcaagaaaattcgttgattagcaaagacagcactgtcattgaaaaagcattgtagcgtaccttcgcattagggcgttacagaacctaaccatgtcaggattaagatccatagacctaacatcaaccattgatattgacttataaagatataacggtaagtttatgatatcttatctaagatcaatatcggttccttccaatgtatactccatgaatttatacattaaacataatcatgaaataaatcatgtgaaccatgcaacataaaatgcgaaatctaatctttattaattagtagatctgattatattgaaatgagttttatttagagcacaaaacccaacacccagctccacgctctgaagccatcatcatacttggttgcagactcgctcaccaaggagagcatgttccaacacagccctagaacattagtcgcgctcgaaacttgtcatatttttggagcacttctaagttataaatttgttctcaatttgatccatctcctagatggacgaactgtagactattggagcaaccttcttcttactattcctcccctgaggagcttccaaagctgttaactctccccctggaagagctcccagagtttccacctctccttcgagaaaaacttccaaatctttaatttcttcttctggacccatttcatgcagtccagcctcagtttcttctccaacaagatctatagctctgaggtcaaaatttctattagacatgttgtttgtagctgaaagaaaggtgaacttcaagcagttaatatcctagacttgagatgaatagcatgggtactgggaaggcctcccctatgaactacttgaagagtccccaccggactggtcgtctggaggcacaacctagtccttacgaaaactacatctccttataatcagtttgaaacacggagaataggcaatgtaaaccctaatatgttgcctagaaccctaatgactctagaccagaggaaatccatacactactacaaaagtcagaattcgtgatggtcctaaaaacgcttttttttgggaccatcgttgaaaaaattaagtaactgtttaaaactgtcgggaaaa

SEQ ID NO: 325631 - DNA, 3967 bp, Cannabis indica
gtagaagcttcaatgatgactcattttcacgcagtctctctacctcttctttcagtgcttgcgctcgttcttgtccagtagtcttctaattttttggacgggatgaaagtttgggtcaatgtttagggcgtgagacattatagttggatcaataccgaccatatcctcatgtgaccaggcgaaaaatatctaggtttgctctcagaaattttattaaagctaatagaaattttattaaagctaattttatttcgagcaacaaacccttaccaattttgagtttcctggtcgggatatttgggtcaatttccacttcttccagttcttctaccgaccctacatttgtgtttgattccctaagttggggatccatgttctcgtcctcgccttgggcgacttcctattggctaatgctttttcccttgcgcgaactctagttggaggtgttttccttcttaaccttagttaaggcaagcttatagcattcccgcgcaattctttggtttcccctgggaccccaccccattctttgtcgggaacttgacgcacatgtagaaaattgatgtaacaacttttaagtcatatagggccggtcggcctaacatgacattaaaagctgatggaacatcaattattaagaattgtgccatcactattatgctcctcggagcttgtccaacagtaaggggtaggcagatttgtcctagaggtgcaacgctctggctggagaaaccatatacgagctgggtgtaggggatcaaatctttaagctggagtcccatcttctcataagttattttaaacatgatgtttgaggaaagctccattgtctatcatagcccgtgccattatcttatttgtacgggatatggaccttaaatgcatctacttcagtgaaggttattgttggttcccctacccgtgatatttttagttttctctcctccaaggccaagactgtttcattttgctcatactgtaaggctcgagcatacttttttgagctttgcccgagtctccaacaggatgtggacccccaataatgacttgtaaatgcccgtccactggtggaggcatcaacttgttctggttattgtctccttgggggccctttggttctggtcggcctttacatacttctgtaagtgggggttattcattctcatcaaaaattcaatttctcgcttaagattattacattcgttcgtgtcgtggtcgtagtccgcatgaaaatgacaaaacttggatgtatgtctcttacttacatccttcttcatgggagatggtttcttatacgtgaccatagactgagttgtcgcgtagattgtctctaggtcgtctgttaggactgagaaggcagtaaattttgaggcattttccctaggtgctattcagcattgccagtgaactttcctttctttctattactttgcctgttaccgttattagacctcttcccatttgcatttgagctgccagggtactgtggattctgaacggatgttcttgccgaggaagcacattgctggctctttttttgtccgacaatatccacgcgcccaacagcttcttcgagcttaatgaatccatctgctagaaccaaaaattctgccattggcccctcggtcaaccttttgatatccttctacagttctctaagtggctcaatgccccccagtattgcggccaaccttccttcttcggtcaaccccttaacttttgtagcttctgtcataaatctgttatacaggttctaaggggttctcctgatatccgctttacttcgaccaggtcttctagatgcgagggaagttgacgtgaggaggaaaactgtgcgtggaattctgaggagaaggcattccatgagttaaacctccccggagcagcttgaagtaccactgctaggcggcctctgcgagtgtggcatgaaatattctacatcggacatcacctcttaccccttgtagatccatcttcatctcaaaatacttcagatgtgacaaaggatcttcttctttccatgtatacatttttcaagttgacattttgaactttgggggtaattcaaggacttcaatctccggggagaagcgtgatccacatgcttggtcaagtttgagattggtgagttttgggctggttaggccttacaccatgtttttaagttgatctagttgtgcttgcacaaatggatgaacttgttcagcttgttgaccgacctatgtcacattgggatctctttaaacttgatcctgtatgcaaatgtgtggctgcacagctggtgggacgtattgttcgtccatgccccttattcaatttaggtcagtcatgaggtcatgtgcggcgcccaacctatcgaatactgaagtaccagatggccttggcctctgacttgtttggccgacaggttggccagaaattttagttggggtgaagttggtgtgtgtaactccacccaagggacggttcggcaggatctgaccgtctatcgtttggcccacaggttggacatgtggccgtggattggaggctgaccattgtgagtttgtgtggtatgcccagctgcatacccttccgacctgcccaaagggatactggatgtagtagccagttgttgattggtgactgggtaggcctttcttatcagtatggtggcctatcttgtgcgatcatcaatggctgcttgttgagccctcagagtttccatctccctgtccctccattctataaattgacatttttgctcgtcaaatacaaggtttatagctgcacggagatccacctgatcatggtgcaaaatattattatgaccttgcatgagtccaagggctgctcggaggtttttgatttcagtatcatcttcaagtggccttttaacattagtggtagacgggacctcagtgttaggagtggattgatcagctgctgaactggtgttcccagtctcttgcacgcctggtgtaatcccaaccagaggggaagtcactccatggcccacagtaggtggttgcgtattgacctgcttggggtttgtccctagtggtcctctcgtatttctaggagtctatacgttgggatctatcaccatcggatttccctgatcagcaaggcctctacgagtttgtacaaccatcctgtatgcctgtcaaaacttaagacaaaaaacgtgggtttttgctctcaatgaaagcatcgaaatattggcctcgcttttagccaacgacaatgagtcaattaataagtgattagtaatataattagaagagaacaaaaatgataaattaaaaagaacactgaattttgaagaggttcggctccgtgagtgtggtaatagcctactctccttgtattctattaacttaagagaaagaataaagtgtttttcctcttttaaagcttttacaattgatctctgagtaattctcttagatcactattaactctctagaatctctatctgaagcaattctttcgatccttttcatagtgaggctaggtcattatttatagcggcttaatgcatgagggatggttttccttttgcttacaacgcataaaataggaaattacaatgattacataattacaatacacaaaatagaaaactagaacaggttgccatatttctctgattcaatcccacgattgtagggattatcttcgtgtctgggcattacaagatcattctgaagtaattaacttcttgtaagtagctcggtatcgtagacttttacctggtcggatgccctgtcttccaccctgctcgggtaatcgacaattataaatgctgatgtataatgtgcaggctgtttggaacatttatcttccccagggtcagaaatgtgagacacgtgtcgctcggtcctcttgccacatcaacgtgcttggataacacaaacacaattttttttactagtaaatgaactaaatgtggattgagaatttttttggtctcaatatgagattt

SEQ ID NO: 325632 - DNA, 1059 bp, Cannabis indica
aattttgaaatgattacttctctccccaggtttcttataaatatgattagggacttttaacaacctttttagccattttaactccagaaaagccagagcaaaaaaatttcaagcaaatttttctgtcaaatttttcgaaggattctcaagaaaactcttggcgatatcaaccaagcagaacaagaagcttcagaccagtgagtaagttcttcatttctgtcctttacatatttgcatgactaattttttgggtttcttgctgttcttgaactgttttaggataactatagaaatcctaggtttaaagtttataaatattgattgtacttaaccacgacgtctgatttcaactacacttcaattttagccttacaatatctattttcactcatccattagcggttaggcctggagcatacgatctttgggacatcagtgcttttttgtatagtcgttaggcgacaaacttttgtatatgcacattaaaacatttgttaatacttttgtaaacgggatcccaacataatatgcatattttatttttatgtttataagtagttaagtaattaaaatttttattaatcatgattttcaataaagttgttgattagcaaggagctacttagttaagttaaaaatcacgttaacacgcctaaactagtagggtattacaatttggtatcagagccaccaagttgtattctaaagattgtcacgacatgtacaatcatcattagcgagtatctcatctcacggttcagtaagcctttattgctttagtagtttattttaatagtatgttttaagaaaagcctgataggaagcatgttcgtagcctgatagctgaataggcgcatgttttaaatttccaaagtaagcgacaattagtaagtttcttgattgtgatctgaccagactagctcttggttatgtaggctgctctagtagtatggatgctaggaaaaataccaggagtcaaggtaactcggtcggatctagtggcagtcaaggagtttagattcccccaaatgttcgtggccgaggcagaggccctagagg

SEQ ID NO: 325633 - DNA, 2088 bp, Cannabis indica
gtcttcagtatatcacctatgtagcctgagatagttcgcaccttcgattctattaactcgttgtcaaaggtgacgctaggatcctggggattctttgatgtacgtggcttgggagacattatttcaaagtcctagtcacctggttcaaaagcaatcgtgactttgggtaaaaataaaggtttagcgaaaggaataaaggacacactaggaggttctggcgaagctatatctcgcaagaaacaacatttgccttcggtgatttcttgcaagaagcgcctgtggcaactagcattatcttcctaataggctcttactaaatgttccctaaccctagcatcatttaactctaatttggatgcgggttttgaagggttgagtttataagggacgactgattttgtaggaaactcaaattctaaatcttctggacaataaatttctgaacctaggttgggacattgctgcaagaagaaagcaatcccaatccctggaaagaattttatcaaacctgaagatggtaagttgaaggttctgaaaaaacctacgtattgcttgaaccctaatgttaacccaaatatagttcaacctaaaaattactaaaaccaaatgagatggcaacgatacaaacaaatgatgcagtaattaaactcagaaatgcaatataacaagcatataagatatcaagaagaaaagctacttactgttcaaagtcaggatttgaggcaatagacagctcttcctacgaatttttgaatgcaatgaggatctcttcgagaagatgaagtcggaggtaactcgcagagaaaatatcaaggacagggatgtcatgcaaaaactcaatgctatttcctaacaaagaagcttaagagtttctcgaaatttctaaaatggaggaaatagtgcaaaggtggttcctttttcttactgtatactcttgacaccagtttcgtcggatcaaagaaatttttgatcctatggacagaattcgaagtagaagtggaaaagatagttatttaatgctgatgtacctcgaaaccgcaaaactgccaaaatcagaggacttgcattttttcaaaagggattatgacaaaaataccctttgtaatcattaaaaagtacttttttattaattttgtttaaggggcaattattatacccgaaatttggctagcacatcagagaaagatacgtgtcaagctaggaaaaatataaatccagacatgtaattataattacatttgaagaggaataactcgttaaaaacataactaacagagtgtgtttataactcgagtgacagaatagtcttctggaagataaagatatacaaattgtcgccttgtgcattaacgagaaaccatgtaacttcaggtgtacaagacgaggcactaaccttgttacgtggagaggatataacagccgtgaaaacacttagcgtataatttacagtatacaagctaagtatgtcagacgggtgaaccgaagcaactgacagcgaggtggccaccttgccataggaagatatgctcatgctaaagatcacctcctcaccaaaagctgcgattgtcagatcaggtattaagcttccatagtaaaagcgataagatttacattatcaaccttggaaagaaatatgataaagctctagctcgctatttgctttattcccagcgagaccttccaaaatgatacggtttacagcgtatttaatacacgtttattttgacccagtaaaagcggactattcacagctgtgtgatattcaaataataatcgcatttatttaacgtgatatgtaatcagaccctatgattttaggggataatcattatataaatatcagccaaccctctaattagttgcctactatgtgactataaatagaggcaagttggactaaaaaaggggggataaaaaatgataagagaaaaagtccctgaaaaactatcagaaatctaataagattgactcgtggactatgtagaattttaactgccaaaaccacgtaaaaaatcctatgtgttcatattttccttttctttaccgtctttatttttttgtgcaagtttaccattcagactcaaattt

SEQ ID NO: 325634 - DNA, 1135 bp, Cannabis indica
aataaaaaaaaaaattatatctctagatatataaagtaacacttatttttttaatctgaattatgaagtaacgaaaagcttttttttttttaagagattacaagagattgggcaagttcttctaaaaattattgaagacgtgactctcaaggaagtgttgttgaagcgcaattttttttggtattagtattatcgaatctgattatctagtattagtacaagctgtcagaaatttcaatattttgacatctacttttagtagtgtcgttaatatttttttatattttgtcaaaagctctgctaattaagctactcattttataattagagtatcttgtttatatatatgctgattgtgttttttcgaagtataatcttctttttgatattgttaatattgttgaggtcgaattgatctaattaaataaatattaaacgattgcacaaagtcaaaaattagccctctagtgtagaaaaaaagcaccaaacctagccaaaaaagtgaagaaaggtggctttgtttcttatgtgagagatataaacattttttctttccatgcatggtgtctaattctatcttctattctatatatacatccttctaagttctactaaccttccaaaaataatgtgagaaaagtccactaagtttggccttatccaatatccatggtatttaatgggaatattgatttgtataactagacgttggaattttctcacatcactctcaaactaattaagttcaagtctaccttatttagttttggtcagcaaataacttttctctcttataaaattctttatgaataatgaaaattattacaaatatcttttttagtattatattcatttcatccaaattttgttggcataatactaatgtcgggtccgatgacaagttaactctatttaggactcaacttttaaaattacatatttttttactgattttaaaaaatactaaattttatttttaaataagagtttaaaaataaactttttatggcctattaaatttcaaaaccggccctgacaaatataatattaatttgacctaattcaagaatttaaacagaataaataaatatacaaataacggtctaataaaaaattataatatatatatactagc

SEQ ID NO: 325635 - DNA, 833 bp, Cannabis indica
aaaaattagaagatgaagaacaatttaataaatgagatatggagatgaagtacaaaagaatcaatatcaataatagaaataagaattacaaaaactacactctaacctcactaatattactattctaatacactcatttttgtcacttaaataagtatagataaaatagtaataagagaaaaataaaatgacaaaataattttccactctctctaaaatcttatgctttttggttttctaaatggtcctatttatagagcctaattagtcccataactagccaaatgtgtactgtttagtgggaaagaaaatgactcctaaaatgagcaaaggacatgagtcatttttattgttcgttgcagagaaaatggataacgtcgcatgtgtatggcttcataactcagaatatgggtcctttcagacacatatttcctaagcattgaaatatggaacacgttgtgaactccagataaagcagggagtaaagttagccagtaggctacttgacctaccctttctaatatctcaaacggaccaataaatctaggacttagtttccctttctttcaaaacctctgaatccccttcattggtgatactcaaaggaaaacaaagtccccaacctggccctcaatatctctacacttcgtatcaacgtagcttttctatctacttcgtgacgcaagcatacgagcttgaatattctcaatggcctcactagttctttggactgcatcaagtccaagatatctccgttcactggctttattccaacgaatgggtgaacgacacttccttccatataacatttcatacggtgccataccaatagt

SEQ ID NO: 325636 - DNA, 819 bp, Cannabis indica
aggcttttatttaagtaaaatttaagtgtaatataaacaacaaatatttatagcttagttggttgaggtggaggacataatgtccaaggtcatggttcaaatcccatgatactctttttttgatatatttttgagggccccaaaatttaattcgtcttgggcccataaattttcagggccggccctgggtatgtctttacctactaacgcatctccacaagtaagtataagtatattaatatataaaggatcgtcaagatccaccaactaaataattgaatttaaacagcacaaatatttgtgatttttttgtttgggttgagaaaagagtaacacagaaattttgagataatttataacatttagcaatgtataattttattcaaaacagccgcccttcaccatactttatttgatttgaatgcaacttctggcaaactatttctttcatacatgaattatattaaagtatgaaacatgctgaacttttttttgtattttattttagagtaataaaaacctttaaaattttggtgcttagaaatgttaaagggcacttattttacttagtatctttatgacttataatattattattggtataatttaatatcaggtctatttattttactttaataaatattaggccaattagtaatttttccctccgaactttgacatataccaaatcatgtcccataacttttttgaccgttgaaaattccccctaaactattgagattgttagatttaaagaattttgtctaatttcattaaattttactgtttcagtgtattatttatgtactaaaacatgct

SEQ ID NO: 325637 - DNA, 807 bp, Cannabis indica
ggtgtctaaaatgcaataaatttaatattcaatcaaattaattagtattttatttagtttcaatgagcaattaaattttatgttgttatacaagtatataagaaaattaaaattaaaatttcactttttttgggagattcggatagatcaaatttaataaatactggatttagatattggatggatctaatttgattcaaaaaaatataaatctaaaatattggataaattcgaactaatctagtagatatacatgaaatacatttaatagataggacgatcaaattcaacacctatgtattaggagtgaatatcgatcggtttggtcaatttttttccctaaaaatttagaatttgatttttgattttagcggtaaaaattctaaagagaaaaagagaaagaattgatgcttatatttggtttaaaaaaagaaggaagaattgatgcttacctattgttccaaaaggaaaaagaatttatgctttgtatgtaaccaaacatttttttaaaaaaaatgtatatatttaatataaaaaaaaaaaaaaagaaattttctttttatctttaataatatgttatcttagtattttattgcaattaagtacaaaccattaatttttgttgttgaataataatgtggcaacaattatgtaacacaaaaaaatatttaaaacaaaaaataaaataaaaaataagtatcaaaaatatgttgtcacctagagttgaagaaagagggtggaggtggaatagttgggtagaagcaaaaatgtccaatgtagagaagatagagaacgaaaggtacaaat

SEQ ID NO: 325638 - DNA, 1182 bp, Cannabis indica
atattttaatagttgccgaaaatctcggtcaacagttgtaatcttgttaatttgttgttgattttttgttacatgtatgttattttttgttgttattttcatgttacttttatgtagtttttttgttgattttatgttgttttcgtattattttttgaaaatcgtaaaaatgttaaaaaaatattctttgaacgtaaaaatataaatattttacaaaaaatgatggcttatgtcattattcctaaataaatataaattgttactaatttagttttagtcacaataaatttcgtgactaaaaatacatttttgtgactaatacatttaacaacggacattttaatcccaatataagaattataatttataattagttataatttttttttatttttagtcacaagttttgttgtgactaaaaataaaactttttatattcgcggtataaacaagaatagtagtcggtctattgaaggcgagtttcaatggggctgtaaaggtctaacaataatattggcaagcttttcgtggctttcaaggcctgttcgacggtaggaacagtcaagcctagatgcaacatctttgctctttctcttcaccatatatagttctacattatatttcattttaacctttctatcataaagcctttacttttattaatctatagttcatcacgatcgtgctaataaaaactttcctagtgtagtttgaattgtttcatattgtgtgcaatggcatggttggatatcatttcaacgattgtcggaaggagttgagaataagaaatgttaaagggcaccagtagcttagtaccatcctgtgtgtcagtatcactattggtgcagctaagtatcgggtcccacatagtttaatataataacttttataaagtatcgctagccaatcgcaacgtgacatgtcgaaaagatgttaggcaccactgatgcctaatactaatatcaatgctctaatctaccaatattttttaataagtggacgggtgatgattgacgttgaattaggaatcaactatttttttgactttattaattaatatgcataaattatctattttaatatatctaatatctaatagagcaaagaggtttcatgatttggtgtgtaagttatagcttatttgattggtttgtgattcaaaaattgtgttttttaaaaatg

SEQ ID NO: 325639 - DNA, 3268 bp, Cannabis indica
tccttttgtgaaaagtgtgtagtccgcttgagattgagtgaatccttcatgtaagagggcgtctgtgagttttttataccaatggcgcgacgattgacgaagcccataaatggatttatggagcttgcaaacaaggttagtccctgtgacagtggatggaatttggaggcccggtgggatttgcatataaacctcctcctctaaatctccatttaaaaaggcgttgttgacgtcgagttgtaatgtgtgccattgtttgatagtgacaatggcaagaaggagcttgaacgtaaccatttttgcaaccggggagaaggtgtcaaaaaaatctaatccctcttgttgtgtatatccttgagcgaccaatcgagcttttagacgttccacactaccatcactgttgtacttgattttatacacccaacgacatcatatagcacgcttgtctggtggaagaggcacaattgtccaagtcttgttggtgatgagtgctaagagttcagtgtccattgcttgtagccaacgtttgaattgaatagcctgcttgtaagtctgaggttcaaactcggctgtaactgcaagaatgaaggccttataagtctttgaaagtttagaataagaaataaatttagatatgggataagaagtatttgatttatcctgtagcagattgtagcattcaaaatcttgcaaatagctaggaggttttgaaactcttgttgatcttcttggtgctgcagcaggaggcaatggagaatgctgctgctgctgtgttgcaggttgttcagcaatgttttcttgctggtttggagcatcaggagggtctgtaccagcagtgttactggtgttgtcgaatgcatcctgcaaggaagggttaggagagataacacaagtatcaggtgctgggtaatcagtgatgtgtgtgtgagttatttcagaatgtggaatgacagtagttgtgaaaggatcaacaatatgaggattagtattaagcttgtgaaatggaaaaatagtctcatgaaagatcacatttcttgacacaaagatttgtttggtattcaagtcatacaacttataacctttaatacctcttggataaccaaggaaaacacatgtccttgcacggggttcgaatttggtcctgtgagcggtaatagtagaggcgaaagctagacatccaaaacactttaaatcattgtaatcaggaggcttaccaaataatatctcataaggtgtccttttttggaggtttggtgtaggaattcggttaattaaaaaaacagcagttaagaggcattcagtccagtattcgattggaatttttgattggaaaaataatgctcttgctacattaagaaggtgctgatgttttctttcagctacagcattttgctcgggtgtttctatgcatgtaaagtcatgtagtatcccatgtttggtaaataattctttgaatacaagctcgggagcgttgtcagatctgaatctcttgaaaacacaattgtattgagtttgcaaataagaaataaactctggaataattgaaagcacatcagatttttgtttgaggagataaacccaagtaaatcttgaatggtcatcaactaaattcaaaaaatatttatggttagaatgagaagtgatatgataaggtccccaaacatcacaatgtataagatcaaaaacatgagaagtaaaatttgcattattaggaaaagggagtcttttctgttttgcaagaggacagatatagcatggttcattactgtgcagattctttgtattacagtgcaaaacattttgaagtaaatctaagtacttatttgacaagtgacccaaacgtttgtgccatatttcagcagatgcgagagcattgatggagacggttttggtatccaaaacatagagaccattatctgaatcacctttgccaatcatcttcttggtttgggattcctgtatatagaatttatcagcaagaaacttaacataatgattgtcatctctagttaaacaactaactgagataatattaaatttaaaaatgggtgtgtacagaacatcacggagaattaaatctttggtaagaaagacattaccacttttgtttacaatgatgtgttcattatttggaagaaccaacttagttggctttattttgtgaagactttggaaagacttaacgtcagagcaaatatgcctatttgcaccagaatcgacaatccaaccattgacctcagaatcgaaagtagaattggttaagataatacctgatttacctgatgatggtcctggatcggtgggctgttgattgctggtttgagcagcaagaagtcccagtaactgctgatattgagttggagttaactgaggcaacatagtgttgttttctgcattattggtactggtgtcattagaagcatgaaattgatttgcagcaacttcttttgattttccagatttgttatatcctgggggatagccatgtactttgtaacatttttcgatggtatgtccatgcatgttgcagtgtgtgcagaagggtctgccacgtttttgttgctggtttttcgaagagtcaggtttagacgggttcttttcaccttggaaggcaaaggccatactaccattcgggtctgaagtcacattctgcccccctctttgattttcttcctgtgaaactaagtgaaacactctattaatttcaggtaaagggtccataacaagaatgttacctctaacttgagcaaagaaatcggacaatcccatgagaaatgacatgatgtactccatgttgtaatggtcctgcaacttcttgactccaccgcaagtgcagccattgcaggtacagttaggcctgaaatttgtcaattgctcccaaacagtcttgagtctagtgaagtacatactcacggtttggttttcttgtttcaagttcatcaagtcttttctgagattgtaaatgtgagcaccgtttccttgctgaaatctcaccttaagatcgttccaaatagcagaagctgattcatcatacaatatgctagatgaaatttctttagaaaccgagttaatgatccaagaaataacaatgttattgtttcgaatccaagcattgtaaagaacatgattagagatagggggtttaggaatagaaccgtttaggaagcccaatttatttttgacagaaatggccaattccatcgcacgactccaagccacataattgtcttgaccagttagcaactgagataccaaaatgtttccaggg

SEQ ID NO: 325640 - DNA, 827 bp, Cannabis indica
aagaatcatcttctctgagaaactttaacgagtgaattaaagaaaataataacatgaacaggagatcatgattactcaagattcaggccgaatctaccattgatcatcgttatgatatgaattaggtctttataataaacaacatgttagataaagacagcttcattcagattggtccttattatatataatttctattatacacaacaccttcgctttgatatcatactacttcgtaattcgaatcgagattacttgtaccaaagagcgagcatcagtgaaccatactagcaatgattgattaaagattccataaatttaatatgttactgactattttattcataactaagtggtcttagttctttgtacagctacaagccatagcctcatatatgaatgaagattttttttttttttgatatttatatataaattattcactaataaatgttaacaatttaacattcataaatatatcaaaatatttgactctttattaataatcagaattatcattataggcaattcagggcataaactctaacaaaaacaactccccatagaattatatgtattcatgtacctagtttgatataataataacatataatttagtgatattagtggcgaaattgcctgaactatatgattagtgacacttaatctcacaaattaattttttggaggtaaaaccttccaaactaccattttgttttgctatgtacacttccatccaaaaagttaactgccaagtagactacccaagtgtacacaaatgtacatgcgacaaatttttaattatccacgtcatattaattacataa

SEQ ID NO: 325641 - DNA, 620 bp, Cannabis indica
acaaagattttagcattgagaaagagaagaacatctccataaagcacgatgagtagtctcctgagcgtcgcacaaagggcataagccatcaataagcatactatgtgtatttagattaaatttggttgggatccaattgtgagaaatcttcctagcaaacattttaactttgggagaaagatgaagactccagagttttttccaccaacctaatgaccctttacaaatagaagatttgctgcacttcaaggatctagtagcaaaccagtaaccactcttgacagaatgaaaaccagtggaatcatgaccccaaattagatcaacatcccaaccacccaggtttgattgcaaacaatccactgttctgccaacaccgagtagatttggagacaaaacagaggtatccagttgtcttcataaataacaatctcactaccatccccgactctccaaatagcccactgcatcatatagttcttttccccttccaaacaaaggatctatttttggaagacttgattgatttaaatggtctatttctatgatacaaacctttcaaaactcgggctgccaaagaagaaaggtcatgatacagcctcaaagcttgtttagccaaaagg

SEQ ID NO: 325642 - DNA, 791 bp, Cannabis indica
agtcaaagctattcttattttataaatttcttcattgtttcagtattataatcatatttagggatgagtcaattaaatttcgtatctactaaatacttatcatgcatgatctaacactatttatttatttaatggatgaccgtccatgttaagttagactaacaataaagatttgaaattaatactacataatcaataacaaaaattaaagcaatgttcaatatgaattttattcacatataaaatcgtaaatacataatcaattatggaagatatgagaaaaatattaaacccaaacatatttcaaattttataaagtttttaactaaatgatatatagtatcccgcttaggcgagagtcaaagatattactcgttaaacaaagtaatgagctcttctaaaagagacactatttaagcaacctttcagtcgatcaaaactagaatctaacgttgtctcatttaggcgagagtcaaggtcattcctattttatgagcttctaccattatttcatactcataaacttttttctaagtagtcatctttagggttaagtctactagaaaaagaatctataaagtacttatcttttgagatcttacagtgttaaattatctaatagtgaccatccattaggaggacgacaagggtctcgaagttccattagaataataaccatgtaagactaataatggagatcaaatgtcttataaaaataaagctcattatttgaagaaagtagcatatttattcaactatttattttgactatttattttaatatatatata

SEQ ID NO: 325643 - DNA, 746 bp, Cannabis indica
gtttaaaataacctgggaaaggtctagacatagcagcgatacattcaccactactgtttcgtaatatagcaccaaaaccagtaatttgtttagctttgtctacggctgcatctgtattaagcttcagcctacctgatggtggattcaaccatttttgaggaggttgaatcggacctgcaacaggctgctattgtgctggaacttactgctgcgatataagcttttggtctgacggcttaacgaaacgggcagattgaaactcctctagatatgacaaggacttaaataaaagtaattcaaccagatggggtttagtaccatggcgttctttattcctttctatccataaactccacaaaatgcaagcaaattgttctaactccagctgagtatgaatggttgaaaacttgatcatgatctcttgcaatccaacatgtgaagagaggaggctttcaatcgagaagtgagaggctttccagaatttcttaggacgtgtgcacctgaaaagagcatgaatgatagtctccttctcatgattacataaagagcaaaaaccagaatcactaatgtacctcgtatgcagagtgtctaagactggtaaacagtcatgcattgctctccacaaaaaaattcgaactttagatggaatggagagggaccagaactttttccaccaactgattgcaggagaagtactagtgttcggctgactgttcttcaagtgacaatgccatcttgtaacctga

SEQ ID NO: 325644 - DNA, 626 bp, Cannabis indica
ttaaactttccctttttgccattattttggccagagccattgttgttttgtttacctccatttttcttattattggagggatggctggtatttctcgtgttagctggcatgttggacagaacttggggctgcatgacaccctgagtctgtccaataattgactgtctttttgtctaggctttctagacagcttcttcaaactttataaaaccatcaactcgcccaaggaactctttcatgttgttcgttgagatccttctgagatctttgcagaattcactcaattgtaagatacctccaagtatggtcatatatcggccttcttccattagtcctttgaccctagtggcctctaccatgaacttttaaatgtactccttcaagggtctgcatggtctttgttttattttgataaggacttctagctatgaaggtatttgtctcgaggacgagaactaagtatggaattcttgagtgaattcctaccaagagttgaactttctttgggccagtttgtaatacaactattgggctattttagataggattgttggaaagatccagcatcacacatctctatttacttttttgagatctgtttggatcttaaagtactttatgtgtgc

SEQ ID NO: 325645 - DNA, 1632 bp, Cannabis indica
aatcccatattcgggatcatgacccgagtattatttttttggtagaaagtaaactcactagagttgaagcaaaaagattatgctcagtgttacgggttggagggaatttttggtctgtggatagaattggtcttagtggtggattattgttgttatggaaggatgacattaatattcgggttgattcaagctcaccgggtcatatccttgtagaagttgtaggaaaggattttttgccttggacattgacatgcttctatggacacccggatgcaactcaacggaagttttcttgggagttattacggaatataaaagctggagtacatggagcttggctgtgtattggggattttaatgaaattgtaagtcttgccgaaaaggttgggggaagaacacgatgttcggctgccatgtaagattttaaagaagttattgatgattgtggttgatagatttttgatcggtgaaaacagagctaacttggtgtaatgagcatgaatctaaccaagttatggagagattgtacagggggttatgcaatgcggagtggttgagatgttttgagggagcggatatccaagtattggattggtgggagtcggatcataggcctcttgttgttgacttaccggtagctttggaacatgatcgatgtggtcaaactaaaagaaaaactcgatttcactttgaagaggcatggtgtgatgatgatgaatgtaaggatatagtcctcaatgggtggcaagatggtacttttggtggtcattctaggggttttaaaaggaaaacgattcaaataggaagaactttgaaggaatggaacaaaaagaagaagaagttgttgaatgaaaaaattgggaagcttaaaaaaactttgactgaattgtcttcacggcaagagctgggtacttgggctgatgtcaaaagagtggaaaagcaattgaatggggcattggaaaaggatgaacagtattggcgccaaaggagtagagctttgtggttgaaatggggggatacaaatacaaaatattttcaccataaggcttctaggaggagggaaaaaaatgagattaaaggcttgtttgatagtttgggggtttggcaaagtgatacaaatcttgttgtgcagatggttgagggttatttttcctctcttttccaagctacctcagctagtgatgctcatattcatgaagtgttggctgctgtgcaaccgaaggttactaatgagatgaatgaagttttgcttgctgaatttgaggaggaggacattgttcgagcggttaaagaaatgaatccgactaaggctcttggggttgatgggttaccggcattattctatcaaaggttctggactactctcaaggacgaggtcattgcggtttgtctttgttgccttaatgaaagtgcggattttagttgtttaaatgataccatcattgctttgatacccaaagttgataagcccgaacgggtagaggaattccgaccaattagtctttgcaatgttatctacaagattatttccaaatgtctagctaatcgattgcgaagcacgttggatggggtgatctcggacacacaaagtgcctttgtaaaaggccgcctcatacatgataatgctattat

SEQ ID NO: 325646 - DNA, 605 bp, Cannabis indica
cactaaaaatatcttctatctttcagatgagcgacctgtcggatagccaaatgctcgactgaggcggtggtgcttttgttgacgagcaggataaagaagatagttttatacctgctttgctctccgaagacgtagaaagaatggttcaagaactcgttgaactagggacaatcgagattcgtgatagcgaatccacggtgtccgcccatgaacaccttgttcactctaggcatgcccctgatatcgaagtcgaggaaactgggggaagattaggagattcctcaccgcgcgtgaggagaagaggaagatgctgagagaagtgggacggattcaattgacaatacctagctgaacaaaccattctcatgcgaggatctggtctcgcgagtcaccaaatctgacctcaacgcatttacgaagttgaatttgctgcgactcagtaccatgtgtcctcgctctactcaaaggccgcatcttcccttcaccaatcctgcaataatctccacagaggatgtgcttgtctttaggctaattagtaatttttccccctgaactttgacatgcagtaaatcgtgccccctgaaattttttggccgttaaaaatt

SEQ ID NO: 325647 - DNA, 695 bp, Cannabis indica
aaatgtaatttttagtcacaataaaaaattatttgtgattaaaatattgtatttagatataaattgttactaatttagtttagtcgatcagaacaagtattgtgattaaaaacacatacaacataataatgataatttataattaatcatatttttttaatttttagtcataaattttgttgtgagtaagagagtaagatttttggtagtgaaatgattttttatttttatttcaaacactcctaaaagcattttttaaataataattaaaaaaaaaaactttaccaaatagaacttatgcattctgtgtcacaaaaaatcacaccataatataggaaattttgcaatattatgccaattaatatactttaaaatatatttttatcattaggctttttaaagaacaatcatataattaatatatatatggatttgttttttaatcttacattaattacaaaattttcatatattaatcttcacagatttctttctaaatatggataattacaaattaattatattgttatacagaaatagaataaacaatcacaatgtaaatataaaataataaataaacggaaattattacgaaatattatttatagatgtccaaatcattaaattaattatcaccattaatgtttagttgtatttttttttttatacattgatttagtttcctattttttagt

SEQ ID NO: 325648 - DNA, 690 bp, Cannabis indica
aataagttttgccagaaaagtcattagtgctggaaaagtcactggaaaagtcgccgaaaaagttagtgtcgccgaaaaagccactagaaaagtcactgtcgtcggaaaagtccatagaaaagtcatcgttgccaaaaaaaagtcactggaaaagtcactagaagtagatgtcgcagatataaacaaaaatagaaccggttctataataaaaacaaataacacaaaataaatcaaacccattataattaatatataactagttttgtaacataataaataaaaatagataacacaaaataactcaaactagttgtaattaaaatagaaccggttctatgacaatgttataatgaataaaaataagggaaatttgactttttatgcatatattactgtaaaattatttccctaaacttatatgtattaaaattagcaatgtatgtcagcgttcctatttttcccattatacccctcacatttcaaaaaacaaattagggttaccttctctcttttcctctcgctcatactcacggtgcacccccaatagacccacgatatacccacggggcatcccaatcgacccacggcagaccccaattgaccctatccacagccctcgacccacgtatatgttggaattcttttaccaggatctagatttactaacaagtatgttggattaacaaccta

SEQ ID NO: 325649 - DNA, 1283 bp, Cannabis indica
ttttttttatatctgataacgaaaattggtgttaacaaattaaaattttattattttaaaaaatataacttattattttaaactcaaatacatatttagttgatgaaagtaataataattataattattgtcttgttgacgtgaaaacaatgagtactcattaactcatggcacttcaaagtgtagctagcgctatcatgaatgggttaattagtaatgaatatttgtcttcattacatgtgtattcaatctatgcataattttgtttatcaattaactcttttacataagaaatagacataaaattatcaacattattattattgtgtactgactttgacaaagacgagcggaataatattggcgtatgaaactagataagtacacccttcatgttattcaaaactagtaatttaacaccgttcgaattatataatatattcttccaaaaaaaaaagaattatataatatatatttatttatatgtgttaatattaattaagtaatataacgcatgagataggagtgcatatggcctaatttggttggattagaagtgtttaattataatgagacaatttaatgcttgtggtttaaagaagttataaaccttcaatttattttttatttttattattatataacccaaccctacttaatataataatatttctcagtgattcaaatagttcaatgtaagttcgtcttactcttctagctctaaagattttaaaattagtagcaaaaagtctccagtcacatagaaaagggtcaaagagaaaatttgattattaggagaaagacaaagagggggagttagtgggatgaaaaagaaatattaaaaaaatgtttttttttagtttttaatgattttataattttaaattattttttgtaatttcaaaataattttgaaataattttttataatttttaaataataatagtaagtatgccaatataaatatactacgtgtataaaattgtacacataaacagtccatattgacaattaattgtaaaaaatggatgacacctttaatttgtaatagtttattggtatgaagagttttaccactaaaatttaaacttacaaggttaaatgcaaatgaaacgataattgaaaatgtttcaccaccaaaaattttaaatttatattacaaacgtgataacatgatttaatttagtgcatacacaaaaaacgatatatgtaaggctaattagtaattgccccccctcccatgcactaaatcgtgctctttgaacttttttggccgttagaa

SEQ ID NO: 325650 - DNA, 1576 bp, Cannabis indica
actgaataatactgactcatggactaagactaatttattacccaactacataaaaaactatttgtgtcttttttctttttttcccttttaatttatttatttcttgagttcttattattcataatcaatttttcaaaaatcttggtgaacatgttaagttcaccactatttattaagataaatatagagaaagatttcttaaatcttaaaatgagttacaatatttaaacttttagaacattggatggtgatcaattttaaactcttacctatttttttattcaacttttagctattataaaacattttatgaaagtgctctaacacttttatgatcatatcataattactaacgatcaaatattatatgcggtcctccccttaataactatatacacataattatataataggataaatattattttgaaccctatgttttacaaaaattattaattggatcctctgttttgttaaagataaaatgaaccctatatttttcaaaatagtaaaaataggacattgagctcaattttcaacaattttactttttaatacaactaactttaagacaatttctaatacgaatatatagagaaaatataaccagttttgttataacatttctagattggattattattaagttttattttgataaaaaatcatttcaaggtcctatgtgtacaattttaaaaaatatatgatctattttttcatttagtaaaatagaaagtttaattggtaacttttgctaaatacagagtccaaaataatatttaccctatataataaaattctaaattttatgaggtgcatattatgaagttattttgtatagctttaggttcaacatctaataatatatagaaggccacgttctctttacaaataaataaaattactagtaggtgaaaggaattgtcttaaatcataattacatataaataatatatataattatttttcaatgggtattaccattaatacttattcaccaaaatttttaaaaacaaatataattaaatgtctatttaaaaaatattaatttttacaaatgaaattttaatgctatgataataaattgttcatttttacacttctaaacaattttttttttacatttctacggaattcaatatagaaactcctattgcaactaacgctgcaacctaaatcgcaacaaaaaatcgtataaaaatccctatttcaactagtactgtaaccactttagaaacccaaatcataaatttgaagaaaaaaaaaacaatttatgaagtaattcccctaaaatttatgtgtttaattttattatttatttttaaaaaattatatttttacaatatatcgaaatatatttatatttaatattattgttatggctttttctcaagctcaaactaatatttttatctctcataaaacaacctcaaccatataatataaaaataattattttaattaaataacaaaaataagtataaatactcacctttttaataataactattaaaaatgcatctatatatacatatttatatttgggtatactcttaatggatattacctatgaatg

SEQ ID NO: 325651 - DNA, 1001 bp, Cannabis indica
atatagggtctcggtccccgagctcctcactaattctgatttcattagcaaattccatctaaagagagttgagagagtgaggaagcccgaactccaataccgaagctattgcagggattgaagctcaaagatcaatggctggaggtatatcaatctttgattgcatatattatcgatatggttatagtttattttccgcatttcttaatatgctgtattacatactctatattatagtctaacagtctaatgataaattataaaagtatgtatgtgtatttttagagctattgtttgtatgtttaatgtcaataaattgaatttttaggtagcttaaagttattaaaaaatcccttatactacaattatacctataacttatagtcacataagcaaatttgttataaaaacgagcagaatgtaattgtagaggaatatttgcaacgattcgcatcgttcgggagaatttttgcaataaaaaaatattcaaggggtaaaactctataaatatcatagttcaacggccaaatatcctatttatttaaattaataacgagtacgtgcataatcagctaccataactagtatatatatcttatattaaatgtgattatctaacaaaaattgttggtttaacgattgtttttaaattttttcgttaaagttaccggttaaaactaatactgttaaattaatcaattaattatttttttaaaaaaatggttttaaatatctaacatagataattatttaaaaaaatcaacaaaattaaataattattattttttatataaatcttcatttaaatttgaattagacgttaattcaattaattaaacatacttaacaagtttattttttatattgtttaaaaaatctaaatttactcatttattttattattcaataagattagttagatatattttcttgtaaataattttaaaattaaattaaattttatatatttaaaaaatttaattaaattacattaaatttaa

SEQ ID NO: 325652 - DNA, 1502 bp, Cannabis indica
aacataaacaactgctaatttccaaattaactaagcgggctttacagccctaggtgatcatcaagacattaattaaaagtataggcaactgttacacaaatgttaaatttatagttcattagacaatacatttctaagcataattgttgagacatgtatgtaatagggatcataaaaatttaaaactttatcatttatgatcatgtcgtaatgatgtattgtggaagcaaagaatttttacagatacatgatacagtactaacgaaaaaaaaaaatacaacaagacgtaataatagaattagacataatgattgtgccatttcgcgttttgtgaatggtgtacgtagcctacgtattagttaagtttgttactagttcgattgtctcgtttactatttttaaaaatacaagatctatttggtcatttaacaaaacagacagagtccaaaatagtatttaccatttcataattagttactacataatatcaataactattcatgtaattatatataaactttgtttataaatcaaaagctttatttatataattgttattaaaaaaactactcatataattatattttggagtttatttcattaaatatatatatatatattatttttttaataaatcatgcaatttttgttaataataactagttaaaatagtaatagtttgcattctaatcgagacatctctctattagagacacgagcatgattaaaattaaaaaaatgagccacatattcagccgcctaatcttaaatcgttttacaaaaaataaaagtaaaagtaaaatcaaataaaaaggattgcagcatcaacgttaaccttaattaagaaaatctatatttagttttatctactgcacgttcagaaaacataacagtggaaactatatcacagtaggtttattaaacctcatggcttgagcaaccaactattgtgtaaagatacgtaactgcaatataataaccccttcagtcacagagaacttgttatttccaactactaacaacgattttatgaagagtcatcaaaagacaaagaagaacaacaacgaaacaaaataaaataaaataaaatcatatcatatcatagagacaagattaaaacacttaaaaccatgtcatagagacaagactaaaacactcaatttatatttgagagacaagactaaaacactcaaactcatttcatagagataagactaattggaatattaaaactcgaatcacaatagcaaaacacaatctctatcaagctgcgcctatgcccaaggaagactagtaggcctgtccggagagaaaaagacagccttttatcaggccgacccataatagtaggctaatgaaaaaaatacaataattttcggaatcaataaaaaaaactgtgtaaatttttaaaagagaaattttgtttttgggtaatctttaggttaggtgggttctaggcacagtttagcatgtccatgttcaagactggagtactgctttct

SEQ ID NO: 325653 - DNA, 2510 bp, Cannabis indica
ttaatcacaaagctccctatgaggttctgtactcaagacagcctgattataagctgctgaaggtatttggttcagcttgttttccatgtcttcgaacttaccaaacccataagtttcagtaccactccactaagtgtgtgaacttagggtatagtgatgttcataaaggttacaagtgtcttagctcacatggtcgtatatatatctcaagaaatgtcatttttaatgaaaaatagtttccttgtcaacacggtttttttaacaattatcagccagaaaaagaagtgaatgtcactatccctcactcatggattgatttaccattcaatactatgccatctcagtcccatgcagcatcaccttcccagggttcttcctactcacaagatcaggtaacaccctcctttgatcatggttcacctatttctgctgtaccatttcatacttcagatttgtttgcccaggaatcacctagttcagctactgctagtccttacactactacacatcagccacctgatcatgcaccttcaccctttcaaccatcatctcctgaagctgtatcacccgtgacacaacctgctgctcctatctctcaacatcctatggttacccgtggcaaagcaggcatctttaagccacgggtccttgtgtcacaagtttcttcatctcctcctactcctggtgtacctcttactattcaggaggcactccaccatgagggatggaattttgctatgaacactaaaatggcagccttacgtcgtaacagaacatgggtgcttgtgcctccttcacctcactttaatgttgttggaaataagtgggtttatacagaaaaatttgatgcaaatggggttcttcagaggcttaaggcacggttggtggctaaaggatttcatcaaagacctggggtagattttggtgagaccttcagtcctgtcgtcaaagcatccacagttcgtattgtcttgactattgctgttgcacacaattgggacataaggcaattagacattaacaatgcattcttaaatggtacgttggatgaagatgaagatgtatatatggtacaacgtcaaggatttgttgacctaaataagccacattatatctgcaaattacagaaatcaatctacgacttgaaataagctcctagggtctggtatgagcagctgaaaaacacactattccagtggcaattcgtgaactcgaaggccgactcttccttctttatgctgaaacattctgagtatgttattatggtcttaatttatgtcgatgatattatagtgacatggagcaaatcaagggagttagaaagcttcatatcatggctaaacaagactttttcattaaaggatctaggagggctgcattacttcctaggcattgaggtttttcgagatgacacggggttgtacttgtcacagggaaaataaatatcaaaacttctacaaagagtgaatatgatcaatctaaagccgagtccaacacctatgacagtaggcaaacctatgtccatacatgatggtgaaccaatggtcgatccctctcactacagaagtgtcataggtgcattacaatatttaagccacaccagacccgacatctcttttgcagtcaataaacttagcgagttcctcaagtgtcctaccaatattcattggaatgccacaaagcttgtattacgatatcttaaaggaaccatgtagcatggaatccacataacacctagcgatagactcacacttacaggcttctctgatgtagatttaccctgacgaccgaagatccattgctggttactgtgcttttcttggtgactcactgatatcatggtcttccaagaagcaaacagttgttgcacgctccagcactgaatcggaatatagaacattagctcaattggctcagaacttacatggcttcaagattaattactcaaggagatgaagttcaagctcccagcagcccctataatctggtgtgataatatgagtgctagcacactagctgccaatccagtttaccatgctagaaccgagcacatcgaacttgatgtgcagttcatcagggataaagttctttagagacaactagagattagatacatacagtcacatgatgagatcgcatactgtttgacaaaagggctttcacactctagattccagtttcttcttgacaagctcgaagtgacttcatcaccctctcgcttgaggggtggtgttacagaggaaaatgatgctgggtaaattatgcagggtacttttgtcattattgcaatgaggtgtactcccaggttgttggaacttttccaatccctaggcaatcattacagctgccctttatttccgttaggatagaatcttttgattccttttctatgtaatgattgtaacaacttactccacatgtaaggttgagattgtatcatcctcacctctgttgtaatacccagaattaagaaaagattagaaaaaccctaactagataattatgtataa

SEQ ID NO: 325654 - DNA, 1507 bp, Cannabis indica
tttttttttgcttttctcttcctttgacatcatcactctgtcactactcaatcctcccatataaaatcctttttattattattattattattaattaccattctattccaattccattttatatatatatatttttgcaaaaggcaggcaaaagagagagagacaaggagaaagtctccagcttttttctcttttggccaaagagagagatattcattttcatacaacatagtaacatagtaacatacactactaccctttctatttccatttctattctttttctttttgttgtcctctactactcttatagttagatatataatagaaaagaaattaattagtaatgaaaagaccataaagccataatccaagacaagtgtacagaagaagagaataagagaaaagaagagaagagaagagaagagaagagtcttttcttcaaatcagtgcaaatgcaaaacaacaattaattcaactgttctgttcattttttgttttcgattcggtccaatccaatattgtattatttattaattaatgtaggtttcttatattaactaatatattctattttattttattatatatatgtatcatgtaacttcttgttaatttgatcataaatgtaaaagccgtaaggcatgcattgcagaatgaatttttgatgaataacaaattttatcctctcatcattttatatatatatatatatatttatatcttgtttgttactatataatcacactcatcatattttttctgttatgtataatatataattgcaagcaaatgactactcaaaataataataaaaagcaagtgtagtgactcatcacaataaataatatacaaaaaaatacatgaataaaaaataaaagaaagaaataaaaagcataatgtttacggcactccatttataagtctaaaaattaaaatttaaaaagataaaacaaaagtagtgcatctcttctcattcataactatttgactttaattaatttggcatcactctatttttatatattatattatattatttatttatatatgttacacaacattgagacaagctgttaaactctgtgttgtgtatcctcattggtcatcattttcacatatatctaaaaatcatccatattattcttatttttattattattattattatagtaaataacgttataagcatttaaaattaaatacttagcaaattttatcttaaatttttcacaatattaattttgtctcataaaatatacggcttgttaagaatcttctgaacttttacatttgcaaaaatttaagttaggtttcgtcccatttttctgtctattataatgatgtgtctttatgaattagcaactatgtcccataaattttgacaactatcaaagtgtatcccttcaaaataaatatgagaaagatttaacacttttttttaataaatcttaaaaaattaatttagatcttaagaaaaattatttgaatgattaaaaaaataaaa

SEQ ID NO: 325655 - DNA, 1013 bp, Cannabis indica
aaatctatttatatatatagtaaaatattattttaaaaccaaaataatatattttttttttataaactaccaaataaattatattacaaaatttatttttaacttatacttatactgagcggcgaactcataaaattttaccagtattaatataacttcaaataaataataaatatatatacaattaaaaaattattaaaattgtaatattttatattcataaatcagtaataaaatatattataaatgctaaaatttaaattaatataactaataatataataacatatatcaacactaacatatacagtcaacaaattgatagtaaggaaagttgaaaaaatataacatttaaaatttaattcgtcaaaaaaaaaataatatatagtgcataaaattaaaaatataaagttatgtcacaaatagttttatatatttttgaagaaaaaataaatatatgcatacacttgactaggactgttcatagaaaccatcaaactgcagtttaaattcaaaccgcaacaatctgaactgctgtacaccttaactaacgaaattgtttttggtgattcggtgataactctatggtatagagttaatttttatgcttttaaactaaagtattgtgaggagagtaatgaaaatgtgtttattttgcttaattttaattagttttagtgttattttctatttagtaatctaacctttaagttttgtaaatattgatattgttgggtgtgtttttccaattaactgtgcttattttgttgaaaaaggaggaattaaattgacaggtaaaagagaaagaagcaaggaagaaaaggagtacaagctggaactgggttgattgctgaagcgatgctaaagcaatgctgaagtgaattcagcatcctggcagtgacgtggaatcacgaatttcacttatccacctcagcaatttcggtccaatcactcaaattgcatcagctagctgacatggaagaaaggggtctcaccctagtgggccaaagtgg

SEQ ID NO: 325656 - DNA, 1017 bp, Cannabis indica
gcctttctcccatgtaaatggatgacccaatagctccaagtcagtaagattacagtcgtttaaagcttgttgaaaaccattgataaggctttgcagataaggtcttcctcctcatttgtcttcttgtctaacaatgttgttcagatcacctatgacacaccaaggaagggtaggatcagaagccagagtacgaagcaagtcccatgaattgtgtctattcccccgaattggttcaccataaaaaccagttaatttccacatccctctctcagacgattcgaccaaaaaatcaatgtgactattagagaaacccaagattcttccatcatcctgatgtttccacaataaagccagtccacccgaattaccttgggcctcaactcaaaacaccccttcaaacttcaacatgcggcccacactttatattctttttttattacattttgtttcacagagaaaaatgaaattgggattcttttgagaaacaatctctttaaggaattgaaaagtccgttggttcccaagcccacggcaattccagcttaacacattcataatacctggcgggcctatgaaatgaacccgcccaaacaagtttttgtgttacttttcaacacatcagtatccattacatcctcaccaacaaactctggccccttagcatcatgggcctctcttccttcattaaattgttggcccaaactactcactccctcaagcccattaacttcccccccttctgtacgccttcttttggaatccaaaataaggatacttgtttccttatttatagcattatcaaattattttgtctatatgttaattttttatttattaaacttatgtgatttaattgatagtaaatattttttcaaaattttattttctctctcattatgtctagtctatttagtaatatattgtaataccctaactagcataggcgtgttacgtgatgtttaaatgtactgtgcagctcgttgctaatcaacgaggtttatggaaatcgtgattaat

SEQ ID NO: 325657 - DNA, 1533 bp, Cannabis indica
gaaaccaggtaaatcacatgatcgaatccctaatctgggaaaccagaacccacaactctaggttttgttatactttctaaggattacactaactcacaaagtagggaaatacccaactatggcactaaaattgatgagaattgagaaaacgagacactcagggaaccctgccaaaattggctaagcggttttaaaggtacgggtaaaactggttacccagtttataccagttcaccctagaatctcatttgttgctcaaaactccaccaaatgtaaccaaaccttccagagtacctaattagggtatactcaatatattccaaccagtaattcacagaaaaagtcactgaatcaaattatgccattaaagatcaaagcttgggtttctaagttcaaacttccataaatccaacatcaagcaataaaaccagctaccaaaaccttcaatcaacttaaaatgaacataaaaaccgaaccttaacatttctaactcaaatagtttttttaaaaaaatcacatatttaaacaaatatcaaatgttgaaaaattacaaaaaaaatctaggggttacctcaacttgatttccccttgaattccttactgaaaatactagaaatcagcaaccaattccttggttctagctgggttcaaaaaagagaaggggaggagaaagagttccttgattttagtcttaatttcctttaattttctcaaaatgaaaagagtttattttctaacttaatccttgctgaaattaacttgctaggtgtcatcataaaaggcagccaccaattcactttctttggtaatttactaaaatgccctttaacttaaaactagggtattttcaagactgggggtaatatggtcaaatttcataaccccgctcaaccccgatattttattttctccaaaacatatcccactaaaaaataatgttctaaacttacccatgtgattaaactagccatccatcgcattttccgttgtagccgagcaaaattgtaaaaataacatatttttcatataattcaaatattaccattagagtttaatcaactctaatgcccatttttaataatggggcccatagtcaattaaatatcctaaataatgatgaaaaaaatagaaattagtgctaattgcctttattaatccaaattactaaagcgatcattacaattatccctttgttaatacgatttcgtcctcgaaatctaacttgaatagctctggatgttaagtcctcatgtcagactctaattcccaagtggcttcccccaccttgctgtttctccagagcaccttgaccaaggcaatggtcttgttccgaagaccattttgctttctttcgaggatctgaacaggctgctcttcatatgagaagtctaactgcagttcaaggactttataactcaagatatgagtcaagtctgaaacatatttcctaaatattaaaacatggaatacatcatggacagccgatagtgctggtggtaaggctagttaatacgctacctgcccgaccttctc

SEQ ID NO: 325658 - DNA, 638 bp, Cannabis indica
ggcaccggaaatgcaaacttatgaaaactactaaatgacataaaatgcatctcagaattcaataataacagcataaataattatttaaatagctataaataattttcataatttaaacatgattaactgctaatttccaaattaaactaagcggtctttacagtcaacttgggtggaagtgcggctggtggagagcttgggtggctatggaggttaggctaatacagggaagaagacaaaggggaaaggaaaagagtatagggttgggctttcctagaaattaggcattttttttcatttcaatttttttaagggctttctaatatctctcttttttttttaattgaaaatagttggctggtgtaagaaaatgccccaatcatgcctgctatagcaattttttcgccaaaattcaacaaaaattttcctgactgctcatttaacttgtaccacttttgctagatttttgctagaaaaatgttacagcaagcgaatttttccaaatcaacgacaaaagcctttttttcatacccagtttttgctacagcagaattgaatcaaaaaattagcaaaaacttcagacccccaaatcacatctaaaactccaaattgtgttccaaaaatacctgaaacaccaa

SEQ ID NO: 325659 - DNA, 583 bp, Cannabis indica
ctctctctctctctctctctctcttatcatttttttcccatcattattcaactgattgtcttttgccattgtataaatggccaccacgaggtcaagttcaaatttcccatctccttctaaaatgcttcctaagaagactaaaaaagctcctcagaagagaaacaaagataaggtgcaagttaatcccgaaatggagttaaaagttattgcaaaaatggaaaggtccactgaatttgatctactagagggttctggtttgagaaaaagccatctaccatctaaggtagaggctcggaaggccaaatgaataaaatcttcgaagaatgtcaaggatttaacattttgagtgttttttttttaattgtttttgtgtttttttgctgttttttatatgttgtttatgttttagtttgatttctaatgttgtaggatggttctgaattcgactttgaagaagaaattcttgatgtggatagcaaaagcaaattaatgccatggtttgtttctttttttctcttttctgttcatctgtagatgttgattaagatttttagggtttctgtttttgttcttcttcttcttc

SEQ ID NO: 325660 - DNA, 1680 bp, Cannabis indica
ttgttatttattattttatttattataatttgttgttggagacataaaccacaattaataacttattttattttgttgttaattatgtgaaacaatatttttttaataaatattaaataatttaatattaaaaataatcaatctaaaataactgatccaatccacacttttgcagattggatgtgagtcactatgtggattgaattggatccaaaatataaaatctgcacttactgcggatcggatgcactatgagcaaaatagtacggattggattgaaagaacacccctagctagaaatatgggccggattttttgacacggcacaagcacgacctagcacgaaaaaatatgtgtttaggcatgagacagtacggcacgaaaaaatatggaattcaacacgacaagcccaaaaatacggcacgtaagcacgaacagattcatgacatattaaaagtacaataatttgataataataacaatgataaatatttatttattaattaaaatattagtattattcaaattacaacaattataattatttttatatgattgtgtgtagctattattgaaaatagacataaaagtaattaaaactatatgttaacttagattttcgctaacaataaatgaagccttgattaatattgataattaataatatatgtagaacacaaagagtttttacgtagttttgtagttaaatctacatactctacgagtcaatattatttctgaatatttcttgagagtatacttagaatacaaaggaataactatggaattttactcaatctcacaggatttctccttcccgaaatgaagaatccctttccccttaggttctgtctctatttataggggttttaaggatgccaattattcttctttaattttatctaagtaaatactcgtgaaacgtggacaatcctcatgtttcacatctacaacatgtggataaaaaaaataactgatggcaatcgtcttttgatcttatctagaagcagtttgcttttaccaggatgatacattccaactatggctgacattattcgaaggtgttcaaaggatagatggtcaatgtttatgttgggaatattttacgaggatctagatttactaacaagtatgttgattaacattctaaatatgaatatctctaaaacaatgaaattaaacacataagagtttagaaaaccttacattggttgcagcagaatataatgactccttccactcagatctctaacctttgttcctttctatcgcagagtattatcaagatctgagcctggatctctttctcttcttcgggtttggttatcaccgtcttactcactatgattgagtacttgacttgctatatgtgggcatgacactctttcactaagggttcaaatatggtgaagaacaatgaagtatgtgagatcactgtagaaggaactctctcatctactagttatctgacagagaaaattaggtttgatttggttgaaggcatcaagtggatgagtgagagcatcatgctccttttatagtgtttcaactagggcttaaggctgaattatattgattaaaaaagaataaaagattgagcaaaaacactctaaggctggccacatattggaccacattctagttacaattttgtcactttatttcaaccacttattcttc

SEQ ID NO: 325661 - DNA, 504 bp, Cannabis indica
taataattttatttatcaaaaaagtaaaactaaagaatcaatgtatattaagaagtttcccatttatatttttaatatatatatatatataattagaattttaaattggtttgataaaaaaaattgttattataacaataaataaaaaaggtagtgtaggaaaaaattagagtattctccgtgatgaattatttttatatttcgatcatttaaagtagttattatcattttatcttactcattatcatcattgtatctcacccgatcatcaccgtatctcatctgatatctctctgtatatctcactcattgtcatttttcatatctcactcgttgtcttacctatcgtaatcaccgtatctcacctgaagtttgccactatattcaaaattaaacttgtcactttatgtgtttactgtaattagtagctttttcttaatcttaatcacttaataatttcttaataatacatcatcaaatatgagcagtggcggacccagaatt

SEQ ID NO: 325662 - DNA, 860 bp, Cannabis indica
tttttctaataaataaaaagtaggtacacatagaagaagggggcaatgtgattcaaaatacggtctcccatgtaaatttaaagcatcttaactaattattgtatttaactactatgtatatatgaaaacaaaaaattgtatattaatatatttttaaatctcagggtaggctttaccctccctcaacactcctaggtccgattatgtcacgagagacaagacctctaaggagagtaatgtacttcactccgttcacgaagtgaagggctccatagattcattactagagtggactatcactagaagtctacgaacatgctcatgtagcttacatgcatcctttgacaactaggacaagagacatgttaaaggcaagttacacgctttgtagggcaagctcactacgcctctagttaaggaactagtcaagtcttagcagtgtaaaccatacgttagtttcatttggcttggttagtccgactcatttcttgataccctataaataggacctaccttaacttgtatgcaaatccaatttctagttcacaagctaataagctgcctaaatcaccacacagaactccgttatggtaaatgttaaatcttagtacaagttactcgtagactaagatctcattaatagcataaaatacttaaaatccctgcgtgttcattattatttctttttatttcattatattccatctttcttctattttctaaattgagaaacacttagagcgcgtttggaaagccacatgggaattgaaattggatgtaattggaagtaattacacagtttgacgtgtttgtgtggctacgtaattacatggtaactgtgtaattagaggtaattggga

SEQ ID NO: 325663 - DNA, 705 bp, Cannabis indica
atataaatcgtcctttattaaggggaatgttatttgagggggaggaccaactatctaatatgtggatctcttttaagtatgaaaggctaaatactttttgcaagttttgtggtctattggatcatgttcataccgagtgtgtagcacttttggaggagattgaggcaggaactcgaccaatcttacagtacgatgataaaatcaaaacaactggtttagatcatatgttttctccggttcgctcctcaactactggaggacctatacataaatcagtgactcaaatggctaaggatgttgccctaaagaaggctagtaatgcagtgctgggattaaccactaagaggcagaaaatcttcatatctggtaaataccatttttaatctcatttaaattgaaaaataatttcataatattataggtttcttttttaactcttactttatcaaatggaatattagatcaagagcaagggacaacttacactcagagagctataagtaaggaagaagtttctttgctgaatcagaaaccgatagattcaaataagagtgacagtactaatatttccttcatcaagaatggtaatgcaggagagaaaacaaaaagttcagagctatcaatggggaaaacaattgaagtggaggctaactcgggatcaaaagtgaagactaaaaattccaaggcataaagactcattgacaa

SEQ ID NO: 325664 - DNA, 871 bp, Cannabis indica
gggcataaaacccaacagcatcaactttcagaacctgtcaaaatgagagagcacagtatccagttgccgagtattttatatatatatatattatacatcctaagaatttgtgtgtacttgcatatagttgtgcagtgtgtacaatgtaattctctatgtcatcagtttttgtgtttaatattactactgcataactacataggattttcagtagtgacgatttatgagtttgaatttgacattgtgttttttatttgtatacctatgtatgcttgtctattctaaataaaggagtactcgtagaggtttagtaattgtgatgaatcctgttataaaatgaatcatgtatgatatttgagtcatgatctttgaagcactttccaatatggttcatgcatatttttttgttgaatgatctactactcaagataattatctttatctaaggagaattaaatattttatcaatggattggatatgttgagaagttcttctaattcatcaattactttaaacaacttataatcagttggaatttgtcgtacaggaatacttcaatccagtataagttaccgaaatcgtttggattgtgcttgagtggagaaatccccctatatgattatctcaatctttgtctataagtattcgttgcattagtttttgatttagtcatttcaaaaaataattcttgaattatttatttcaaaatttagtttacaaattaattatttcgggaactggttttgtaaagtccttttttggcaagttaaataatttttcctgtttatggtaagattgctatgcattcatgttcgaattcttacctcttttattcggtttttagttgccattttccttgtttggaaagtt

SEQ ID NO: 325665 - DNA, 520 bp, Cannabis indica
aaaggtaacaaagttacgcaaccagaggaggattttcttccatctataatagttcattgtttatcctaagagcatgcggagataccctataaagttttatttagatatataggctcatataagagagtagaattctgttataacagaagtagttataagaaaacaaaaatactaaataacataattagagcctaaaccaactaatcttttaactatttgttggttattatcccccttaaatgaaaaggggtgttaactactttgagtttggtcttaaggtattggaatctctccttgggaaaaggcttagtataagaacacctgtaatctgattaacagagggcacatatcaaactgagatttcatgttgcagaatttaatcatgcacaaagtagagatcaatctcaatatatttgcatctggcatgaaaagttgaattagcagctaaggcaactgcaccttgtgtaatacccggtaaaaaatatacatatatttaaattttatttgttatacaatttgt

SEQ ID NO: 325666 - DNA, 922 bp, Cannabis indica
tttttgtttttgacactaaacaaaaaaattgacacactgcagtagaagaggatggagacttgtggtggtgaggctcagacttgtgacttcccaactggtatagaccttccttaattgtcccttgaagaagagctctctttgtgtccatgtccttcacaacacaactggtaggaaaaaattcaacagagacattattgtcctgagttagtttagaaatactgattaaatttttagcaatatgaggagtatgtaaaatattgttatactcgaaattcggttggaggacacgtgtcaagataaagggaatgtgaatcggtgccataactcattaattgcgtaagtatcagagtatatttgtaacccgctaactgtaaggtcttaggcaaggaatcaatgtacgaactggtacttagtgtattaacgagaaaccataagtcgctaaaggagaatagtgaggcactggagaagagtaacacataccttagcttataataagcaaagtaagtgtcaaagtcggaccggctcaaagaacaagaatgcgagataaccatctctctacaagaagcgagactcatatccctgacaagtcaaaagatttccacatactcgcaatcgacgtaaaatatatcaagtcaacctcggaaagaaggatggttccagctcgccattgggatcactacaatcacgtttctttcgagacatctccagattcaacaattaaagacgtgtttaatacacgatattcttgacccagtaaaagtgggaaaatcacagctaaatgattttcaaaatcatacaccgtatttaaatttcataatatgtaatcagatcccacgatttaagggataatgagtaagacgagatctgccagcaattactaccaaccagatctgcgagagcacttgatgttggaaatatttta

SEQ ID NO: 325667 - DNA, 889 bp, Cannabis indica
  modified_base (112)..(112): a, c, t, g, unknown or other
cactctggctgcttcatggactgacgactgacttttacagaccaacacgagtgttttaagcatgctttgtcctcactcgcacatttttcctagaaatttacccaaaatttanacctaggtcaagcacacttaactgtggagttctttcatgatgggctaccagaaaacaagatgcactttattgatataggtgtaccaatcaatccatttgagtcctcttcaactatgtagtccatagctacacagtcttaaaatcattacacttggccttccccaggaggcgtggaaatgcacagtttacctggtatttccccttacgaatcacgggactactgactgtcacactactaataccgttaaatttaatgaaatatttttatattcttaaatattcagttaaaccaacaaaaatcgttagatagacacattaatcactactcatagtgatttgcttataacctttagatctgaatctaatagttaatacagtgaacacaaatattaaatacaataaattatttattcttttaaaaaatataaaataaatgggtaatttgttggtgacttattgtatggataatgttttttcttaaaatatatatttggtttcaataattgattattcttagttttttttttctaaaccatgaatgattccaaaatttaatcattgaatattttagtgtcctttttatactttttgaaaaattactatttttatttattccaaacattatctatgtgatatatatatatacatgcataataataataatttttatcatgagtcacatattatttgcattatatcctttgatcaaaataattcaatttctttgtccaaaaaattaaaaattaatatactattcttacaaaaaataaataaata

SEQ ID NO: 325668 - DNA, 630 bp, Cannabis indica
tttttttttttttgctttcttttctgaataattttgttaactattgattactttcgtttaaatggggaaggaccttttacttcaaactgcacagaggatatgaatcttacaattttcatttgatatttcaatattagattcatcttttttgtttcttattactcttttccgacttcccatcatttaaacacaatttttagtaagattatatatcatttctatataactacattgcacttgttctcatcatctgctgcaaaatttataattttataaaataagttacacatttgatcaaaacgatgtgcttttgatttgttaccacaattgtcatgtcttatttttatctttgtgtgattccttttcacatctttcctccatcgccttaaaatatacttatctgagacatgaaaaattaatttattgtggatgagaactaaaattgcatgtcgatacaagattaacctaaatttaaatagttgacaattgtaattaatttctctacaagcaccacctgtgttgtgtactagggagtgtaattttaattgctttattgtaatacccggaattaagaaaaggattagcaaagccctaattagataattatgaataattgaggaattatattat

SEQ ID NO: 325669 - DNA, 412 bp, Cannabis indica
tttttttttttttaaagaaaaaatggaaaaattaacttagacagttgttgaaaataaatttgaaatagaaaagtcggtatttaaaagtattaagctattattttttttagaaaaataattaactataaaaatggttaataaaagtgttatatgacaattttttttaaaaaaaataaatgttacagtatttagtggtagttttgtgatatttttttaattatttaattaaataattgaatatttatataagtctaataaaagcaaattataaagagaagagcaaaatacaataattttagaatgctatatcactatatgggtgcacttttaatgggtattagcatgaatgggtaaaattagaaaatttaagcctttatgcttaaattttttttatctaattagaaaaatctct

SEQ ID NO: 325670 - DNA, 946 bp, Cannabis indica
aaactttcatatatgcactgatgatggatttgtattttttgtttaaactaaatataataattaattgaactcaaaaaaaaaactataataattaatttgttttaagtgaaatatttgttattataaattaaaacaacaagtcatttacaataatagtgtagataagcggagggatattctccaactagaaatgaacctcatcttcccctaacgcaagcttagtcaatccttggacaattatatttgttgtacgtttaacatgagtagcagttcattagagaaaaatgatataagactaaagatatttacaatcaaatcattaaaagaagagattgaattgaagggaactcgcaaagtagaagaaaccataagtgcatctgtctccatttgtgcatctgtctccataagtgcatctgtctccatttgtgcataagtgcatctgaaattgccaatccgaagcttagatagggctgcgacaacctggccattagagtcccgaataacaacaccaacaccaacaccaattacattttgcggaacgtccatagcagtgtctacattcatctttaaatcacccatttcagtaggtttccatggggtaggggcagcagcaggaggtggctgtagtggcaggtgttgttgtatggtatttgtccctagctgatctggaattgcctaaataggttgtggcaaaagaggcaaggtcttttgttgattttgctttttgattgtgtacaacttgattccgtttagtccagattgactaaattgtgcaaaaagtttgttccatttaaaacttggagtacattgaagataaatgaaacaaatagtcacatttacacatcgaggaagataaatgctaatcaaagatcatactcgagttacgccatactgctcgggcatatttacaactaaaaagtgtctgtccaacatattcccatacttg

SEQ ID NO: 325671 - DNA, 2114 bp, Cannabis indica
ttttttttttaacaaattacattgagaatttttatatgtaaatattttaattatgtttaaagtttaaatatttattaaatttttcttagaaaaaatgccccattttgaaattttgtcctaggcccctaataggcttgagacgactctaattatataagacctgatatttaattgcaccaataatgatattgacacgtaggagagtgctaagtatcaaaaggagtgttcatcaaaccactcaaaccgtccgcactgcaaaaaaaatacagttggaaatttttagcagtgcagtcgcgatttgaattttttttaaactgcgcggtgcgtgcggtttgtattttttaattgttaatatgcggttcaaatcgcaccacaccacacattataaaatactaatttttatatttatttaggtccaatatgtgaatgtccaacccaaatcccactaataattgtattgttgaaacttaatttttttcatattattttcaagccttatggtatttttgacaagtgttgcttaagttttattgtacttgtgataaattaattatttggtgatagtccaaactgtaaaaacagcaaaaaccgcaccgcaccgtatcattttttacaatgcaatttctacggttttttagtttcacggtgcagatgcagtttgaaaaattaaaaaaatcatagattaatttgaaaaaataatcaaaaactgtaccactcacaccaaaaacaactctaagtatcacggtatcttttagtatttctcatacaaaaaaatattaatttttatattgtattaaattttccataaattcgcacactactgaaggaggacatttatgagtctattaccaaataacttcttaagatttacagacataataagtaagtacttattaactattgaaaatgtaataattaagaatttttagttttaaaaaatactactacaaatctaataatttagatctttttaccgaaaataatcccagttttattgagaaaaaaaaatgtagagtgatgtaagacttaagagcatttatagaaaacttgggaaaatacaattttgccaagatacaacattattttagcagtaccaccatttatagagaaagaagtgaatgagtgagtcaaagtctgactcagtcattaataattcagcacaactggatgccacgtggcccccatattgacggcgtcatctgtttcctcatacaaacaaacaaccaacatggcctcgtcagatttgtatgttaaaaccgcgtgaactggactaattaaacccccatgttggtctgagtgggaccctcaattttcgttgtcacgggacccacttggctttccttgtcttcactacactttcacttcaaaggcgtgtttttctatatcggtgatacgtaaattaattataaatcactttttaatttttgtagtaaaaaaaattctggtttaaaaatctgaataagttttttttttttagatgaaatctgaataattttaactatgtaatgcactagacattagagaacaaaaattagtgaaaaagttaccgaaaatattatttttgctcaaattttttatatttttattttaaatatttttacgtttatttaaaaataataataaaaaattacataaaattaatataaaaaatttacaaataatatcaaaacaacataaaaatataatatataaataataaaaaaattaacaaaaatacaatataaaaataacatgaaaatatttaaagattgtatttttaataaataaattaaaaaatacaaaatatttaaaattttgtataactgtatttttataaatttttattgtttttgtatatttctgttaaaatatattgcatacatattttataaaattttaattttaatattataaattatttaaaaatctcccaaaatttattataattgcaataggcactaatataaaagttatgactataatgaatttatgtacctaaagaaaattatatggtactaattctgtactaggctcagccatacttttattagctaaaattagaatctttgtaacaggaaaacttgtaaatagataaagttaagtttgattataccaaacttttgatttttcttttg

SEQ ID NO: 325672 - DNA, 1356 bp, Cannabis indica
ttttaaaactaatgaagtgaattttaaaaaaatatttatcttttattaaaaatccatttagatattaaaaatatatattaaaattgaatttttataaaaattaaattttacaggaacaaatttgagtatattttttttcttaaaaaatgtagatttatttaagtaaacataattttttttagtttaatttataacttttttttttcaaaatattttatatttttattgaatttctaattattttctttgtttgttcatatatgagtttataaatataaataagtttgactttttcttcgaaattttttagtttctttaaattatttattagattctcaataattttagtttgtattttttataatatatgtttataaataagataaagtttgaaaataattttttaggaataatatatggtttttttaagtaaaattaataatttttttattaattttaatttttttatcagtattttttagtaatatgtatttattttttttttcagaattaatagaatattataattaacttaaaaaaagtaaaaaaaatataattataaaattatttttttaataaaagggggcaaaactttgtattggtcaaagttcaagaagtacaaatattaatttttaacggtaaaagaaaataaaatctaatagaaggggcataataatgtaactgttatattttataaagaatttgaataagtgtatattttagaaaataaaatcaggtagtattaaaaatttaaggagtaaaaatactaaatttttttttttttcataattcttatttaagtatacgaatataaaattttagagacttctagaattgtgtatcaatttcaatacctttaaatacaaattttctatttttttttttttaaccttcctgaatgtctttcacgatatatgcaataaataaaaatctcaatttaaattcaaaaaagagtggtgattgaattttcttcacaattaattcattataccggacaaatatatcttgtcataataattgaatatataagaacattgaaatgtaagagcagatgtgaaaagtaatggaatgtggtgatgtgtgatgatttctccctatgataataatgtgaagagaagtgttaaagggtactagtgatgtgtaacatttttttatgtgttaatatcgcttttagtctaatttaatatcaagtcctatatagtttaatatagtaattttagggagtatcgctagcaaatcgcaaatatgatatgtctagagatgctagacactattggtgcctaatagctattggagaacattgtcccacatggactaaatgtaaaagtattgagccatatataagaacatggacta

SEQ ID NO: 325673 - DNA, 2212 bp, Cannabis indica
ccaataaaaacgattacaagcttaccaggctagcttgagtttagtgtggacaatatagttttcactacctagagtggcttcaagcatttttttttttctgatagagacccttgaaattacatcaaggttttggaagaccttagcaacgagccataggaactgagcttcactttagtatcacccatcatccataggcaaatggatagtctgaggggaccatacaaactttggaagacatgctttttaaaatcctaaggtttattaaccagattagaaaatctaaatagattaattatgtattaatgagaaattatattattatgtaatttaatatgtgaaactattctagtttatatcattttaagacctcattggtgtatcaagggcatttctataatattaactcaagatgggtaaaaatcgtaattttatggtatattgtgctcatggactatattattatatagtatgtttattctgtctttctgtaggtattttctgataggtcgaagtagtatagtcacaattgggtattttgggctgaaccgggttcggggaccaaaatttatttttggggtttaattatagaatttatgtgttgaataggaaaaatatgatttatgtgatgtatgtgatatatgtgtgtgagtggaatgtcatgattccctttttatgtgtataagataatatgtgtgccctgtgggcattttggtctttttgccaattacggttatattctacaaaatcagtttttatcattttaaaactctttttttagattaacaaaccccagccgcctctctctctctccttgttaatttttgtaatttcaagttaaaatttaagaagaaaaaccttggatttggtgtatttatgtgcatgctcttacttgaggaacttaaggtagttgtttaaatctcttttccttgtttgaatttctagatttaagaggttattaatggtgttcttggtgtttttgaatattatgagtgcatgtttttctaaatgggggaaattgtagtgtttattgtatggttttgttgttagatctatgctagaatcatcttgatgtttagagatgtttttagtttggttttgatatgtaaattctgggttttatcttgaaatttttgggtttattttgaatttttgagtttcaagcttgaaaattgggtttttgcatagtttcatgattttatgccttaatggtgatttttggtgtttttggagcttcctgccaagctcaatttcatatcaatgcttaattgggttagtattatttaaaattttagttttggcataattttggatgaaatttgatataaatgtggtaaatttttgtgagcatgaaaaattgggaatttttggggctattttctccggggttttgggtttagttgttttgaccataactttttattctaaactctattttggacattcttagtacctttggaaagcgcgtctcaagctctacatgttaatttgtaaatagaatgcaaattatgtatttatgtgaaattcaatttaggattaaccctatttgtgaaatcccaggaacgtgtgactactcccagggatttagaatctccaaatacatagattactaggtaagacagtaaactatcacatagaatttagcgcaatggcgctcatgtatgttatttgaataattatgccaaaaatcaagacttgggttaataccctaagttagccattatgttgtctagagttattactctagaatatatgtgtaacaccctaactaccgtaggcatattacgtgatttttaaacgtactgtgcagctcgttgctaatcaacgaggtttatggaaatcgtgattaattaaaatttttgctttttaattaaacttataaaatatttatacaaaaatactcgggatcccgattacaaaacacacagatactaaaaatgccatgtgagctccaaactttgagtttcaaactcaaacttggctaaagttcacctacaagcatcaaaaccagaataaaactacatattcatgcataataaagcagcagaaaacaatctctaactcatgcaaaaaacacaacaactaattgcgaaatttctactttgaaaaactaaagctttagaactaaaaactctaaactagattaaaaccaaatcaaaacatgcacaaaaacagatcaatccactcaatccaacaactgattaaaacctctgaa

SEQ ID NO: 325674 - DNA, 555 bp, Cannabis indica
attttaattattttttttattccagttttaccggggactaaactcgccggaaaaaataaggcgccaaatgccctaatccttgccaaaagttttgccggcgcattacgttgccggcaaaatgtcgctagggacacatcagtcgacagacgtattgtcgacaagtcccttataccggcaaacaaatgtgccggtgtaagtacttttgccgacgtaagttattatgtcgctggcaaaaggtcattcaccgacaagccattgtcggcagctttgcctgcgagttgcacgtacgtttgccggcgagcttaagcgccggaaaaagtagcttttctcgtactgtgaggacattaccgccattggagtgctactcacatcagccgactcaaaatcaacaaaaggcgattttaatgtcgtggcacgctttctcttatccaatacaggagtataagtaacagtgtcatcctcttctttatcagaagcaatggcagctttcttttcaacaacaacatttggattggaatctagaacctgaaatagaaaattaaaaaataaaaaata

SEQ ID NO: 325675 - DNA, 851 bp, Cannabis indica
tatatatatatatatatatatatattaaaataaaaattgaggcaattaatttctaattttcctaatgcacacataatggttttattctattaactacatttttttcattaatcattttttattaaaatcaatttatttgtaggatagtggaagtcctttaaaatttccctttaaatgcaagcaagtagtcatctaacttaattaaactcttctatttataattattaaatcacttttaatgatctcaacaatacatatatgatatgaatgaaaataaataaataaataaaaagtaaataaatgttatatatgttacatgtatgtacaaacaacttttacagctcaccaagcaagataattgtggaatttaacaatttttggttcacttttcttgaagtccacatccatattatgttggcataatgaaaggctctagaagtagttttaatcttgtttgggtaatatgtgagtttcagctttagctccaaaaaattctttttatgaatgcccactttagtaattttatcagtataaagttaaaagtagaagtagcctagccaaacatggccatagtacaaacacaataagagcttcaacaatggagttgcttgaggtgtgactttttatatagctgagtgtaaatgagatgagatgagatggagagaaaaaaaattaaaatagagtccaactagctacaactttaaccatagtttgagcccagatggaattggggccgcccgcactagatgcacagcggcatgagaaggaaatttgattgtatatccactttactttacttgttttaatttttacctttatttttatatcctttaaaatatatccacttttat

SEQ ID NO: 325676 - DNA, 744 bp, Cannabis indica
aaattgagactgacttgattttttttataacaaattagagattattcttgaataaggtattcttaaatagaggttcttctgtatataatccaattcaatattatacaatacattacgacctaatacgacgttctaaacaagtcctaaccatcctatattgcattaattttttggagaattatctcatatacttttttttttcaaatttacagtttgagtttttaaaatggttgcagcgctagttgcaataggggtttctatacgattttttattgcgatttaagttgcactgttagttgcaataaaaaatttttaaatcgtaataaaattttttatataaaattctgtaaaaatataaaaaaaaaaattatttaaaagtgtaaaaatgaaaaaaatcttaatttttttttcaatgaaaaataaaatctttaacttgtatggtaaattgaaatttgttgctattgctgactctgcagtagcctaaatctttttcttgctttgattcgacaaaattggtcaggaatagccttttcttaggcccgaggataaggtatatttgttttgttttttttaatagatttatacatcaaatccatatttatgcataatacacataaatgtaaatatgtagtatttatttttttaattgtatattttatacccacataacatcataaaaagaagataaatttatgaataattatctttttaccccctgtacttatgacactatactattatgcc

SEQ ID NO: 325677 - DNA, 1177 bp, Cannabis indica
tgatgctctcatctcatccaactgaacactcaacactttcaacctgccaaaatctagtttctaactctgtcagacaacttgtagatgagagacaccttctatagtgatttcaaccctccttcattgttcttcatatccgaacccttagtgatagagtgccatgcccacacatagcaagtcaagtacacaatcatagtgagtaagacggcggtaaccaaaccggaatgagagaaagagatctaggctcagatcttgataatactctgcaagagaaaggaacaagggttagagatctaagcgaaatgaatcattatatttcactgcaaccaatgtaaggttttctaaactcttatgtgtttaatttcattattttagagatattcatatttaggatgttaatcaacatacttgttagtaaatctagatcctggtaaaatattcgcaacagttccctagtcccaccatccttgtttactgaatcactagggtagtttttccttcccctaggctttaagactttctttccagtcccttttggcgtaacatggcctttctagacataagggcgtctgagcccggaggcatcggtggccttctacgcatgagaaggcctgtttgccagatttgtgttttttcgaggtacgagagatgtagagttttgagggtcaccttctttagccttacccttgtcctatacaggagtagaggttcaatcgttatcagggtgtcccctattatttccatagacacattcctctgagggttaatctccctcgtctagatctccaaactttgcttggaggcaagccataattttctcaattctctgagaagaattttcttgatggctaacttttgctttatctcgagcaacactttggacgctcgaactacttaagggtcatgctcatagtggtagccatccttgtaatatccatctttgatgtattctccatcatcgttgtaaagaccgcttagcttaaatttggaaattagcagataattagggtttaattatgaaaattatttattaatattgaattaattatttatgatgatttatttgaattcagaatgcattttatatgtcatatatagaaatatcataattttgcatatttagtgcccggtaacattggaaggcggtacttggctattagaatcacatcctagtatt

SEQ ID NO: 325678 - DNA, 1294 bp, Cannabis indica
tccatagacatagtagcattaggcacaccttcgggtaattgcaaagccactgcaatatccttgacggtaaaagaaaatcaatgtcccctaacatagtctttaccaaagaactcagaattctcatcaagcatgtcattagtcaaattggcataaaattctttgacaataatttcaatatacccttgaaaaccactgagagtattttcccattggtggcattgaacaaacttaacaataccatataccctatgagcatgaaaatcataatttctttcactttcaaactttcgagtagcataaatattccaatcacgctcattatcacgaggtaaaatcaatctctgagagcttaagatggagagatattaccaggtgaagaactcttcataggctgcttgcctttggcagcagcagatgccttggttgctgaagatcctcgaggaggtgttggagtagatttgggcaaaggtgactcgggttcgagttcagtgtcttcactgtcagaagaaactccgatgtcttcaggaatctcttattcagaatgcagagacatggatttgttctcacaatcaacagagggatcctgcatgggttcctcttcttcagaacttgaagaaattgaggggggattcaatttcagcttcttggctggaggagctagtttgtcatggcttcgtttcatgaaaatttccttctcgatagatgctttctgggcacgactgtgagtggaaggaccagttggagttgatgtagcaactcccttcactattgcaggaagaagcgatatagtagcaggtggaggagatcccttcaaatatgaagacgatgaagtccaacatttgtagggtcgcacagattttctaaccacttgtttagggattcttttcggcttgggcttcacgggctgagattcacgctgaggaagcaatgaatctcctgggttcgaagcagttgcagcagcaggcagcaaaatcggagtagcaggaggagcattcgagggggtagcatcggattcttccacccatttttgttgccctaaattctttgttttagccatggtaatctgaaagagagaatgaacaacatggaagcaagaaaacaaagaaagagaatcatgtaggtggtgagaataaatgacaagtagttggtttaaataatcatgtgagagagaaacacaaaaggaaaccaatttcaaaaattgagtaaccacctccccacgaacaccaaagggaaaccgccccactctttttccaaaattattttttaacaaaaaaaataaaaggaaactagagtt

SEQ ID NO: 325679 - DNA, 1777 bp, Cannabis indica
taaatatatcacagattcaattaattactacattgtaaaatttgtcacaaattcaatgctaagattattaaaatttaattaccaatctaatagtgcaagatttattattattattattattattattattattattttggcttccacttgaccatttacatatggtctggccacgattgagaaactttttataattctgcgttgaaaacaaaaacccatgaaatgcacactgtcaaactgcttcccattatcttatataattttatgtggaagtctaaaacgacacacgatgtttttaattacaaagtccaaggcctttttggaggtgaccgtgttcataggttctgcttctacccatttggtgaagtagtttacaataactataacataatttactcccctttttccagttggaagagatcctactaggtcaagtccccatactgcgaaaggtgagggactgctcatcaaagtaatttctattggtgatgcatgcagaaccttttcatagtgttgacattgttcacatttctggacgtattcaatgctcttcattgttggccagaagtacccttgatgaataatcttttttgaaaggcttggtctagaagtgtggtttccgtcccaggggacttggcaaatgttgtgacttttgaagctttgcaaaaattctcttgaccgtatcacattagcagccattttctcaccattagcttagtattgtccagatatttggtttaccactaacaaagtgtcactagacactttagtactctgggtccttacttctttagccaattgtaggctagccatcatagctttgtgttctgcttcgttgttagaggagggaaactcaaagcagagagaactttgaagttgatgtccttgcaaagaaattagaatgattcatgctccgactcccttttcgtttgatgctccatcaacatagaccttccaaactagtaattctaggattggctcattttggtgatcattcattctagaacactcaaccacaaagtcagctaaagcctcccccttgattgaaactcggggttgatactagatgtcaaactggctaagtttcatggcccattttagtagtctaccgaatgaatcctatttttgtagcaactggtggaggggatgattggttaataccttgatgacatgaacttgaaagtagggcctcaatttttgagaagttattagcaagtaaaaggacagtttttctatcattggatatctagactctgtgcctagcagtctttcgcttatgtaatataatggcaattggacccttctttcttctcgaactaagacagcacttacgacatgattagacactgccaaatataggtataacgactctccctccaccagcttagataaaattagagccttggtcaaacattcttttagtttttagaaggcctcttcacattccccaggccattcgaatttcttattttcgtgtaagatgttgaagaatgggatacatttgtttgtagacttggaaacaaacctattgagtgtttggttttgtaccttaaataaagcatatttcaatataatcaaatttactaattaataaagatcggaatttattctatgttgcatggttcacatgatttatttcatgattatctttaatgtataaattctattaagtccagaatatatatttattcatgattatagtgtcgtcagcatagtagaatataatcatgattatatgttcaaaagtttaattctcttgatttatcagttcactgga

SEQ ID NO: 325680 - DNA, 1019 bp, Cannabis indica
attctggtaaaataatttctaacactccaaaccctataagaaatagtcattgcaataaaaaataaattaactacacaacgttataaatactattacacacaaggggcaagaaggtatataaaaatacttttaaagggacaaggactagctatccttggtcatgacaagagtaaaataatagtgataaaaaagaataagtatgctttgagcaactccttacccgaagacataaaaaagtcttgccagctaaggtacctagcagcaagagggtcttgaaagatgctcaagagaaacagtaccataaaatgagatggacacttctcaataaacattcaaaattgtgcgaaagaatataaccatacataagaggttgagacaggttcatgtatcccaatttttggcctcatgacgtggcatgattaagtggacaaactagtaccacatgtcattacagctcactaaaggaaggccaattcagcaccgagcaaaagaaggccccaacactcaaacatggatcaagtgacagacgagctcccttttaggagctggccagccacctctggctggccctatggctgggcaacctagggatagtaccatgaccgaccaacatggccaccacaggggcgtaggcggccaaggagtactctataggccttgatggacacttccacacgtggccattagtaatgagctgcaaattggaccctaaacgtccaatagaattgctaaataatatctgaaatcaagggaactttggcctttcataaatatctaacaaactatacgaatgctaagggatttgaatggtaaatatagggtttaaggcctcctatataaaggccttaacttctgactgaaaacctaagttgcctctaagctagaaacccgatctcaaattctaagtgtttgataaaccttctctttcttcttcattctctctaacacgcctaccttaggttgtccaacacttgagtttttccaagcattgattcatacattgtaatcctaagggtact

SEQ ID NO: 325681 - DNA, 621 bp, Cannabis indica
tttgatagtcgctttgcgacctgaaaaatgtgtattttggaatattacttttaaaaagtttgaaaacgggatcccgacacttgtaaatattttaatatattataaagtttattaattaatataaaagtttgaatttgacacgtttttcaagaaaactcttcgattagcgaagattgcactgtaattgaaaaagcactgtagcatgccttagcattagggcgttacagctaatcagacaatatttctctactcaaacaatatcgacaacatagtggcttgagcttagctatacaaacatgagcgtccacagttcacactttgccttacgatgattaaaatgcccgcgttctcatttcagaaatgctgcaatagaatgctgaaatcccaatctcaattgaggggtgcatatatgctagggaagtagaaaatatgtttcgtccttggtctaaaaacctaattttaacatccgatgtaacttttattgtaatatcctaataagtctaatggtaaataattggggtttataattatattgtgtgttaattaggtaataagtgggattatgatcctactaatctatttcaacataaaatttaaattttactataagtgagtaaataa

SEQ ID NO: 325682 - DNA, 1470 bp, Cannabis indica
aaaaaaaaaaaaaactcgtttggtacgccatataaagatcgtattttattaaataataaataacacgatgtttagataaaacaatatattgtattaattattacgaccaaattttttaatgtacaacattgttgtattatttaatacataacaaatgatctgtattagcttgtattatattttttataaagattcgggtcaacaccaatctccgacccgggacctagaatcggatcccggactcggacctggaacaggacctagactcggacccgaacttgcgaccgaacccaggacccagacccgggacccgaacctggacccgcacacggactcaaacccggacccagacacagaatctggacccagacccgggactcaggagtcgaaccgggacccggacccgaactcaagactcagacccgtagttggtgttggatcgagtgtattgaaaatatattataactttacacaatctattaataaaagtcaataccaaacatagtattgtattaaataatactaatacaatacaatacaatacgacgtaccaaacgagccctaaatgttttggtatttataagaatttttagtctaaattttttcatagtcatgtacgttatagttatttaacacatcctataaatttttgagaaatttagaataatttacaatatataaattaatgtttaaaccgtctatttcacatgcgtataaaaaaaaagtcaagcatgcaatagactctttaaacattgtttttaacgtgttaattttttttttaaaaattctcaaaattttatcaaatgtcttaaataactataatgtatacgaccataaaaaaatcagactaagtagttttgtagataccgaaatagataagggtgcctcgatacacccattttaagggggtgtattgtagaattttttcctattattattttttgatctatttttgcaaaaattattaatgagagtatctgttttgttaaatgataatttagacactgtattttttaaaattatacaaaatagatcatgaacttaatttttgttggattaaaatttagtaataactcaatacgaaggtggtatgaccaaattgattacaattttcgcatttatgtgctggaaagtagaaagtagaaatataggatacaaaatagtatttatcctattttaaatatatctatgttatattaaatgtgttatataataatgttatttatttaaaaaaatattacaatttaaatttaaacttactacacatatctcatatattttattttaaatatttttctattatcattttttgctcaatttacatatctaaaaaaatatttttttttattaaaaaaaaaacgaaaatagaaaaattgtgatattttaaaaaatatatataattaaaatattacggttaaattaaaacggtaattaacaataaattttaaatattattataattttttttta

SEQ ID NO: 325683 - DNA, 443 bp, Cannabis indica
ataataatcgaacaactaaaatagatataaccaccgtaattacatatttaatgtaactattataatatcttccttccctatatattaatattcttgattaaagccttcattttttttgctaaaacttaattcttcaccagattttccaattaggtcattgatttttggagggagcacaggaaaaagttttaactatcttggagtcttttggatttctaagttcacactaatccttctaaataatccatcaaaataataataactagccttgatatatataaatactagttaaataataataatctatgtaatattttaagtatttatttgatatagtgtacacaatattagattatattttattaaattgtgttatatattatgggtgcgtttggtaatacttttttaatcagttttttatttttaaaattatattataaaaa

SEQ ID NO: 325684 - DNA, 658 bp, Cannabis indica
ccatgagccgaccaactcatggtttgcccaccatgaaccgatcaacttcagggaattttcccatcaaccagccagcttcatggtcaaccaccatgaaccggccagattgaagctctgccctagatgaattggccaaggtttttaaatggagcaatgaactgactaggtcctcttgaaagaattatgaaccagctagggttcaaacagaccccaagtgtcggctaggttcataaacgaatcaaaaaatgtatttcatgaagattcaaactactttattcgtgttcttcgaacctttaagatcaagatgtctaaataaagatcaatattcaatctttttcatcaaggagttgcacattaaacatcctaaagctatgtaacagattataatgcgtaaaaactatcctaaagattcaaggagttcataaaatcttgaaactcaacaatggcagaagtttaaagaacaagaaaaagagagaaagaaaggtttgaacttacccactgggaataagcaatgaggatcgagctagtccgcgtgccaagtgtggatgttagaaactcgaaaatccaaataactctgttaattccacttttgacatatttaattgacaaaaatattttattatttcctattaatttcggctggtatgtgtttaatatg

SEQ ID NO: 325685 - DNA, 632 bp, Cannabis indica
tcaactatgggaagtcttccatcctgttttcacccaacactcatccctttttttccacatacttttttgaaactttggggatgcattctaaaccgttcataagtaaatatcttggggtccctcaaagttttggccgatccaaaaaaagctagctttgattttattcttcatcgtgttagtgcccaccttaatgtttggaatggtaaattattctctcgggcaggtaaggaggtgcttttgaaagctattatctaggtcatcccttcgtatgtcatgtcgtgttttaaacttcctatttccatctatcataaaattgaaaatttaatgtcccagttccggtggggttcaacggggaaaggctccaaaatccattggaaagcttggcatcatctctacatgatctttcagctctttcagatgttgtagacgacattagaagctctttgtctcacttccctgaagtttgttttagacatgcatgtagccagaagttgcaaccaaaatgctcattgcctgggtaggaaagctttagggctagataaagagttaagctggaatgctcctgaccaaaagccaattgtaatggggataatttgtgatatgatgttggcctaatgcgtacaagtgccaca

SEQ ID NO: 325686 - DNA, 961 bp, Cannabis indica
aaaaaaaaaaagactttatttcattgctttctttcacaccaagtttttttttggttgtcaaaatttcagttcagatttttcttaaaattccaaaaatacttttatttgtattattatctgtaaacaacaaacttagcatccccatccatgattgtttgacttatttgttcctaagataccggaagttaatttcttgattagtttgacttaatagattatattataatttataatccctctctttaaaattacataaaaatatatatggtctggtttatacatgaagacttagtactatatatatatatacatatattatttggggtaagaacaactcaaagtttgaacttttaaacagtctctctttaatcttataggtaaaccagtttagttttgcaaccattttcttcaaaccaatctgatccatatgttctatataataatattaaatattttaaagtcaaacccaattggctaaaatataagttctttgagtgttaataaaaaattgggattaaatagttatagaaaaaagaaaaaaagttattttatgcttagattctaagggttatttaatcaggaccacaacattttaattatgcttttaaaatcattaagaaaaaaaaaaaaagaagaagaagctaataatggaaagttcaaagcttgaaaagaattgaattgactttttcctttttcttttttaaagcaaacaattgagttgactttgaaaaggcttaaggaatagacattggacaaatcctagtttgaatcatttgtaataattttaatacaagaagaagaagaaaaaaagttagtatttttctcaaagatttcaacacataattgtttacagtacacaaatatttttacaaaattaaacaaaataatgttcatgtaaattaattcatacaagctattgccatgcaataccaactgtttcaatttctttcttttttttttt

SEQ ID NO: 325687 - DNA, 1337 bp, Cannabis indica
actcaaattttaaatcattagatgtctatagaaacatgtattattaattaattttatttttttaataaattcaaactagggtctatattaaaattacaattttactaaaattaaatacttatgctgctaaaaaaatcattagaattatgacggttataaactcaaaatttttagtacttatatatgtcgcaattatcccaaaattaaatataattatttgttattttgtctctacaaaataaatttattcacactttggccccaattttcgattcctccctctgatagtgtacgcactactatagattgattttgaagcaccatcctaatttttaattttcgacgctgaccccgatcagcaacatcagttcaacttaacatgtccaacatggggggatgccattgaggtcgaattagctcgagttaggcaaagcaatagttctagagggtcggcaaagataaatgtataaagaactcaacatgtatttccaaactctctcttgatttcccttaatgagcccaaaatcatggaaagaagttgttaatacacaccgcacaactaagtttaatagagaaatcccattttaataaggataccttttaggtaaagatcataataatttttgagaaatcccatggtggaaaattaaatgagtttggaataagagcattttgtatgaggtggcgttttataaatagtacatcgattctttatcatcattattaaagtaaaataaaaaaaaaattaatattaaattacattgataacgatatgatgacacctcacaagaatgtgagacaccatatactttctaaaggatttctgtcgaattttattaaagaaagtctgatatcagtagaagtttagggaatacgatttagtacatatcaaagttttagtggcacaatttgatgcatatcaaagtttggtgtgcacgatttggtactaggacaatcttcatgttagtaaaattgaattgaattggatatgtcattaaatctaaacaacttcaatagttcagattggaaacataattttgtacttacaaagaacaaaaaccgtaattagcttagggaaatttgattttttatgcttacatttggttaaaatttttttctaagcaataataactaatatttgtaaaatatgacaatttttatgatatccctaaaatacccccatttacatcaccccatttacaccattggaccacccatcgggctacccatcggatcatccatcgggccaccccatcgggccaccatcggaccacccatcgggccacccatcggacccatcggactaccatcgggccaaatctgctaccatttttttt

SEQ ID NO: 325688 - DNA, 397 bp, Cannabis indica
aattttcgtaaaaatgtaaaaaaaaactgtttggagtgtaaaaatgattttttttatatctgaaaagagtggttgataatatcagtgtagcggcacctaatttatggtcaagtcaaagaagttaaaataaaaacattattatcgttatcaaatcacaaactatatacaacacacacaaagtataatataattggtcgacatttgaggagccgcaaaattgcattaaattctgatgatagccataactacacacataccattcaaaatatacattttttacacacaatttaattttgtataatagtacagcactaaaaaaattattctaatacttccaattttaacatttaagaaaatttttaagtttattattttaataatattatagttatttgta

SEQ ID NO: 325689 - DNA, 2526 bp, Cannabis indica
atgaatgctttaaaatcctcagaaaatacaacatgaaactcaatcccttaaagtgttcctttggggttagctcgggtaagtttcttagtttcattgtcaatgctcaggggatagaggctaattcagagaaaatacaagccctcctggacatgaaattgccaacaaagacgaaagaagtccaaagcttgactggtcagatagccccacttagcaatcgtttcaaaatcaacagattagtgtgttcctttcttcaacatcctctgaggtaataaaaagtttgagtggacagaggaatgcgagaacgccttccaagaattaaaaagacaacttacaaagcctcccgtactctcaaaacccctagatggagaagagttaggaatatacttggctgtcgccgaatatgttgtaagcgacatgctgataagagaagaaaacaacgtctagcatccagtctattatatcagcaaaagactcgttgaagctgaatgacaatatcccttaatagaaaagctcacttactgcctgatcttagcaaaaggccctatttccaagctcacactatttgagtatacaccgactaaccattgtgccaagtattgcaaaagcctgatgcctctgggcggttagttaaataggcaatagagttgggtcagtacaaaacaatctttcaaccctgtaccaaagttaagggacaagccttggcagactttgtagtagagtgcacaggcaaagagaaagcaacataacggacatcccggagccagtacaagagtccctggcagaaaacaacgaagatagacataccttaaaattgcacgtggacggatcagccacataccaactttttggtgcaagaattgcccttgtcacacctggggagcaacacctacatgcaaaaataaaatttgggttcaaggcctccaacaacaaagcagaatatgaagccctcatagctggactaaaacttgctcgggaagtgcatgctgagtacattgaggtctgtactctgtagtgattcggagctggtagtgagtcatgtttcaggagagtacgaggcccgaggagagaaaatgatggccaatataagcaagatacaagacctactcgcacaattcaagggttacaccctcaggtagattccaagagaagaaaatacaattgttgacgccttagcccagcttgcgagcagcatagtaacagataaggccaacctagtcccaatctaattcttagaagaacccaatatcaattgtgctgaagaagtcaaaatgatagacacaacaccaaactggatgacacccatagtagcctacctcaacactggagtacttccaaatgacaggagcgaagctcggaagatgatgatgaaagctgcacggtatatcatagtagaaggtgtgatgtatagaaaaggtttctctattccattacttagatgtgtaacaaaagaagaagttgcacgactccagtccgagatacatgacggattctgtggcaaccacgcaataggacaaagcctatcaaagaggacaaagcctatcaaagaaaatactaaggcaaggatatttctggctgacaatgatggaagattcaaaggcctaagaaatatgacaaactccagagatttttgaagatcacccgtgcactgcctaacgagctaatgcagatgcaaagtccttggcctttttccatttggggaatagatctgatcagacaattgcccaagggcaagggcagagtacaatatgcagtggtcgccgtgaatcattttacaaagaggatagaggccgagcctttagcaatgatcacttctaaaaaagtactagactttgtggtgaagaacataatatgtcggtttggacttttgcacaagatcgtttcggacaaaggcaaacagtttgatagccagatgtttacaaatttctgtgtgacacatggaatcataaaaagtttctctacagtagcacacctcaatcaaatggtcaggtcaaggcagtcaacaagacaattaaagacaccctaaaaaaatgacttgaagaagctaaaggaaactggccggaggaactactagaagtattgtcgtcataccaaaaaacagagaaaatagcaactgagcaaacaccatttgctatggcctatggttatgaagccatgttgcccgtggaattagagcctctatcccacagaatattaacctacgatcaaggagctaatcatgccctcttagcataatcacttgacgagattgaagaaaaatgaacctcggcaaacctaaagctagtggctcatcagcaaaaggtagctcggtacttcaacaagaaagtgagggcaagaaatttttttgtgggagatatggtcctcagaagagtattcctaaacacaaaagatagtgcggccagcgtgctctgacctaactgggaatgacaatatcaggtggtcgaagtcacagacaatagagcatataagtgttagatatattttaccaggatctagatttactaccatgtatgtttcattaacatccta

SEQ ID NO: 325690 - DNA, 605 bp, Cannabis indica
acaacacatacttactaatggtttagaaaatttcattacgaaaaaatagtcaaacttatagaattgataaatggttaaatactttagtgaacttgagcttagtacacaacttcacatttactcaccttgaatttagcaaaaaagcaacaacttcctcaagtgaggtttttctctttcttctgtaaattccaaatatcattagcatatagataattttatttcaaataaattaaaaaagttggttaaatttaagagataaatcaagtctttgaggcatgagagaggttggtttcctcaactagaacctttctcgtcttaggagaattgagaacaagtaactcaacagactgcaattctccaaacacttgcagctcttagacataataaccatagctgaattagtaaaccctttggagcatttttatcaagcaattgtaaaatatctttcaatcacagagttctatgttgactatgctcatttagattgtagcctttttgaagaggatttgaaaagcactatgttcaatgaatgaaatgatcagtcatttgtgtgctctagtaattagtatttttcttattttggtttcacttttattgtatccaat

SEQ ID NO: 325691 - DNA, 608 bp, Cannabis indica
aaatttgggttgtgggggtttaatgaaactaaaacgaaagtattgggggttttgccgccatttacccaaaaaaaatatgaaatgatgaattgtcaaatatggggtaacatgtgattacaaaataaatgtaatattaattttttttttattttatttgttacttttttaaaaaaaaaaatgtgagctgccaatcatgaccatgaacatcacatcaaattatttttaaaataattaatcaataaaaaaatagagagggcatgcaaaaataacacgtggcgttataggcagtacaaaagacaatataaattgtatagtatttttgtaatttcttctatgtggcagtataaaagtaataaaataccaaaatactgtatactattaaaaagccccctctaattgaaggcccatagaacttcttagcaaaaaaagaaggcctgtagaactagcagtggcccgttaatgaaatttctactaagggcccacttcagttttggaatctcaatatgtagatgtagatactagtagtggcccgtttgatatgaaattgaagctaagggccgactttagtttttgggcttaacatgaatgttgtaatctaaatatgttga

SEQ ID NO: 325692 - DNA, 1203 bp, Cannabis indica
tttgaagtttgatattccagaaagagtatggacaaggaagatgtgtcatactcacatctaaaggtgttcgactacaaggcatttgtgcatgtaccaaaggaacaaaggtccaaacttgatgataaagtagttccatgtatctccatcggctatagagatgaagaatttgggtataggctttgggatccagttaacaagaaggtcataagaagcagagatgtggtctttaatgaagatcaaacaattgagcgcaaaagaaaaaaaatgttaattagaaaaggctgaaattgagttatttcctctaaaacaacaatggtcagatgatgaattgtaagaagttgctgagatgacccatggtgatgatagtgatgctgaagaagacgtaccggcacaagaagatatcaatcaaggggagcagtaccagcaaccaaaaaataagcaacctcgtaaaaggtcagctagaggactaattccatctaaaagatatccacggtcagagtatatccttttatctgaaaagagggagccaaagaactactaggaagcattggctcacaaagacaaagataagtggatagattccatggatgaggagatgaattcccttacgaaaaacaacacctatgagttggtaaaacttctaaaaggcaggaaggccctgaggaataaatgggtctttaaatgatggacatgtaaacctggtaaagtacagagctcgattagttgtcaaggattttgtcaaaagaaagggatcaatttcgatgaaatattttctcttgtggtgaaaatgtcatcaattataatattctttggactagcttcgagtctagatcttgagattaagcatatggatgtaaagactacatttcttcatggagatttagaagaagaaatttatatgcagcaacctgaaagttttgaggtgaaaggaaaagagcatcttttctgtagactgcgtaagagtttgtatggtctaaaataggctccaggacaatggtacaagaagtttgattcattcatggtggatcaaagctataagagattagctgcaaatttatttgtatacatcaagaaatttgctaatgagaaatttgtcatcttattactatatgtcgatgacatgttaatagtcagccaggatggtaagatgataaatcagctgaagaaagaactatcaggagtcttcgatatgaaagacttggg

SEQ ID NO: 325693 - DNA, 562 bp, Cannabis indica
agagtgttgcatttgatttcatttttcactaattctaacaacatgttagactacaattggttggtattgatagttcagtcattatatagtctttatattttgtctccttttttcacgacgctccatattgaactacacacacattattgagtatattcctgtaaaatattatagataaattgttaaaaattttgatttattaggaaattgatttttttttgttttattgtaaattatatatttttttcattagatatgtaagaaatcagtttttatgtatttgtttattttgtaataagtctttattttgtttatttttaatagatatattatagtatattatagtagggattgtctactgtgccgcttattcttttttcccaattttttccaccaattatcaagtataattttgagtttcactttaatacaatgcactttattgtaggtaattatttaatttattttattattttaataatttttgttgcttattcttttgttctttttcaataaataaatttttagatattaaaaaaaaatacaatttttaaatgtgtgc

SEQ ID NO: 325694 - DNA, 336 bp, Cannabis indica
aacaacctttaaataatttatttcacacgaataaaataaaataatttttttgcaaaaattaataaattgtttgaactttatttttaataaacataaaaaaaattatggaattccacgtagaaactcacatagcaaccatcgaaataatttaaatcgccactaaaatctacctaacaaattatataaaaattattggaacaacaacttgaacaactgaatctgtaaattttaaaaaatagttaaaatattgtagggtgattctataatgcaccccttagaatggatgtattgatgaaccctctacttgtttcggcatctagaaaaaaaaatttagtc

SEQ ID NO: 325695 - DNA, 915 bp, Cannabis indica
ccataaatttgttttgtaaaagtgaaaacccaaatctaatatcatgaggaaatggaactggatgagtggtttctttttctgatcttaaaaagtattaattttattttttcttgaaactatgacaagttaatatgcatcataaagaagagagttatgagatcttaaataacagaacaacgataattttttctcaggaattggtacattcagctttgttgttctaccatgttttcaaaaatctcattatggcattattacgaacatataatggccagtgacaaaaattaaaaacaacatttctattttttttttctcccttttccaatattatccaaatgtaactttaatcatctaataattagtgctccaatttataataattactgcaaaccataaaggacttgccaaatcataataataagtgcatttagactagaaagagagaaaaatgagatcaagagcatctactctttctcaatgtaactttaaacactaaatcaaccatttcatagtccatgatcacgaattcaccatccagtctctaataaataaataaaaatttgaatgtgaagccacttacaagaatcgtcttcaccaagaccaatcgaaaaccaatcaaaagctgcttaaatacatacttgttcttttcatcttaatgtacattaagtaaaaaccaatcgaaagctacttagtttttaaaatctctaatctgttagggttataaaacacttaaagaaatatataaatcacagatctaaacatattccttaagtgctttaatatagaaaacgctaaatcataaatctataaagcctttgctaaattaaagaagaagatgatgataaaagatcagcggaagcactaacctgaagccattgttggaaattgcagagaaggttttgatcttccaagaat

SEQ ID NO: 325696 - DNA, 805 bp, Cannabis indica
taaacttcaagatttaaataatgtttagttgggatttttattgtttaaaaatttgtcaaagtttacattttgtcccaaaagtcgtgctttataatcaagagtgattactttctaaaaaaaaaaattgaaaaattaaaaaaaaaaaaatgtgaaactgctcatcaatgtcgcggcttagcaagaaatgtcgcagcattcccttagtcgttggaattggaagaaagaaaaacaggaaaccaagaattagagaagtaaaatataaattggaaaaccaacttagaacgtaacatcgggttgaagcttcaagaaaatgatttggcaataatcttgctcaattcattgccaaagacttatgaggattttgtagacacaatactctatggtaaagagactctcaccatgtctgaggtaaaatttgaactgagttctaaagaaatttagaagagaactgatgacagagatgatgacaatggtgaaggcttgtttaccagaggaagaccacaaagcagggataacaaaactcaaaagcacaagaacaatgacaagaaatgttattactacaagaaagagggacctttcagagatgaatgtttggcttcaaaggctaaacttaggagcgaaggcaacaatggcaaggttagaggagatgcatacacggaatatgattctgcagatgttcttgttgcatctaatgtggattctggataggaatggatgcttcacttagggtgcacatttcatatgtgcctattagggctgtacaaaaaaatttgtaaaccgccaaaccgataacccgccaaaccga

SEQ ID NO: 325697 - DNA, 460 bp, Cannabis indica
gataactaatctgattgtaaagagttttatttagggcataaaacccaacacgatcgaaatgccatggttggccttccatgactctacgacggtcaccctcacaaccaaactgaaccaggaacatgccggagtggtattcagaaaaagaaaaagggcagcgggcaacccaagcttctttcatagctttttgaatccaatcagctttcaaaggtttgggggataaagtcttaacaaccaaacagaaagagtgggattggggttctgggtgaattgacacatggtcgaaatcgtgaacgagggcttcttcctcagtgagttgaagagagtgggtatcagagtagacatggtaatgagcaaatatggcataaaacagagggtaggtgaggagaataaagctgatatgggataacctgaactcaaactacacaaccttaaatagaaagagaaaaaaaaaagaaaa

SEQ ID NO: 325698 - DNA, 2123 bp, Cannabis indica
agggtaaggcattagctgatctgccatgagtttcaggagcagacgaagaatgtacatgttcacgccacttcagaccaagcgggttatgggtctaacagtgttgacttttgtattctgttttgccgcttaggtcggctagtaagaaagaacttgtaataagttgtaaatatttttgggatcccaactattttgaaaagtttaaatatattacaagttttattttcagtctgtttaatataaaagtttaaattctgcgctatttcaattagtaatcccgactaggggattagggttcataaacagttttggggtagcgtgcctaattctgcgctatttgttatttggctcaataattagagtcaaactaatatatgggataaggataagttagaatagatcaaaaacaaagttatatctttgctttttttttttctttctccttattcggcctcaagagaaaccagaagaactaagggcttcttcatcaaattttaaggagattcaaatgaaatttaagttgtagttcaaaggcaaccctagacccctcttctccctaatcttttgaaggtttttctttagttttaagaatgtaatagttgtgaattagctatgtctgaaccctagaagttttgcgatgttttaagttgttttaggtttaagtgagctggttttggtagtttgtagagtttttgagcaagtttgagttcaagaactcaaacttggcccaataatagtcgatttcttttctgtatgtttttgctgctgctattgcttgaaaaaattatgtggatgttcaattaggtattttggaaagtttggctaagtttggggaagttttgagcaagtttcgaagctcttgggtttttctacagaaaattagttaattatttttccaagcatgaccctagaaaatggtttactggaaatttggttactatttttagcagttttgagagtcttagttttttgtttcctcgatatttagggtattgtcatgctatctatcgataggaaaatttctagttttgagtttagaaccccaaaaaggctttagcaagttgtttacccaatttgcgtgattgtgatataaggctcttgttcagcacgtgaatttctattcaagttgaccaacacacttgaatctggaaacgatgtaagattagtataaagatgtatatgtatatgtgtatgcatgtaaattgcatgctcagttatgtgattcgtatactatcaacactagtacggtagtggtacggagtgtattggtatagtatatgatgttcaaagggtatgatccagtgttaccaacactagtacatgacgagtacatagtgcatgtggtacaacacttagtggtactcggggtacggttcagccgtaccaacactagtacaagacgagtacttggtagtggtcttcggggtacggtttagccgtaccaacactagtacaggacgagtacttggtgcatatagtacaaagatcgtacttatgttaagaacgctcttgatcatctgttaggccttgtaaataggtgtacgagggcctagatacaagtcgatgttatgttatatgttatatgcttttcttacttagtttgttgacttacatatattatttacatgtgtaggtaaaggaaagataaaatttgagcatgagtgaattcaggacttggagatgattgtacatatccagatgattagacgtggagagttcgatctcgagatgacttggacctttattttgtagtcgtggtgcgacaagtttataaaatgcattttgtatacgattgtaaattttaaagacgagatctcaacttttatgtttagttatatacttatatcaaatgacttgattatatctacgaatgatgcatattaatataagagatgaacaattttttttataaatgagatatgtgtattgctcataaaatcaactttacaaactaccactttttatgaaaataaaaagcatgacaaattaatcatcttagagcatctttaatagatatgaaaataagtgatgcaaatataaaatataactcattttgtcgaaagtctactccaatggtacatagtgtgccatatcttgatgcaaatatctgttgggaatattttacc

SEQ ID NO: 325699 - DNA, 675 bp, Cannabis indica
tgcaaaaatttgaaatttggggaaaaattccacaaaaatcgaaaattcggggttgatggcagcaaggctgcacgtgcagccatgacaggctgcaaatggccctcatgcgtgcacgagaaggagatgtccagggtccctgggcggcatatctcggtgcctgcagtatcttgacaagcgagatgcagcctcctaggcgaggcatctcgtgtccgaaggatgcctgaccgaggaattcagacaaaaaagtaatctgattcccgcagatcaccttgtccaaggccctgcgcgcatggtgctcgagtaatgcaccaaaaatttcaaaccaccataactctctcaatttttatcgaaattgagttccgtaaaaatgaaagttgcttaatttttcgcaaggaatccaaataaattaatttcagaacgaaaaaaaaaaatttcatggaaatttttttgtaaaacacattcaatcatcaaataatcacataaaccaacatgaacacatctaaatcaatatgcaaacaatattcatcgttttaaattcatattacatgaaagtaaatcattaccatgactctgaggctagttgttggaaatattttaccaggatctagatttactaacaagtatgttgaattaacatcctaaatatgaattctttaaaacaatgaaataaacaca

SEQ ID NO: 325700 - DNA, 735 bp, Cannabis indica
ataggaaactactaaatacaagttaccctaattttttacaactaatatactgctaatattctaacaatttgtatcaataacgatatgccacctcttttgattattggcaggtacttaatttatcaataactacattttaactttattaaagtcgtaaaatacatatatatatatatgtggaaaatagttgttacagaaaataagaggaacgagtttaccgaataaagtctgggttaattcgtggactaggttgctcactttaagacgttcgcgacagtgtccagaactgtgcaagcagactagcagcctcatcatccccaggataaaataacccagttgcaacactgtatcgaagctttattgcatgatagagaaatttcaaaatatcacacccaataaaatactactgctcggaatacatttgttatataattgtataaaactgtatataattttttaagagaaaaacgatgtctttcttctattgtctgcttactaattaattaaactcgtttaaaagctattttaattaattaaataaaaaataataatttaataaataaattttctctaaaatataaagtgagtccacacttgcccgtcggcttgggttggcacagtcggatggcagcggcggcgcgtgcgcgtgtggtggtctgttgtgtgagtcctcacccactcgcataaaactgagtacccatcggggtcccaacccatatgccaaagttgcacatt

SEQ ID NO: 325701 - DNA, 1739 bp, Cannabis indica
aaccaaaattttctttataaataccattcaacaacatattcttgcaccaattgttttaggtggctgaccttaaggcatttttgacaaaaatagcaagaaattttttgaatttagtccccacccaaatttaaagagaaaaattaaaataaaggaatatattattttgtctcttttttgtactgggtatctatttatatatatataatattataaaaaaaaaatagtcaaaattcaaaactcatggtcttactactataagcaaaatggtaaaaaaaaataagaaatataaaagctactattaattaatagtgtttaatatctttctctttctctgtattaatattgttattggtttaagtaaatatcaaattttatatagtttaatataataatttttaagaaactcgttagtcaatcgtaagatgacatgtttaaaagtgttaaacctactggtacttaataacattaataacaaatactcgtaaggaaaaataacaatacagaacaacaaacaaaatgtaactctttttcttttcttttattttgatttgatttgatttatttttagaggaagaacaaattgaaaaccactttctttgtacaactttcccaccccgcccaattggctcacatcaaaacaataattttagaattcaaagctatctatctatctatgttactaatccaaatccaatccaaaccttttttttttaccttttgtactaaacaatttctatatgcaatttttgggatagttctctggtgggggctaccaaaaagttctcacctaggattgtttttcatttatagtatttaaagaaattatatgtcttaacacaatgttgaacttatagccctaccctatggtgaatcctaggaatggtaactaaatgtgctatacttgaaacaatggtggctccatactttgattgttggattgtttgagggctcaatactctttaacaatgtatattgtagttatattaaatattttactaatttttaagtaattttaaataatttatgatgtaaaaaaaataataaataattaattacacactaaaaaaattgatgctaataattgattgtttaaactataattttagtatcacaaattattttaaattttctaaaaataagtaaaatattaagtataactaccatatacatcattcattttcttatacaagtattggataataaattttcgaagtaccatatatataagtagcacccttgcctagtgttataatataagtcagactttttgacacgatacgaaatcggcacgaagtcgagagtcgagaggcacacgagcacaacgtagcacgtaataatatgtgcttagacacgacacgatacgaaaaaatatggaattaggtacagcacaacgagaaatatggacttaagtatgacacgacacgacatgtaaacaagaatagattagctcgaaagcttaacactttaaaaagtccgataatttgataataatggcagtaataatatttatttatcaattaaaatgatagtaatattaaaattctaataattataattattttttatataattgtgtgtaactattgttaagtaaatattaaagtaattaaaattataaaatacatatatatttattaattagctcatcaattgtaataaaaacgtaaaaatatggcatacaaatttgagctcttataaaaaagtgaaaattacattaaatatgggatttcataacaaag

SEQ ID NO: 325702 - DNA, 633 bp, Cannabis indica
aaaaatattaaatattaaatttagctgacatggcacaataatgttattattgtaaattaaatgtaaaaatagtatattattataaacttctcttttttttacgcaagatttagcccatttctatatactattacaaaagagattctccttttgttagttgtgcagaaaatttctatatactattatattttaggggcacccacttgattgagttgtgctagaatttgttaatatagtatgttacttttcaggggcacccacttcgcacgtgcgtgatttgctacttaggttgtgacacttttggatgttttactaatgcttaatgtaataattttaataaagttgggttgcttgagttgatttttttgcagatggtatttcagtgctccaggctaaagtcatggactttcttaattgggctcatatgtgaaatttctgtacaagtgatttgttaggatactctttctttggtgctatgatcaataatggacaatagtatgctaatgagttgggtgggctttttctggttatagcatagcttcattgtctagatttttcagtgtaattttgttctatacttttaagataatttatgttaatttgaagaggttcctacgcttttttttttttttt

SEQ ID NO: 325703 - DNA, 941 bp, Cannabis indica
aactagcaatacgtggctcggcacgtacattcacctagtatatatatatattacaagacatgccattatagaaatgttataaaatataaaattatattcagaacatttgaaatacaattttttataactcagcatcactttccggatgagctatatgtacatttggtggagaagactcctgactcatagttgtccaaacgtgtggaaattttattaaaataggaaatcaattaataaaataaacaaagaaagtatctctaaagatttcagctgcatttatcctggtcagtgtatgtgggtttattgtgagattaacattggtcggacggtgtcatttaccctatctgaatattccaacttattcttcaaacaagttgtttttgaggaataacccaccctggacaacatgtcaaatatggtatcacccgtctagatcttaaagtattccacatatcacctaaatgaacgccacgtcaccttgtgtagaaattgagataacacgcctcacatataccaaattcttcccattaattgtttcatgctactacatttgttactccactgttgatacctaaatcattatatcttcaactgttagttaaattacggctctcagatcttgcagtcaccatggctagaaagctaaatatagctaaagacaaattatcattgcaagaataattctctttattgatgttaaaaaaaatagtgggatggaggttgtaactaaagcactgactgttaaaggcatgttttgtcaaaccaaaatcagcgagcaacatgggacaaaactaccctaaaaaatttagacaattaagctatagcgtcctcaaacagcacactcaaagagctagagctttaacttcatactacacaccaattcattaacatatcaaaaaagatccccaaaatatctacaaaaaaaaaaagataaaagtgaa

SEQ ID NO: 325704 - DNA, 703 bp, Cannabis indica
gactcaattgttgaacgagttgacaatgattgagaactttaacaaggataaatccaaggaagtaaattacacaatgttgaagaaaaatccatcacttcttttttctctgataagaaaaaggaaatgggacagtaaggacaacatcagtggcaagcccaaacgcaaagacaagaaggcacgtaaatccaagaagaataaggccaagtccaaggataagagggaaaaatgcaagttttccattgtggagtaatggtacacatgaagagaaactataacaattatttcttcgagcttaagaaaggtaaatttgatttatttgttcttgaagctaaattagtggaagatgataaatttttatagaatattgactatggagccactaatcatatttgtacttctatacagatacttgattcatcaagggagctggttgaaggagaggtgaccatgcaggttgggaacagagcacaagtatcgaaaaaatgtgttggccaagtcaggttgaactttaaaagtaaatttttattattgaataatgtttataatattatttcttatagtgtatctatatcgtggtatatatagagcgttctatataactgagagtgtattcaattccaaatctatagtggagtaaggcggaattaataagttgagaatttacttggtgaattctagacctacttattgaaagctcagttat

SEQ ID NO: 325705 - DNA, 1142 bp, Cannabis indica
ttctgttaatacactaagtaccagtttgtacattgattcctcgcctcagaccttacagtcagtgagttacaaatatactctgatactttcgtaattaatgagttgttccataaaaagatattgcaccgcttcacattccttttatcttgacatgtgtcttccagccaaattttgggtataacagtatattatgttgtgatgtgaatacttatgttttcaatactttcgatctagtagcttttcttgcattgtggctcacaggtgcttcgtggtgcaggtaaggaggttaggagatgtgttcgaccatgagttagagatctcccagggatgtacatatcagccatggcgtcttggcttccaaaaagtaggatcaacccttttctatgtttggaaatgtaactttactttggtactactaattttataacttgttgtaaaataaatttataaacaggggatccccgtatatgatagtatcttgtatgaaagttttacttttaattaaatcaaaagtttttttatcatacatcactttctctaaattaatatattagttagtaataagtttgtaaaagcacacgcgacgtccttgtgagttagggcgttacattggggctttccatttatcggggttagggctatctgtctgttagctagctgagaggggtctgaggtcttggggttcttaggttgtgttttaagggtgttggaaaaagaaaagcaaagaaaaagaaaacaaaaggagaagaaaaagagtttttaatttggagtttttaaaaattttctatgttattattttatttgtaaattaattttattgtatttttatttaaataattaaaatgatatgaatcaataaaaatatgtcgtatgttaatatatacatcagcagtaacagattgtttttaatatctactcacaaacaaaatagtaaaactataaaaacaattgaaatttagaggttttttcctaaaataaaattaatataaagttaagtgtaacacgtagtacggtttaaatatttttgccgtaaatattcattatatgaaaattaatgagacataatatagagaaatataagtgtcgtttggtaaaacttttttaattatttttttgtttttaaaagtagaaaagtgaaaata

SEQ ID NO: 325706 - DNA, 962 bp, Cannabis indica
tttttacaattgtgttgtatatgtcttgatttatcttccattgtaataaaatctctaacaactatagaggtgacagccacgcttttgttgatacgacgccaggttttgtccccgtcatcaggccacagtacagggcatgtgggccattgtacctgcccaaatgatccaacaaccatttataagagcaattcaaaaatgggaggcccttgagcgacatgtatggaaagtccggatagtacgagctgacacctctatacaccatgtgatggagatgccacctaccaaatgaacggtcggatctcttctagtaagatcaacctagaatgcacaagaaagaaaaaatcgcatataaatacccctgcatttcacaagatagggggcgactcttaggagtctgaaaaaccattgtttacttactaaaactctgctcaaattcctattgagcttcttcttcttcaagacgaatgagaggcatataaagtttaagtctgtaatgtaactacttttaatattcattatttgtcaataaggccaataaaatagactcgtggagtaagggtagttaacgtctaaagctctaattaattaatttttaaaaatctcggtaaatattttggtgatttcattgagagctaaggaaagacttaaacatgcactgtgtttgtcatcctgaatctcatgttgcaacaggggaacccgtccaagaaaggaaaaaagtcacatcttgactatccacaaagatctggccagaagtcgaaggctcgctgaccaagggcattgtcaagaatgaaggcctacatccctgccctattggaatatgttttacaaggatctagatttactaccatgtatgttatttgacatcctaatatgaatttctaaaacaatgtaaattaaacacatataaagtttgagaaaccttacagtgggtgcagcgggattataatggctccttccactca

SEQ ID NO: 325707 - DNA, 542 bp, Cannabis indica
agacaccaaagttgaagaaatgggtgaggacttcgagttaccaaaccgtgaaatagaggacgaggaagaaggtaaaggtagtgaggcagatttagttgacaacgcttaactaaacaaacctctctcctgcgaggatctagtctcgcgcgtcaagaaatttgatctctccacatttgcgaggttgaatttagttcacacagctacctccaagcctttgccaacacaatgatctcatattccgttcacgaatcctgcgatcatcccaacacaaaacatggtggtttcaattctaattctgcaatgcggggtaacactgcccttctatcatttcgtgaaggacattttttcttgctatgatgtctctcctttccagcttaccctaaacagctaccgcataattctaggattttatgcgatgtatatggagttgttgaacgataaaattttaattattattattattattattattattattattattattattattattataggaatgggtcagtcaaaaaggaagagaaaattaaggaggtatt

SEQ ID NO: 325708 - DNA, 951 bp, Cannabis indica
gtaatgggttttatttagggcacaaaacccaacacgaacttccatcccggagctctcgaagtcaacctgggcgtaaggctggggtcccctcctagattgactgctatgactcgggtctactcaactctgtgacgtcatctttcatgtcacgtgtcaaatattgatgtccatgtcactagggaaagtttccgagttagcaatacttaataatattgactcgtggactaaggctcgtaacgccctaatcacataaaaactctgaatgttttcttcatatttttctttctgaatgatattttatttagcctttatatttaataattaattttctgaaaaatttagtaaacaattaggtatatacgaaacatatagtattaactacttgaaaatattctcttaataaaattcaaaatggaatatgcactaacaaactagacaaaaattacaattttactagcattgtatacttatactgctaaaaaaattattgaattatgtcatttacaaacacaaaactttgaattatatcataactaaccctaaaatgaatgatgttaattcgcttatgagtgcacatattaacatctaaatgtgaggatatcagctaacatattgttatgattagttatccattcattaatatcatacaaatactatcaattaaggtaatgttcaatattcatgagttggtttggtatataggattagattgcattgaacataattattaattaagattgaattaaattagaaaggataatttgtgtactaaaccatgtaatataggactaatctagtataaatagttttcttaataaattataatgtttaataaactataatattataccatattcataaataaaatatgattaacatttaataaaaaaaacatatttataaaattaaaaaatatatatttgttataaatattaataattatgtggatgt

SEQ ID NO: 325709 - DNA, 888 bp, Cannabis indica
agcttgagaagcttagccaagatattaggaactatagtatgtgtgagtggtgccatgtccatggcattggtcaaaggcccaaagctcctaaatttacctaataataatgattttgtattgggatccaacatgagcagtagtagtaatgatcatgatgattggatattgggttgtatttttctttttggagcctattgttgctggtccacttggttgattctccaggtatgtatatatatattattgtactcactaatgggacaaagtgatccttataaattaattatttgttttgacaattaaactctactacttccaaatttaatataattaattagcaattaattattctgattttattaatagaaaggaaaaatgcaattttggttcctatatttgtttgaaaggaatacaatttgtcaatgtagaataaattagattattatgtttgaaattattttgacaaaaattagatctagctagagtactattttgatcaacatgagatctaaaatgtgatttagaaaaatggagagcccccacatggatatttggccaaattatagtaaccaaaattagtattttttttaattttcttttaaaaattacaattaatatacttcttaactctaggtggacccacataaaaaaaaaatcagaaaaggaatatatcattacaaaaaattttatttttagttacaacaaaactaacttgtgaccactacaagaaatgtcacttttaccagcacagttcgcaaactgcgctggcaaagagatcaaagttttaccagcgtacatttgcagtggctaaaatttaacttttaccagcacatttacacgttgggaaaagtcttttttgccagcacttttcattttatgctggcaaaa

SEQ ID NO: 325710 - DNA, 2176 bp, Cannabis indica
actgatgcagaatcgctctctgccccaataattttccaaacaccacttagtcaccccactaccaactactctcattcaactatcgctctgtctacactaaactccacactgcctccaccttcaactaccctacattctaacaagctcccaccaatccttatcacttcccagcatcgacccacacctcctcccctcactgttacttcttcaccatctgttcctcaaccaacatcacaaacacactctgatatgcaagccgactacaacccctcagtcaccaatttgcctggaatatttactcctgacattggatctgcttcaaggcctttccttcccattgccacttatccaccaactttgacaccatcaccatttaaatctgcctccctctctgctgtccacactgcaatcacaccgacagtatccacctcttctattgttacagctgcttcgaataaagaaaattacccacctacacccgtgaccaagagacaaaatgacactctctctatgaggcaatttcttaaaagatgtcgtaaccaaaatgcttcctcctttcttgtgggtgaaaactcaagtcaaaatgtttcctatgatgatatggattcggatggcttcattgatgattccgcagagattgctttgcaatcccgcgattcattatgaaaatcttgagttggaatgcgcggggtttggggaacccgtctgcattcaggcatttacgattgcttgtcaaacaacaatcgccccatattttgtttcttatggaaacaaaactcccacagaattctgtttctcgctttcgtcaaactttaaatttcgctaatggattggaatcaccacggtctggccttagtggtgggctgctactgctgtggcaccagaatattgatgttacattgctgaactttggaaaaacttttttcgattgctatgtcaaggcagataatgaggctagcttccatctcacagctttctatggtgctccggattcccaaaataaacctgattcatggatgcttttgcaacgacttgctaatgtttctccatctcccccttggttagtcattggtgatttcaatgagatgctctctaatgaaaataaatcgggtggctgcctcagaagtgaaagacaaatgtaagctttttgtaagactcttgatcattgtaagttacatgagacagtgtttaaaggggacccctttacatggataaagaatcgttctggttggagcactattaaagagcgtttagactggtgttttgtgaaccatcactgggagaatcaatttcaagcaccgggggtccttcatctcgattactttagctcaaatcacagggctatcactgcttcttttgctcctattaactctcgggtacagcatgacaagagacgtagtaggttccgctttgaaaatctttggctctctgctgaccaatgtaaggatatcattgctgctagttggaaatcttcatcaacttctgatccgatctctgctgtccttggtaatttggatgaatgtgccgctaatctacagaagtggcatattgataaatatggtaacatgaagaagagaataactgatgcccaattgcaggtggaaactctcaatagcagccgccatcgaacaccaacagctatgaattctttgaaaaattctgaggctttgttggatgaattattggagcaagaggagatttattggcagcagcgctctcgctttgattggttaaatgcaggagaccggaacactaagtttttacacgctaaagcctcagtaaggaagtcaaataacacaattaagtttttacactactttgctcctctagaattttttcggtccaaacaggctatcacctagctgcttccctagcagaaaccgatgacagctcttgttcttcaccgtctgctaaatggtggaacttcttatggtcactgtccttgccacagaagattaagattttcatctggcgggccttcaatgatgctctccctgttgcaatagcccttgttaagcgcaagattatcacgaattcaacttgttccatttgtcaacaagcttgggaaactgctgggcatgcaatattcagttgtaagtatgctcgatcagtttggcgacatcttgatattactcatgactggaatactgctaggcttatgcacaaaggagattat

SEQ ID NO: 325711 - DNA, 1479 bp, Cannabis indica
ttaaagcacaatctaaagaaagctaggaacggtttcttatttttgaactccattccaccctaattcaattattttcttttgaaaaatcattttctctctttctttgatcaacatttccctataaatacttgttcttcccatcaagcttaaagggaataggtaaaaaagtcaagattgctcgttcttgctcttcttccctaattgtgaaaaaagtcccaaaagctcctaaaaaaactttgaacaagtcggcaataggtaaaaaggcattgctaagaaaacaaattttaaagatgatcctcctagccctccatcccccatttcttcaaaaggaaagttactaagtgatgctaaggaaaataagaaatccaaactgtttaccaaagttttcaaaaactaaataaacagggctttagaaagaaataaaacgataattaatagacaagtaatttttatgtggttcgggcgttaatgattcctagtccacgagtctgttgtattggccctttgggcaagtatttgaatagtacaatgtgtgtttacagtataaaccctagccctgcactccttttatttctcttgaagaagaagaaagcttgtaggagtttttgtagaggttcgaatagtataaattttttcaccctttgtacataaaaagtggaggtatttatagatttacatgtgagtaagagcatcctctttacccacctagggtttcgtaccgtaatcgttgcaagggcaggagaatacaacttttgatctgaccatctgaccttgaagaaccttcttgatcgtgcagtgtataggggtagtgactagtatcgtctaaattagtgacacgtgttgctcaaaggtttctcctttatgaattaccctctagacaagacgttgggaaaaaggcatgtcctgaggtacgtacgcacactaccatggcctgacacaggggacaagatctgatcttgtgttagaaaaaggtataactgtctgtaggtcaatttccatataaagctaacgtggccatccacatccgcgtaggagttatcgactgtgactaatccagagaagtctttatccggatgttagatagccaaaccaccgttccaatttttcttggaattttgggacgagtactcgagattttggcgaaaggctatctcgatagagataaatgattgagatctcatttcagtaattatattagtttactaaaatatcatttgtaggtagctaagtgttttaaggataaaatacattgaagggtaaaacggtaaatttgtccctattcagtgtagatcatctatagaggatccttgactattaggattgtaacaatggataatcataacatatctatatcgtggtacatatagagcgttctatataactgagagtgctattcaattccaaatctatagtggcgctaggcaaaattaataagttgagaatttacttggtgaattctagatttatttattgaaagct

SEQ ID NO: 325712 - DNA, 735 bp, Cannabis indica
aactgattaaaaaagtattaccagacgccatctaagtttgtagcataaaaaaagttattgtataaaggaaaaaaaacagaagcagcgaatactatttaaccatttaaagcaatctggtgaggaagataaagaatacaaaagtgcattaattttcgtcctttgcttgacctgaccccaacttgaacagcaactttttctaatttgaacaagttcagatgacaaattaagaagaagtcaatggttgcagttcgatattatatatattattaactcaagtctttagtcatcacacacaaccactgaatcattaaataagggaatcccctgattattgtcttatttttgttttctttcttttaatattaattaattaacgggtgagcaattttaactggagccattattacttagtccaacagctttgccaggtcttcaacgtagataatcagtagaaagaaatctgcttaatattgattattgagaagatccaattcaataattgtcttcactatcacaaaattatagatgaaagcatggattttacaatttacagtggtaaggcaagattataataacttctgtgcttaacgaacttggcttcatatagaatcacagtcatggcagtgccatgccattacttatcacttgtaaactcttgtggtgcctaactcatggattgttgctgtatttctattgttttatgggtaaaatattcatttttggactctgtgtttt

SEQ ID NO: 325713 - DNA, 1836 bp, Cannabis indica
ttgcttttttttttttttaaatattattattaaaaatagttttatttgatttttctgcggtctttttataaattaagaaacacaacccatttattaatccataatataagactttcaaatattagagactataaggctccataaataaaatcacatcaacagaaaaaaaaaccaaattttatgtctcccaattgtttatttttctttgtttctgaaatcaggttaggtaataaaaattgccaaacttgaaatgaaggttatttaaggagctaagacccatacatataattataattataaatatatatatatatattaattatagaaattattgagaatttttggaatccaacatagatttcgatacgtagtgttagtgcctcagttggcagtcacaagatttgttttcatcaaggccccaccccaagaaatgggggaaagattttgatgattataattaaatatatataattttctttccaatgtcatccattaattttctgttaatcaaattcaaattcgcaccttatttataatatataatttatttatatttagccaaattatatatgtaattcttcagcgtacttttttggtttacatgttggatttatttatagatatatatctttttatatatagtagcttattgttaacttgcatgtagtttgtatttacacacaaaatttggtataatatccattttcttattttttttaattacattttttcatagttagtattattatttattacttatcaaatgagaagtaagataataagaggaggcgaaaacatacaatatattataaaaagatattggcagtgacacttaactacataaattaattttttttgatagtaaaatttttctaaatttcacttttgttagctatttacccttttcgttcaaaatactctattaagtgccatagtggatatgccacagtgtacacaaatgtacatgtagcaaatttttagtggtagatatcggcggcaaaattacctgaactctatgattagtaacacttcaccacataaactgattttttagttgtaaaaccctccaaacctcactcctgctagctatttaccacttccattcaaaaaattctattaagtgctctacgaatggaaccattagatctccccttcccccagaccacgacgaagctagggacgaaccaccgaacccctccaactgcagtgctatatcgacgaagagttgcgggagagggagaattagatctggtgagcttgagatgagaaagagaaaatttaaagaagggatgggtcttggggcgtagagggaggctaaatggttgggtttgtaaggccgggacgtcagttttggggtttgtttgagttggaaggtggccgtaggtgacttcagagatgtgcgagaaggagaacggaagagagaggaagtgcaagtggaaattaggtttatagggagaaaaatggaaataaaaaagagaagaagaggaaaaaataataaaaaaaatatttttaattatttttaatcaattaaaattatgtggatcactaaaaaatttactatgtgtacacttgtgtacactgtagtatgtcaaccacagcacttaacagagtcttttggacaaaataggtaaataattaatcgaagtgaagtttgtaaggtattactaccgaaaattggttttttaagtgaaaccaaaaaatcaatttatgtgtgttgaccgaggttttcggcaactagtaaaatatgaatgtaatgatgagctgtaagaaagcgagatgaagactttttacgtggttggggcgttaatgagccttagtccacgagccactgctatt

SEQ ID NO: 325714 - DNA, 1577 bp, Cannabis indica
gcgccaacctgtcagaacacacctgaaaagacaacacaggcatactatataataatatagttctattaagcacgtaattaatttaatctcaacaatttacccttctcgggtcataattaccaaaatgcccctggctcaccaacggggtctttaatatattaaaattcatataaaatcacatatattaaattatataataatataatttcctcaattatacataattatctagttagggttttgctaatccatttcttaattccgggtattacaaagtgtctctccttgtaatcaacacttaatcaattaacacaattcaattctttcaatttttattttctctctgtttctctcatctctcattttctattagagcactgctattaggcaccagtggtacctagtattttctcgacatgtcgcgttgcgattggctagcgatacttcctaaaagttattatattaaattatatggaacctgatatttagttggatcaatagcgatattgacacataagaagatgataggcactactagcgccctttagtatttctctttctggtattatccatttcattacaaatttaatgcacataataattcaaatctaatctacaaaagtgcagattaaattgttgctttttaatattaatttatttaatagttattaaaatatatatttatcattgaatccagtccaaatgttaggtagtttggcatgtgtcttgaaaactttaatacgaaataactatggtttggcacaaaatctcacacatatttacctgactgaactttaattattagtattcttcgtgaaataaatattgtttggtataatattaatcaacacatttagcaaaataattctttaaatattttagatttcgtatctacgccttactaatccaatagaagttagcgtcaacaaaaaaaaaaatacaatagaagttaataattaataatatactaaaacaccagatcagcaacaataataataatatatgtatgatgaatccaaatctataatgacatggattcaaagatgtcattggtaaaaaaaatgtaatgccactatgtaaaatgatccaagtaaatataactatcgtagttatatatttgatataactattaaaacttctttcccatatgtttgcaattaattttatataatattaatgttaaaatgtaagttactagtgaaacttaagtgttatatggttatgtaaaattaaatatcatatgtacaaaatcctaatttaattaattaataatattataaaggctaattaacatttttgtttcttgaactttgacatgtaacaaatattgtcccctgaacttttaaggtcgttaaaaatgccccataaactattgagattgttggatttaaggacttttgtctaatttcattcaattttactatttcaatgattgtttatttattaaatcatgctccccagactttgatatctactgaatcatgcctatcgaactttgacatgtattaaattatgcccccctgaattttcatccatgttagacttttttactaaaattgaaaaaaaaaatccttaaa

SEQ ID NO: 325715 - DNA, 683 bp, Cannabis indica
gttacaccagattaaggaacttgaggacaagttgagagagcaagagcaacagttacgatgtactcatgattttgtcaattcgatcaaggccactcctgttgaagtaaaaacatgtgtgagagatgaattaatgcatgatattgagccatatattttaagaagttcaaactcaatacgtcctatgagtcaaggatccatgaaagggaatgattccacacaagggacaagaaggaaaagggactttaaaagtggagagactgagaacattatgatggtgtcaacaggtttgaatgaaagaaagattaggaaatctgacccacccaagatttcaagatttatgagaacagcaaggccagccactactactactactacaaccaccaccaccactcaaggaccctttactcacaagagggttgtaaccaaagatcaggtaccaggagtaaaggaaagggataacaagaagaaaatctggtcaagatagtgatcatgtatgtctatgttgtctttttatgtacattacttgtgtatgcttgctctaacagaatatgctttattttgtacaattaatgtgggccaactgatctttaattctttataattgatgtagagtttacaagcgcaatatctcttcttattttttttttcttaattatgagctgtttaaaataatttgattatag

SEQ ID NO: 325716 - DNA, 2011 bp, Cannabis indica
atgatcgattgtgtgctgttctttatttatttagcaagattgatatcgctgccgtccttggttatataaaaatattttaattttatacttatttgaaaaggattttatgttcttttgcacaatgtgtttttagaaaaattacaattaaaattttatattacatctaataactactaagttttaggttttagtaattagataaattatacttctacgtatatatatatatatatttaatggaattgttcatgtatgagttaattgaggcaagtagctacaaagcttttgaatttattattattttggtgtgattaaatttataataaaaaaaaaaaaatacttttttgctatataaaatatgttatttggactacttgatatttgataacaacacttggaataaaatctatgaaacaatattaataatttttgataattagataaatggaacgtgtgattgattgaaatctaccaaacaaaacagtacttgtaataacaattacattcaagaatactagtttgaaagcatcggtgccttccttgaaaagagcaagactggatatgcatggattggttggctgtctacttaaaattattttggtaaagttaaaggaaagaaaataataaataattatttagcattgctattaggcaccagtggtgtttagcacttttacgacatgtagcgttgcgattggctaacgatactccctaaaaactattatattaaattatatgggacctgatacttagttgtaccgatagcaatattgacacataggaaggtgccttttagcatttctcataattattagcatgtttactatattaatatatatattcctattttaatttttattatttattttcaacaaaacaaaatacaaattaatgtctcttcttcaggccctctagtaaggaagatttcctttccttcagccttttatccttataccaaacaaatactagagggaagatttcctctccttcagccttttatccttataccaaacaaatgaaactcaaaaatatatttgatcattccaatttataatctttaatccatctttaatttattctaatatatatccctttctaccaaacaaacttaagggcaacaaatagccttgtggttgtggttatgttaagaaaaaaatcaaattgtaggttggagttaatttattttaatgattagggaagagttcattgaagtcaatactactttcaatttcagttttaaacaaatctatatatagagtaattgacggtgaaaccctttgtattttaatttttatgtacttaatcagttgattatttttttttgtttgtgtggcaatatacttccttaattttactttttaaatttgagttaaattttatagttattaaatcttaaattagagccaatgaaaacatgttacttatatacaaatttacacactgacaatcaagtaagtattcaacaataaaatttaactggaatctcaaatttacaaagaaaaattaaccgaaactttttttgtatttttcccttatctttttcaaaatttgtagtttgccttcctaattttaatttagaataattagcaaatttgctccctgaacttatgtcactaccaagttgtggcccctaaaatataagggctgttaaaaaatctccctaatatataaccagtatattattgtaccccttctgttgggttttttaacagatccccgttaatttgctgatgtggcataagtaaatttgaggtggcatagtaatttgatggtagttgaaagtttattaatacccctacctaacaaaatggatttaattagaaaataaataaaaaaacataaaataggaaatctaaatatcctcacaatcttcgtcttcttctctgccttgttttcttttttttttttttttttgtcctttcaaaaatttttttgcttctgttcattatttgcttaatcccacagctctttagtttaggtaatgtcttcttccagtaactcatacaaaagt

SEQ ID NO: 325717 - DNA, 1317 bp, Cannabis indica
ttatgagaaattcatgagttactttttttaaataaattaatattacttttatattttaatcatataaaaatttaaaataactaactcaagttcgataattaagggcattcgaaatttcaaaatgcctgattttagaagttatgtccacgagtctccattcccaattgagtcattcaaaatctcactaatagattttagaagaacgattttatttcaatcaccgtattcactatgcctatgatttggttctcaatcactattcccaatcaagctatcaaaaatctcactgctgcctggttttagaagctatgtctcaatctcaacagtaatcttctccaggttattatttagctaccaatatttgtattttaaagatctgatatgttataatattttcagtgttttgatacatgggttcttgttttgttttgagcagtggattttctgggtcggaccacttatcggagctttggccgccgcggcgtaccaccagtacatactgagggcaattgccattaaagctttgggatcggaaagaaacgctaccaactagaaaattaattattaaattcataattattttgtttggttgtgtgtatgataatgagagaggttgattaatgtttaatttttaatttttttacttttttttttcggtatcatctttcatatttaaaaatctttttttttgttagcttgcgaacctgtgtattatttgttcatgagtagtgatgatcagaagaagtgttctttttattctcttcttgttcttcttctcatgttatatattatccatgtaattaatatttatctcttgactaattatactccctatttccagaaagcaaacaaattaatttatgttttagagtgttatttttgtcgtttttcacaaaattaatataacccacgatccatctggaaaggtatttccttcaaaaactggcaaaaacacagatgactgttatattatattgttataatataagatagattaaaatattaaaatgagacatattatatattaatatgagattaatgtatataatatgattgagagttacatacatataataatattcacataaattgtaacattagaggtagagttactcatattttgtaacttccacatgatcactaattaagtgtgtaaagagtggttacacaacttaattgttttgaaattcaaaaccataattcaaatatagttgttggggattgaattttgtctatttataaagtgtataagtgatataaaataaagtaggcaatggttgggaatggtttgaagagttgtttgcaaaagctgaaaaa

SEQ ID NO: 325718 - DNA, 728 bp, Cannabis indica
ctacaaatcgtatagtttaccatatctatcttgattcaattttaatcgtagcattcttgaacacattgctcctgctgagcttaaaaacttattgtattattcaaaatgctttaattaataaatgtgttttcactaaaaaaaaaatagtgttattatggtaggagtgaattctaaacagaataaaatattagctccccaatataaataaaaaatgttacatatataatagtgtgaaaagctaagcatgcatggtcgggtgtttcctttgattttgctttataatgcttgtaatattgtattatttatagtgtttaaaatgtatataatgtttgtacttctcactatgtttatatatacatatttattggtaaaaaaaaaaagctttttgactttaatacgtcggctgcatgtgaacaagaattaatctccaattctatatgtatatatatatgtcacatttttatatatattttttgtgtatgtataggtttaatactataacagaagtgaagttatatcacttacgtgtgtaaaggagagagaagaacaaaatagaattgtgtataaggaatataatttgtattattgttatgatatttgacttgttttgttaggctataacattgaccaagtttccatcttacaaaaatatgggattaatttgattaaaattaataaaattaaaacagaattaagaaaataaaaatgccatattattattattatta

SEQ ID NO: 325719 - DNA, 852 bp, Cannabis indica
aaaataatttccaacatttttttaaggtgggaaattttgaaaatgccctatctgtgaggatttattagaaaataggtcccactatatttttgtggatataaaaggggtacatggtcactacaatgtagtgtagtgtaggagattgttattaatttatactgtgagtcccacttatttaatgttttatttttttattttaaaaaacccattttttaggaaatgtactcgttatatgctactttacctgtttctttcatttttttatctttttaatttgtattttttacttttatgaaacttattacataaatatttattaaaaaactttttttatattcgttttcacattttcttctaaaataatctcaataactcttcacgcagtaagaccaccgttccaccttcttctcccaaactcaaccagctatgttggggcatcacaacctcgaggacttcagtgcgtccaccaccatttgagttcttagtatgtttgacctatatttcaattcatttgttcttaatatggaattgttcaatcatttgaccctattaaccaaaacccaagaaaagatttgtgattggactgactggcattttcaaggtatgaattttctatacccagttaagaaagaatttagaaattttagagataagtaaggattttatgcgatgaattgaccttttacgaatgaagctcacatggtcaataaagatgaagttcactagattttgatggctcgtaaagatggagctcaccggattttggatagctgctaaggatggaggtcacatttaggattgccgctagagatggaggtcaccggcttttgattgccggtaaaatggagaatg

SEQ ID NO: 325720 - DNA, 767 bp, Cannabis indica
ataacaattgaatataaaaataaaaaaaaatattagtggtcggtttggatgggttaacctgaccaaaccgaccaatttcattgaacgagtcgagttaatacgttttttttttttgttttttaattgggcaaccaaaccgaccaatgtacacactattatacttaaatttttgtaacccattctttacattaggtggaataaaatgtaacataaaccaactaaattgaccgacatacacactacatgttgcatgtaagtgtaacactaacccatttggtggggttgtatctaaaccacttttatttatttaatcaatatcaaatctaatatcttttttgtaaatttttactaatgatactacagaatttaattcaaattcaaaatttgaacaaactagttttaattgtcacgtaattaaatatatgaatgaatactaattcaaacaaatcttaattgtcacaaaatttttctcactcaatattataataaaattttcgactatttatttaatttttgaaaaaaaattaataaatttaattagtaattctgaaaactaataatagtaattaatttaaatcaaaaagtaaatattaattaagtatttttattaattttaaaattttaatatgtaaattatattttaacgggccacataggatattaacgggtaaaaattttccaaaatatgggaaaattttaagagtttatttttttatgacataaataaataaagctaagtggttatgggttttttttttttgtttttt

SEQ ID NO: 325721 - DNA, 1049 bp, Cannabis indica
attaatttaaaaaatataaataaaaaatacctaaaaactaaataatcaccatttatttaaatttaatactttacaaaaatatcatctttataagtttaatacaactaaaaatttaaaatatagaacaaaataacatgaaaacaaatacataaaaacaaatattataattataatttttttaatatttttattatatataaattgatataaataatttttttaatatatacatataaatttaattagatggaatcgagttttaattaaatttttagaataacatctaataatcgatctaatttaattaaaatttaacgttcaatatatatccaattcaattgtaattggattttttttttgttttttttttttttttattaattgaatattgaattcgatatggaactcgtaatatatgtcatgtaatatatacttgtgtctacctaatataaatttggactatctaaaagataccgaaaattactgacacattttatataatattgaaaaaaaatactgattaaggacccgtttaacacagcttttagaaaaactaaaagctacttttcaaaaaaactgtaacataaagatgtttggtaagcagttaaaaaacaacttattgaaaaatttatagaaaaactagagctaaaaaactaaagctggtaaaaaccttagaaaaaatgctgttttgattaaaaaatatataatttttttttattatctcttacaagatatacaatttttttttaaaaagaaaaaatacttaaaataaataatatttaaatttctaattttttattttgttttaaaaaatattttatatttatatttatatttatatttttattattaaataacaatatcaacctaaatttcttacaaactacatttttttttcttttaccagtgataaaaatataatttaaaaatattaaaatttatttttatcaaatgcatataaatttatattatgaaaaaaaataagtaaaaatacataaaaaaaaaataaaaaatttaatataacatatctttatatatgatatttatga

SEQ ID NO: 325722 - DNA, 1173 bp, Cannabis indica
ataacacattaatacacaaagaattaaaaatgtgacacgtaaaaaacatacataaaacgtacgtataaaataaatatacatatcagttaccagttttcttccaaaccagttgcaagcgagcattaaaaacctagcaggcattttcatttgattttagtttcggagaaaacttcaaggaaataataaaagcaattgagagtggtactgaaaactctatttggatcgaacccatacaaacgataacgacgtacaataaaaggaagcctagcatgggagttccatatgtttaattgcttttacatgcgttcctaatgtacttttaatttgatgtgcttttaattgagattttggaatatataattttatcaactacgatcatatatagtgaatgtctcataaaaaaaaaaaaagtttgcatgatttttctatttttttcaaaaaattttttgcatgattatgacattaagcttataaaaaacgattataatgggtaggtgagaaatgtaaaatatatttcaaataattaagtttcttttatatgtaataaaatatataataatactttcgatcgtaaagtaataaattttcaaaaatacaatttgaaaagttttgttgttaaagtttaatacaacgttgtcttcgaaagattctctttcttagaatttgaaagtccgtagtattaatcatcatctctactgtagttttgagtatactgcatatataatagattttaattaagatttttggtatattttttgagttttgtaattaaaaaataatgaatcttgataactgaattattgtcgaaatttttcattaggaaattatctaataagattttgaatgtaccaaaatgttagcatagataagactagatttgaatagctttcaagactatttattgttatgctgttaaaattagtcttaaatggaatgtgtgatttttataatataattttaaatcataaataatttagtgtaaattggttaaattataaaagacaaatataaaattacaaatgtatgaataaataaatcctttgtattggtgatcattaaatgcaatttaacattgataacagttaaacactttattcatgcttatatgagtgtgaaaatcttataaataaattaaagtcatattattcacttagcagacaagttgaaaacata

SEQ ID NO: 325723 - DNA, 1024 bp, Cannabis indica
atgtacttatatgcacaaaattaattattagtctgtaatagttaataattgttgtgattggtcatcaagtgaagatgttcttagatctaacagtttataactgttttaactaactgtttgttatgacagttagtatcagtccaagaaccaaaagctatatatagccatcccttcccatatcattgccaccaattttaagagagatcgttagatgagttagtgagctagttcagagagaaaagaaagttgtaatggcctatcgtgtgtttgatctttagtgccacaagtgagttttgtgtaaattgaagaaaagcttcattgagtgattgtgtcaagaacacattagtgtacaactgctttgtaatcgattctttttagctcaataaagatcaaagccactggggttgctctggctgaagagtagacagatgatattacgatcacactgttcaaacgtcgttatttctgtgtgttgcatctagttttatgttctcttgtccactgttctaagttctgtttttcagttctttgtgtgtgtcaactaattgatctagatcaattgttctactatttttgtttatcatgattgtccatgagttccatgatcttgctattgatcacataattggcataagagctcagtcgagggaatatcaaagaatcaagtcaagacatcaagaagaattaaggtctgattagtaatggcttctgcacgttttgaaattgacaaattcaatggcaacaataatttttgtttatggaggatcaagatgaaggctttccttgtgcatcaaggaatttcagaagccattgattgagaagcgcttgttgctcttggagaagacatgaagaaaataaaagaagtactaaacaaggcacatagtgcaatacttttgagtttgcaggatgaagtactcagggaagtttcgaatgaagaaaccgtagtaggattatgggagaaattggcttcaatatatctgaaaaagtccctggccaacaaactttatactgaagaaaattacac

SEQ ID NO: 325724 - DNA, 1022 bp, Cannabis indica
cataaagtttattagaggggtttccattgattgtcctttctctcgacgttaagtagttaatttcgtactttacttgcgagcagatttgctcattccggaatctgcgaaccatcattaatttcatctcgcaatcattggaaacgatcccattttaagcactttataatgaacttgtcattttatgtacatttttattgcttacgtgagtagttaaaattcctacccacgtgttgggtttaagtatttttccaagacatttggatgtgtcgtttaatactttcccctagcgcaaaccgttagtattcaattttatgcgctattcgtaacttttgattttcctttctcgtcagataggttataaatcaaaaattacaatggtttgatccctttctcgtccaaaaaggtttgatcaaggtgttaaaacgattcgaccccttttttgtcgaaaaggttttgtcaggagttataacagttcgacccctcttccgtaaaaaagggttggtcgaggcccttttataaagttttcaaaatttgaaactatgggtttgcattgtactatatatctccatatcaatttcggttaatcatacatatatgcccctcaagtaattttaaagattttacgctttgtaattacttgtttgaaagaaatgattattttattcacaactagaattcaaaatattccatcagtaatgtgatttacaatcattaatctcaaaataacttccccagttcaattgtttattttatcaaacttccaggaacatctggttttggtaaaatgggttttgatgtccagggtcaatccccaacattctcccataatcgttttaatattcagggtcgatccctgacatataccagagttccaggtggagtaatcatggttttagttctatcttcgactgccactggttgacgtccaattatggcaatcataacgagccagtatatactcaggcacaattcttttacaagtttgcttttaccggagtaactgccttttgtactcttccgac

SEQ ID NO: 325725 - DNA, 1019 bp, Cannabis indica
gtccacgtatattgggcgattttaggagcaacacttttagaaactcccactaagtgcatatttttcagtttttttggtctcaaagcattgactccatctctaccgtgcttccaaatccaccctctttctccaacttacccttttctgtagctggtttattttgtattattttattcttgtttttttttttccatttctttatcacattttttcaaatattattgtaccactctatttttaatagtaataggaaaataataaaatttaaatgtaagttattttcttcattatcctatgcctcaatatatgttcagttttcctctgtgttattacattgtttttttttagttgtcctgcttcttttcatttttggcgccttctcctgtatgtactcttgttcatttttgacgccttctcctctgtatctctctacattttgctgcatttgttatgttgtttctttttccaaccaacttttatcatttttttttatttggtcttccaaatttacactttcaatgggaggtaagactattactgaccatgattcttttattctggttatctcaaataaatattcagtgattggtttaacctgtgtaatttgaaactaacatttgttaaacatacaaaacaatagtagaacaatccaaagataacattagaaaaatcatgacaacctcaatattaatggtttaatgtttttgttttcatctagcgagaattaatgattatttttttggttgttctgatattgctgtggtggttctgtttgtgagtgtgaaaggtggaagcatcattttttttcttcggtatttacagtataaaataaaaaaccaagaaagtaaaatataattttttatcgtgtgacagtataaatgtaaatccttacccaaatttaatatttttttataaaaccccaatctatttaagagcattccatccaaagccaaagaaaaaaaaactaataataataataaaaataaaaaaaactaaataaaaaacctaattagaatttg

SEQ ID NO: 325726 - DNA, 862 bp, Cannabis indica
aaaaataacatcaaaacagtataaaagtaatataccaaaaaaaaaacaacaacaacaacaacaacaaaacaataacaagataacatgagtacaacataaaaataacataaaaataccaaaataacatattttctgtaaataaaatctaaaaactatgaaaatatttaaaattttgtacaactgtatttttgttattttttattatttttgtatattttaaaagaaaaatcccttttctttttcttttaatgataaaaacaagatccttacataaaaaatatgttaatttcgtgtaaaatgtattacaataacataaaaaaaaaatataatactaacgtcaaattttataatttattatcagtttctcgtattatttattaaataaaaatatataaaatttctttaatactatgttcaatgtaaatctccagaattgacattattattgaggtaacataagtgatttataagactaaagaaagtttttttttttctctttagaatagaactcattattataaattaaaagtgagtcatttacaataaacagagtaaataggcaaagggatacattccaaccaagagcaagcttcatccactcctaatgtaaatttagttaacccatgaacagttataaaatcggaataaattgaggaatacctctttttgtatcctttaatcaaaaatacatttatattatatttcattgaaacatacccacatttgtaagagggttgtccaatatactctcactttcgacttaagtctagcatataatttacattaacctaaggagtataatacattatctataaaaatagatatatcttaaagaatatggaaataaaggtaaaaattaaaa

SEQ ID NO: 325727 - DNA, 676 bp, Cannabis indica
attattgtgtaccatgtcattgcagattcgccagatagtgtcaacaacaatcgatgcataaaggaaaacatcctcagcaagaattcccctgtggttaaggtcccaaatgaatttgacccagtcccacatgcgaatatcagtatcacaaacaggataaatacccccaaggagaagaccgccataaataaaaagccacattgctggaaagaaacaagtgttcctttattcctccaccatcccacacaaagggcagctcacatcctcaatatgaaatctttttttggttcacagatcgaactgggagagcactggacagaatacaccaccaaagaaccttatgaccctccaagattttactattccataacttattctagagagaaagagcgacctcacagtgaggagccctttccaaagcttggctaaggtaggtagatttgcacaagaaacgaccattgatttcaagagtctaaacccacctatcattgccttgttcagagaaactaccaccttttaagagtctaaacatatatcccaaccaccactgtttaacaaaagatcgaaaactttgcttagatcaatagcggaagagccatttggtttcaggaagaaatctttgctataagggatctagggatccctccaaaaactagtatccctaccatcaaccaccaat

SEQ ID NO: 325728 - DNA, 661 bp, Cannabis indica
ggaagttgattgatgtgtgatagaaaagaaaaaaagagaaagaagagagtggaagttgattgatgtgtgatggggatgacacatgtgtctgtgcatgagaatggtgtgtaagtggtattattgtaataaaataaagatggtaagtaaaaatgttgatgtaggcgtgtaggagtaaaacagtaataaaatgtgcaaaacagatttttggtgtaaaaatttctatattgtgtgttatattttattattgtactaaatgagatatatatgcctattattggtatttgttaagtataactatattttaatgattataaattttaatagttagattaaatattagttaattttaattgtattagaagatataatttattaataaatatttgtaagattaaataataagattgttatatatctaataaaattatatatgtatagttaataatatatatgcattcttttagttgttgtttaaatttctattagccaggatttggtttgttgatcttgatttgtgtgtgttcaaaataaattcgaagcttgcaaattgaagaaagttttgaggatcgttaagtgaaaagtattttgaaacttgtaaaagaaaatttcgaggaggatgaagacgagcacaacaacggtggaggatgatgaagcttgtaaa

SEQ ID NO: 325729 - DNA, 987 bp, Cannabis indica
caacaatgaatttttatttttacttaaaagcaataatagaaatgaaaatggattttaaaaatcgaacataaaaataatcaatgatacgttgttagctctttaaaaacttgagttcattaaaaaaattgaagagcattaaaaaaatatattaggtcctttagttttttttttagccttttaaatttttggggcctctgcaatagcctaacttgcaccaccctataagagccgtccctgaccactgatgccttttagcatttctgataaaatatatatagtagggacatataacttacacccctcattactgaaaatcagatcactatagagtaaaatcatgatgagaagtagtgatatttctgttgaaccttctcctaaactaatcctttacctttacctttacctcctcctctgcttgcaacttggttctgaattcaagtacactcaaacggcacatgctcgacgcccgtttccgaatgatcatgagggtacgtacgtacgtatatatctctattaatttatacaaagagatattaaatttgtatattttactttttctttttcgtgaaggttgtaatttattaaatttttatgagatttttttgcatatatataaaaccttaatatttttttttgctatataaacacttattaatattacatattcttgttttgtttttaagtataaaccttaatattaaattataaagggtaagtctaaggttatcatgttttgttatatatcctcgatcttatttgattttgcattgagaaaagttttttatatatttttttaataatcttgtactttataaatttttaaaaaattacaaatagatcttattgtgcacatatatagctaattagttgaaatttttgccatgcagtaaaggctttcataacagtagcatgttagatcaattaacaattaacccaagatctatttgtatataacatagaacacaataataagatataataattagg

SEQ ID NO: 325730 - DNA, 1333 bp, Cannabis indica
aaaaaaaaaaaaaaatccaatttctttcatagtcatgtgcgtaacagttatttatgactctagcaaaattttgaaaaatttagaataatttataatatagaaaacagtgtttaaatagtctatttcacacatgtataaaataaatgagtcacacatgcaacagactgtttgaaccttgttttcagtgtgttaaatttttctgagtttctcaaagttttggagggttcttaaatgactacaacatacacaaccatgaaataaattggactaaaagatgctgaaacagataggggtgcaccggtacaaggagttgcaattcgtgttcgcagatcgtgtttgtgtcgtgtcaagacccatgtattacaggtatgtgttttacccgaacacgatctgttaaataattgtatcaaaaaataaaactcaaacacgataaacaggttgacacgacacaacctatataactcgtttataaatagattttgattaaacatgtcaacccattaatatattaatggcgtgtttaacacgtttatgatatactcaacatgtttatgacccatttatgacctgttaaattactaaaataactttaaatatgtcattaacgggtcaatttcgtgttagacgtatcaacctaaacacaactcgttcattaaacggtttagacgagtcaacccgaacacaatccattcattaaacgagttagacatgtttattatccgtatttatgaataagtgacaggtgtacttccaaggcctgagattaacaaagacgggcccattatcacgcctaattaagttagtggatcagctcaccacgaagtcggatcacggctctgaattcgaagacaaatccaacccacaaacatgataaagtcggacctgttaatttttatggtccatatcagagttagaaaaataaagaaaaattttattaaaaaataaagtaatccaacatgaaccataatcctaaaggatcacaacataatatatatatagtttaaatctatactattgaaaggagaagtaatacatcttgtagcctatcaagggatcctcgctatctttttgtattactatcaaacatccaatctaagaacttgttgaagatgaaacatcatgatcttccaagccagcctccacactcaagaatagagtgggctactagattcaattggatgagtatagttttgtaatgacaatatattcttaactcatgatatattgtgatgagataaggaagaacacaaatctcactacatattattgtgtgtgtggcgtgagagagagagagagagagagagagagagagagagagagagagatagaaaga

SEQ ID NO: 325731 - DNA, 773 bp, Cannabis indica
accatctccgggaattcaagtaattaatctttctaactattaattaagtagtaagttatgtatacacttaataatatttataaatatgcagagtttggctgatatgatggagaagaatagcgaagcaaagtgggggaattggattggttatgtgctccttccatttgacatttgtttaagggataaccccttggattatattcgcacagctaaagctattattgatcgaaagaaacattctctcgaagctctttgcactttctccatttcaggtttcatttttgccctttttggcatcaaggtacgtaacctactagtactacgtctccatcacacctttctctcataaattttttaatttattcattgataatgatcatgttaatgaataaataatagaaaacaagtgctctatttcacaaaatcctctccgccactacaatggcgttctccaacgtagtcggaccacttgaagaaattggtttctacggacacccaatggcttacctagctggagctacctatggccagccacatgtacgtaatttaatttaatttatattgtctttaagagctctttttatcaacataccacaattttaaaaatattacacaaataagacaaataaaaattaaacaaaactgttaataaattaaatacaaaatggtgttataaactctttataaataaataagactgtcttggggaatttttaaaaatgtctatttttatattttatttataattttataatttaattttttttattaat

SEQ ID NO: 325732 - DNA, 816 bp, Cannabis indica
tcgatggttgcattatactttgctagccagtccactaccccaatatcaacacttaaaatcctctaggttcagtttaatcaaatcgatcgagaattctcttcctccacatgcactagaacgggacctaacccacatgctagagataaccaattttgtcatggtagaaggaccagcatcagtctctgcctgggttaaagcaatcacctgggcaggaactagactgtaatttttcttctattttggtaactctaactatgggcaacttcttttttagatggcccactacccaacattggaagtaggctttatcttgacattcaccctgatagcgtctcttgcacctcgggcactctggataggttcttcagttctcattcccaccacgtcaaaaaccttgattaccttggaatctcttgttgggaaccgtagctattggatcgttaggccttttcctacaatccttaggatgagcatccttaccagaactcacattgggtgattatttccacaaatctctcttcatactatttgtctttcaaatttggtcctctacacctgcagcagcaagggctagctcaaccacctaagaataggttcaaacaaaacttgggtgtttggaagctacaatcacatctcgggcgatatgttcttccagtccctgaataaacttgacctttctagctgcctcagtggccacttcattagaggtaaactttgccaactgattatagtacttttttaaaacaaagtctagaaggcatcgtaggtcatgttattcaaatcatgaccttgggatacaatttcccaccaaatgcg

SEQ ID NO: 325733 - DNA, 1636 bp, Cannabis indica
gagagagagagagagaagtgagagaaagagagaatttttctgagttttctaacagaaatctgagttgtagaaagtctcttatatagctctctatttatagctaaaggtttagtaaggaaaagggaacctaagcttttttcttccaattaattaattaaataaataaaagaaacaaaatagtcaagacttggtaagaaacctaagcgttgttctaatcagcttggcctacactcctaaatttagatctgaggtaagaaaaatacattcataccacattttatgtcaagatatgatacgaatattatcatctgtgaatcaattattgccgagtataagatacggtaattaccgttttgaaagaaagagtcattactctatactgaaattattgttaggttttttacttatcaattacttcattagataacaacagtgacattggatgcctggttaagcttatcagggttgcttcattagacaacaatgtaaaagagagtactactcttattaaaatcgttgttagattttttacttatcgattagttgtctcatttgaaatgagagttaccaaatactttataaagtatcgagaatagtttgtcttagacaaatacttaaaattgttaatgttgtgatatattgaattaatcaatttgaatatatatttgattatatggttattgttgattgttgatgtgaatttgtatttttttgcttttcttattgagtctttgtgacttatgggtactttgtagttcaggtaagggaaaaggaaaagtaaatcaaccatgagtcagaggttttctagcgaatgtacatattagccttaccgtttgtcgtgcttgttaattgaatcataatttttttctaaaattattagtttattagtataaactaatttataaaaacatacaagtactgcccttacggattagggcattacatatttgttctacactccaagttttgatcctatgttacagtagtagattgcttgactgccatactgaacatggcagattgtttatctttcattgatactgacccttattgcctttgtcaagccttcaagactagcacccaacttggtgaaattttgaatgtcactaaggcttccactctcccttaagcctacaggtcgatcttcctctatttgtgctttgtaagctcttgtttttttaaaaaaaaataagcacaaaatatacaatatttttgaataattataaaacaatattatagaaatctaatgaagaaaaaaaaataaagaaagaaagaaatttctttcctcattttttatttatacaactccttaaatcttaaatcactcattctaagtctcaatctaatttttatggatctttttattttgtatgtggtggtggctattattacaactgtcataatgaacatgccagattgtttctcatttatctcaaatggtagcacagtggctacgtcgaacgaaagttgttgtgtgggaataaagaatgctctcgaagctcaacttggtaaagttttgaatgtaagcaatgtaacatccccgcttcaagcctctattgggcccttacacctacagaatgatgactcttatacacgagtacgccactctagctgcttcctggattgatgactgacc

SEQ ID NO: 325734 - DNA, 1213 bp, Cannabis indica
gttttacagttaaaatctgcatactatatgagttcgtattattagggatatttatttgaagacagagtataattctcaataatgataaataatagaattctctctttattttgttgtcccttttcccatgaattttgcccctatttataggtgtataggttagtagttatttttattgggatctattcacttacaactgctcatgatacgtggacattcctcacgttttatttatatgcacatgggataatatctaataacaacccaactgctcttttcctttatcctttaaacggttatgctgactaagaaggttgtttctcactgaatgtgagttatccttcttatccgtcttttgaggaaaaatgctaagcattaatattcttcttctcgcagtgctcttcatatcgtaaagttatttgcaaggtggtgttaagagggacatggatgaacgtaatcttctccatgtataattgtgtgggtcaatgagttgtaagcttttattcccaagtatgtaggtcaataagctgtaagatccttgatgtctcatcttgcatgttcttattatacactctatttattccaaagcggacatattatctcgtcaattatatatatctgttaatagttgtaattcttatctcacatacgcttatgtagtcaacgagtctaaatacttctatcaactttaattactatattctttgaactgtttcatattccttttgtaggacacatgtcagcttctgatgaatagccgaatttcgagtatcacaacaccaatagtaaaaggtggcaaattttcaaagggccaatgtccacaaaatgataaagagagagatgaaatgaaagtggttccttatgtgtcacttgtgggtagcctaatgtatgctcaagtatgtacacgtcctgatattactttggttgttggtgtgtgggtagatacttgagtgatcttgggcttagccattagaaattagcttagaaagtcatgcagtatctagggtaacaaggaacatatgttgacttatcggtgagctaacactcttgatatagttgggtttagtaacgccaattatgcaggatgcgtagatgacaagaaatccacatcaatctacatttttatgatggctgaaggagctatttcgtggaaaagtgtcaaatagacactcacagcatcctcaacaatggaggcagagtatatggcatgtta

SEQ ID NO: 325735 - DNA, 2312 bp, Cannabis indica
tggctggaggtacatcgatcctttcattgcatatattattgatatgatttcattatattttccgcattttcatatcattgtatatgctatattatatacactatatatatagtctaacaatgttaataacaacaaaaaaaaaggtgaaagaagaaatggagagatcagaagagagtattgatcaaattcttgcaaagcttgaaaaggttaaagatccagttcgtgataactataattattattgttatcaaggattttggatccaagaagttatattgaaacgtatattatcttttccaattgatcaatttgtggcacaagatgatgatattttgttaacttcttgcccaaaatcaggtactacttggttacaatctcttgttttttctattgtgaaacgcaatagtaatagtaatagtaataaccctttgattagttccaatccacatgatcttattcatccacttgaattgtccttaaatgacgaatcgaagcaaagaattatgtttacgcattttccttactctgcgttaccgccctcgatcaagcactctaagtgtaagatcatatacatatgtagaaatccattggatttgtttatttcacattggcattttgttcatcagattctcggagatgttattgaaccaaatcatttagaagagtgtttcgatatgttttgtaaaggaatccatgcgtttggaccgttttgggaacatattttagggttttggaaagcaagtttagaaatgcctgacaggatattatttctaaaatacgaagaacttaaaaaagacaacgtgttttttattgaaaagatagctaattttttgggatttccattttcaactgaggaagaaaatcgtggcgttccaaaagaaatagaaaaaatgtgtagctttgagaatatgaaaaatgtggatgtgaataagactagcaaacattctcttgggatgtctaatagttcattctttagaaaaggtgagataggagattgggttaattatttgacacctgaaatggctgagattggaaagaaactcattgaagaaaagtttggagagtctggtttaatgtttgatttctagattaagtgttgtaatctttgtttgtttccattttcttaataagattatgtaatgtttaagttataaacatcaatttgtactaagtttgaacaatcctttttgttttttttattttaagatgtaatgattaagtaaacataataaatattattgtcaatggtatcatgtatgtatgatatcaactagaatattttcatagtaataatatattttgtttttatttatagtaatgttgctctatatataactacaaaggatgcatgcaattttaaattaataaacattatgggtggtattctcgaattggattcatacacgtggcattcagtagatggccaggtgtttggtgaggtccaacccaaaggtaatcactcaccaagtctcctcgtactcaagtaatgtactagtagctccgagaggaggataccctcccggagaatcacattagactaatggagtattcatatatgatacaaggaagagatagcatctaggctcttagatcctctatcatgtctggtcccaacttgtgcaatgcatttctagaaaaagtattgtagcttgtcatttccgtgcaagtggcaagatgaaattcccactaaaagcgaataatattttagggattttccccacttcttttatgacacgcacattttccaggcatacataggcaactcgcgtccttagtagtcccatcagcagcggatagattgtgtctcgactgccaaatccctacattaggcttaaacaacaagcctacgaaggagaaaacctctcagattaaggaaataacctttaaatactgcgaaaaaaaaggggaacgagccctagttccctccgaaaatcccatctctgataaataggattctaaatttattgtagaaaggatcgagactaaaaaaattagagagaaaattctattaaaatctcctggcaaatcaccattgttgtaactttcaacaataatacaaggtgactcgtggattaagattctttaatgtctcaactacatacaaaatttcatcttctaaacacaattatcattaataattatttattaaattaattgcgaaaaaacttggtcaataagagagagagagagagagagagagagagagagagagagagagagagagagagagagagagagagagagagagtagagagtagtagtagtagtagtagtagtagtagtacgtagtacgtagtacgtagtacgtagta

SEQ ID NO: 325736 - DNA, 1942 bp, Cannabis indica
ggacccgggactcggacccagaactcagacccgtagttggtgttgggatagagtgtattaaaaatatattataactttacacaatcaattaatacaagtcaataccaaatattatattgtactaaataatactaatacaatacaatacaacacaatctaacacaatacaatacgtcgtaccaaacgagcccttagagttttaatcatttttcaccttccctaatgccctttatataattcaaggcttacaaaagatcattattcaaaatggataaatatctcctcgaaatagggaaaatcgcttttctatcttatatttaaattgcaaaaaaagatcattaatatccctaaaggataggtagatattagcttggagatgatcccctatttccacggtcagttaaggctgtctcgtaactgaattttagcttgtgaaccccaccatccatccagcctctatttgaggcttatttccacatgctggtaggccaaccctattttagggccattgtcggcacacagaagttcattggccggccagggtttggttcgactagggttccctggctagccatttctcccttgttcggtcctgcttaactgttttagaacccctgacaattgacatcctgtgcaaggcagatttgtccagtcattgaattttcccccaagtccctgtacgaacatctgtacagatgtctgtatggatagggacttttcaactccagccttggttgtaaagaccttaaccgagcagctattatagatatctgacgattgatgtcatccgtgtaggtctgttgtgaaaattatatatacgcaagtatacacagtcaaacaagtaataaagtgataagtaagatcgtctccacagggattgcaaacaaagtttgatgtaaaaccaactaatttcaacttaaagtaaaaggaaataatatgcaaatggttgagtaatgattcaaaattaaaaatgacatgaattaaacttgctaaaattaaaactgctgctagaaaaattgcttgcaagataaaaaatgtaatatggtaaaaatggcttgaatagctaattccttctagtcaggttttttgttctaggtattacagcatcagttcagcattactccagcattctgcaaaatgcagcccggttttcattggcgaggtaaatattctcgagtctcatttaatttagtatacactgaataaatatgaacatacttcttgttggaatttattttactgggaactagatttactaccacatatgttatttaacatcctaaatatgaatcgctaaaacaatgtaaataaacacatataaagtttcagaaaccttacagtgggtgcagcgtgttgtcgagcaaatttcgcaacaccaaaaatgaataataataataataataataaggagaaaaaatatgatgaacaattgcgagtattcaacctagaacggcgaatactcgaactgggaacgtaaatgcttggcaaaaactggaaatatcaagaagacaaaggaatatagtggttcagtcagatcacggtctgcttagtccactgttgcaagagtttcgtaggtgtcatttcatggtggatcactcctttatatacaaagcaagtgtccaattagttacacaaggattgcattcattgtcaatccgtttgtatattgatttacagtaattaaactaaaaacgtaaacatcaataaatgaataacaatttctattcactaaatacagcaacgtatgcgtcttctaatatgcgagttgactgttcatattctagtgtaagctcgcgggctcaagatagacctaacatttaattaagtctaggatgcctgcgttcttgtatagtcgcatttatggacatcggataacgagctgatagaacctagacatgcgagtctatattggtttatcaaggctgtcgggtcgttgagacca

SEQ ID NO: 325737 - DNA, 714 bp, Cannabis indica
tgtaaaaccaataagacagtcttatactcttcctgtacttgtaaatgatcttgaaggtaattttgtaagcatgctgtagtactattaaaattagaaagttgagaccctatctgaagttaatgtgggtactttccatctttaaggaatatggctagtagttagacctatggtcttgaagactggagatgaattttttcgggacattcatcgtaatatgcttgaattgtttgtcttgaagttcgtataaaaagaggaattagtttatcttggaatgagtatctgtaatgcctctatgtctatctggaagttccaaactatgtttcttttttcttgttttttttttctttttaacacatgatccagtatgatttaatgatgcatatctgtactgttttaggataataagtcttcaaatgcacaagatcagtgtggtattaatagtggacttacagttttaatcattcaagggtactcctaccatatatgcacatcattacttagagtggcttattatttagttttgagcccagaagtgcacttttattgtaattttttttgtttttaatagtctttttatgactttgttatttttataattagtaaattgacaagcagacacaacagcgcatgcatgtatcaactaatttatgatgagcttttttttttttttgttttcttgattctccatttttattatgtgtattatagatgact

SEQ ID NO: 325738 - DNA, 1063 bp, Cannabis indica
ttttggggtgttacttcattgctggtgtttttggtgtttattgaggtttctcgagccaaagcgggatcatctgggggctgatgttttcttgttcatttgtcatttttcctgtggacaaaggcagtgggtttctgcaaaaaaagtacgattctgtgacgaaaaatctacttcaaagaaaacagtgtagatgctttttgaaaaaaaaaaaaacagctagtgtttttcttttttgaatatgggttcctttttcccgttcataatgtgtgccttttctacataaacctttcctatttatgtcctacattctttcatttgcctttattttggtgtttggctgacacatgtattttatttctttgtaacttcatctgccacatgtcttatttagtggagataggttttattttcttcttacactttgttcctattttatccatcagtgtcttgttataggacttttgatgttatagtctgtttagaataatttctttctgcaggatatttttttttggtctaggattctgaagtgaccttcgcttcgattcgttgagttcttttagtttttcacgacgggaatctgatcgtattctttctcagttttatgtggttctgctttaaaaaattaatgttctggattctactcggttctggttacatttcatccgttggagagtgttttcatttatcacagctagcttatggctttgttctatctcagactttggccctttagtatgctttggggtgtgtcatcgtcagcctactttagtgagttcaggtctgaattgccattactgtagacagcgggtcctcgtttcgatcgtttcttgggtttgttatatatttttttggcatgtttcttctctctttttgctactttatgggcttatatattttcattgttttatctctgtgtgggatgttttatggtagtgggcttgttgggcctctttttgggaatatattcgattgggctttcatgttattaaacttttcctttttctccccacaaaaagcaagtaagaagaagagaaaacgagatgtatatatatatatatagaga

SEQ ID NO: 325739 - DNA, 638 bp, Cannabis indica
ttaggctcacaacggatcacaagaggcttttttggaaatcagatactcattagagttttatttgactatgataccatattgaaaaaaatgaagaaagaattttattaagaaaagaatgaatagacagtagtgattacaatagagaagaagggagccttaaataggaatggctcaacttcaaacagttacaaccaaaaaggaaaaagaccaactgacttaatcgactttccaactaacttgctattctgaaaataaccaactaacaaacaagtctaggtgaataaggtgcgagaaatacaatgactaatcagagaagtaagtgtatttcttaatacctaatcttcaaggtggagcgtatatatcatatacatacatcttggaaacatgagaggttaatttaggtaaagtaagtggtttgatgaaggcaccgaccaattgaagtgtaataccccagaattgagaagtggattagcaaaaccctaattagataattatgaataatttaggaattatattattatatagttcaatatatgagaatttatttgattaattatgtgttaagaccctgttggtgagccaggggcattatagtaattatgacccggaaagggtaaaatgatgaaattaatttaatt

SEQ ID NO: 325740 - DNA, 812 bp, Cannabis indica
agagaaagatgaaaacgacgggacgaggaaaacccaggaggcatcgaacggtcacctccgcgccgtccgtcaaccgcccgagtatgaggagacgcccgagctttgaacttctgagatggagccatcagaccacgggccataactcgttcaaaccctaaaagcatatcaccataggcagaggacggggaaagccaaggtctgaacaacggaaacggcttgtcctcgctattcatgatcatcacaggtgaggcaagacagcaacctcttctttgatggccaagaacaccacacaagtagcagaaagtacccacttgctcaaacttgaattaaagccactgatttacactaagaacaatcaccagacaaacacgacaacacacactgaaaaacaaagaaaccctcaaccacaaaacgaacaaggagcacagaaaaacaagatcaccaaacatacaaacacacaccaacagacggaacaaaccaacaaaaacgcaaaagactactcagaacatcaaacaaacctctcacacaccaatagaagacgaaagaagttgaccaaaagagaaagaatagtagatgaccattcctctctgaccctaaaccccatacatttttactctatcattcaaaatgtatctaataataacaatactcttttctagagggtagttgagatgttcgcatattttttgaaattttagaaaaatcattgattttgaatgatcaaaaccaaactaaaagtatataataatatgaatgatatctagcatatatgaagtagtataataatagtttacatttaggtgcattagatt

SEQ ID NO: 325741 - DNA, 1017 bp, Cannabis indica
catacaaacactaatagagctcaaaattacttaaattatgccacaattttcaaaaagaactaagttaaaatttcttgtccaaactcaaagaattggcaaaaaatttcacacaataaacttgattcaatattcagcttaactcaaaacaacaagttcggagttctcaaactcataaaaagttcaacactcaaatactaatttcaagttcacaaatcaagaacacatgcaattcaattccatcattatcttttagaaattaattcataaattgagcatatcaaaggataactactaccttaaatgctttccctcatagcttaaatacaatccagaccaaaatctctcctaaaatcaaccaagatcaccaatatttaattaaaaccataagattatagagagagagaagggggtcagtttgatatggtctcaagcataaaagagatttcattctttattttttttttcagaaatacaaacatatacaattttactatctttttggtcaaagatccttttgcccttaggggctataaatcacataaataactaccaagggtagttttttaatttaaaatcaaatatataatgcacaatttcacatatctatcatgttatttccttaagcacataactcacaaattttggatcccgaactcctttcgcgccaaaatacacgattgtgactatacctcactaacttgtcaaaaatcacctgaaataagaaaacataaatatacgatataatgatatagtttataattttaccatcctcttgcaaaattaagaaaatgaccctatgttgtaaacagggttttaaatgtgaataaagctcaaataattttaacataattaattatataatattatagttactcaattatcattaatccaatttaattagggttgctaatgttggaaattattttaccaggatcttagatctattcacaagtatgttgattaacaccctaaatatgaacttctaaaacgattatgaattaaacacatataaagtat

SEQ ID NO: 325742 - DNA, 1221 bp, Cannabis indica
ggaagttataaatatcaattattgatcttctttatggtttttatttagtgttttatggtaattaattggcatgtatttcattgcatatttatttgtatatgtctttatttagtgtagtacttttcatcataaactctcgttatttttcttataaattggtatggtttcacttttataaattagtctatactatatgtatatatatcattgtattctttctatatgactttttattattttattgattgagatgtatatagtcctttagtctgtatgacattattcagttatcaatgattttggtcatttttttttctaaaaaaaaatagaaattgtcatttatacgattgagattggaagcttaaaatcccaaaaatacgattgactcttctccctctttcacaatcagacgacatcaaatctgtaaaatgctcctttgatctctgccacttctccctcttctcctttgacatcaatctgaggtaaaataatattttttattttggccgagcgattgggtttattgtgatttcaagcttccgattccaatctgtgaaatgctcctttgatctctgccacttcgtcgctccactcttattggccaataatggtgatctacggcgcggtaactcctttgatttcaggtaatatgcctttcttattttttgttgataaaaatccctctttatctccaaatattgcgattgaagatgaatcctcctctgagaaaagccttccttccatctctatgaaatattcttcatcttcgctttgtgattttattcgctacttcccaattgaaattttcttagattttagtttaaaatgtgcgtggattctttgagaaaatatatgtttaatgttttaaatgactattttgttttaacaaattacatgagtagacattgatatctggaagtttctttgatagatatacttaggatgtaatgtagaatgctacgctggtgtttcccgggtgccttgcctgagcaatagttgaataacacttgatgtttaaatcatcatattgtacattaaggggtataaaactaagtaaacgttatttatttttgtataatccaaatctgattcctctaatactaatactgtttatcatagaactagaatcttatagatgactttattctatttagtgaagacttgtctaaatgcaataatattagtgtttacaattattctattttggttttacagatattt

SEQ ID NO: 325743 - DNA, 502 bp, Cannabis indica
attttcttttttagggtaatagtttttttttaattatcattactgccgttgtaaaaaaaaaacatgttatatatgataaatttatatttaaagattatgtggcactctctcgatctccctcctaactttttagaaaaggcattatatacatgatatttaaattattttatttatattttgtagtttttattttcttaaactttattctataaatatgcctaccattaatttatgctattttttatttagtatgttgattaataaaggtgtttgataggcggacctagaggtgttgggagagggctaaagcccaccctgagatttgaaaatatattaatatataatttttgttttcatatatacataataattaaataaaataattggctaagatgctttaaatttacgacaaatgaagtataatttttaaattaggctcaaacttatgaccactactataataggagaatgtttgtaacgccctaatgctaaggcacgctac

SEQ ID NO: 325744 - DNA, 769 bp, Cannabis indica
accttcccaaaaggcctcatactaatggagtagtgtccatccttatatacccataattattcttatttctagccaatgtgggactttggttgcattcccaacaataaaatttgtgagtttcgtgattgtacacacctatttgatctctatgaaatttagagagagaatggtgtgaatgaattgattgatttcatcaataagagaaaatgatacaatcagtttatatacaacaagagctcttagttgatattagtaataacaaactaataacataataggcaagaagccaactaactgcttgagctaaacaatcctaactaacttaactatattcatcttttatagtccctccaaactcaaggtggttgttaagttatttttagtattaaaattagattaattttagtatattttttatttagttttactcgtgtttggagcaattttatgcttgttatcttttatttttatggatttaaaatagaagaagatttgaaaaacatcaataaaaaaaagataaaagatcagaaaaatatcagtgtgaaaaatcggaatcctaaccaaaagaaaaaaagatattacgcgttgcacacgtggggaaaaggacacacgggccgcggcccgcctcttgatagcagcctctcttgggtgaagaccacacacgggccgtggcccagcaaagtgggcgtcgcggcccaccactcttcagcagcacaaatatcatttttaattctctcacgtgggctgagtgtggtttcctaattcaatg

SEQ ID NO: 325745 - DNA, 631 bp, Cannabis indica
ccacaataaaattattgttaataataaagaaactcaaatcgaattaatgtgcaagaatcaaaactaaataagctatatatacacttaacaaaaaaaaaagctatatatatattctgagggattaattagaatcaattaaatatataaaattgtacaataatggaattatatatgtcacatcatgcacgagactctcaattagtcttaaaacacaatgaaaatgatatatatcattatgtgttaattaataataataataatagttagagctgtgatgcaaaattctgatctcaactacttcttcacactcataattatgtgttaattatccatttatatacatatatatatataaaaatataaatgtaaactatatattgatatgaatttaatcggtgaaaaagacgagaagatgatcaagtcatatcaaaccaaaaaaattaatagagagattgattgattgggaaatacaaaggagaggattaattactattaatattattagctaataatgttctctttttttttttggaaagaataatattctcttgttaataattatatttcatataagtatctatatattgatgtaattaacaaataataatccttttacaaaaaaaaaaaaaaa

SEQ ID NO: 325746 - DNA, 1363 bp, Cannabis indica
taagcaaattttaattaatcacgtttttcgttaatctcgtcgattagcaacgtgctgcacagtacgttgaaaatcacgctaatatgcctaaattagttagggtgttacaaatagaaccagggctacgtggcagtatagctaattaaaaggaaggccatgtaagcacctgagcaaacgaagaccctaacacttgaacggggatcaagtgacagaccagctccctctcaggagctgaccgaccacccctagggtcggccagcctagggacaccaccatggtcagcctgcctggccaccacagggacctagcgagccaaggagtgcactataggccttgatgtactcttctacacatggactaccgtgatgggctgcgaattgtgccctaaaagtacaacaaaatgactaaataatatttagaattaagggcacttttgtcttttgtaaatatctaacaaactatacgaatgctaagggatttgaattgtaaacctagggttttatgcctcctatataaaggccttaatctctgactaaaaacctaggtttcctctaagctggaaacctcattttaaacactaagtgtttgataaactctctctcttactcattctctctctcacacacacctaccctagtgctcctcaatacttgagtttcgccaatattgattcataccttgcaatccttagggtactatagcaaattccacctatagcgatctagatagtaattccctcggtataatacaactaaaaggggagtagatcattattcgctatcacaagggggccaaacctctataacaaatcttattgtctgttgcttttcattcttttttgtgcacacatgtggcaagaatcagatatgcacgacccgctattggttgatcatttttatggtcaatagtttagtgctttcattgagggcgtggatatcgtgatctgatcaaatgccacggtgaacacaagaagaactcctatcgcaccattttcatctttgggtctcccacaagacccacagatcacagatctaggcattcaagttccagtcacaactagaatccccatgaatactacaaatatggtgaatcttctcaccacaacaggcgctgcaagtttggccactacaactggccaaattgacatgagcaccccattgtatccaagtggcagcccacgcctccaagagtagacccaccattggggcatcccactgaatgaaggacccaggggctattgggaatattttaccaggatctagatttactaacaagtatgttggattaacatccgaaatatgaatatctctaaaataatgaaataaacacataagggtttaagaaaatctaacattgattgcag

SEQ ID NO: 325747 - DNA, 1020 bp, Cannabis indica
acggtttttttgtttttttttttttttcttgttatataattttttgtcagttatgactttgattactttttccatttttgaaagaaattattgttagaatctgattataattttgtatttggaaccgatttcatttaagttttatgtttgattattttatttaagtttttaactggttatttttctagtatatatattttttatctgttatgactttgatttatttttttcttgttgtttattatatttattattttttatattttatttcattaatattatttataaccggttttttcaatactgtttaatatgaagttatatttttatttcagattttatataaggttgttcttactttttttctcttgatttaaccggttctttttgttattttatattgaaaattttgttattttatgtgtatttaaattgtagagtttcatttatttttcagatgatatatatattcttatataatatgttcatatataattatcaacatatataattttgattattgagtttatatacctgttctgattatactgagaattgttgtcgaagatttgttgctgtgtatataatttggtttgatttttcattttctggtatgcgattatatgagcattgatttttaggtttcacacaaccgaggaagaggatcataaccaattgacgaactcaccggagctggagaagacaatcggcgatgatgattattgcttctgctttgtcatcgatcattgatatatgttgagaagttgatgcatattctggtttgtgtgattgatttgttgtgtgaaatgcttacgtttgagatcgaattgcagagattaattgtcggagatgatcgctcgattctaagagaaaatcgaagagcaaataggagagaggatcaggggaaatctgatttatttgtttggaaaatatgaccttttttttttatatatttaagcctatttatatactgtttggtttctcatatttttgtcactattttttttttcatattttttt

SEQ ID NO: 325748 - DNA, 728 bp, Cannabis indica
gtagaaaacagtgaatcgaattgtttatagattacatagaatagtacatatttatatacaaagctaggagactaggaaaaaggaaactaccaacaaaataggaaactactaaatacaagtaaacctctaattcttttacacctaatatacagctaatactctaacactccccctccctacgacgtcgtagggacgactaagtaagtagtttaagtttaactactagtcccgacccgacgttcgttttacgttaaaacgaaaagtaagttacgttacttaccgtcccgacccccaaccccttacttaaacgaaacgttttcgtttttaaaaagttaaaaaattacttcccttaccgtttaggttttcgtttcccggtttttcccggttttaccaactaattaccttccgttgggtagggaagtactacgaaccgttaccgttttggttaagttttaactttttcctaccgaaaccgaaaaaactaaaagtacgaaactaacgtacgtacttcctaactaagttggtcgttagcgttttacggttccgtccgttcgggtaaggtaaactaacttaggttagggacgacttagttcgaacggtttttaagggttttagtacccctaaccctttaacccttttcccgttcgttcctacgttaaggttacgaaactaaactaacgtaaacgtaactaacttttacctttttcgttaggaacgaacgaaaaaag

SEQ ID NO: 325749 - DNA, 1841 bp, Cannabis indica
tactactgttctactgttgttttgaatagttctgctttgtgttttattggtgttttataaaaatgcagtatttttgaaaaaatttccgtgtgacagtatttttgtaaaaattaactcaaatttcaatatttttataagtttccctgtaaatttctctctaattaagcccctttcacaggcccaattaagacaatgggccaacccaccaaaggagccagaccacgactccaggtccagtaataaaattaatagatccaattttactaaggagtctaatgttgttcatgggggaaatgcaaaaccagcatcagttcttgggtcgagtctgtaattatcttgcgtttggctaacttaataattataatattggatagagaagatagaaaattaatagacgacttaaactcgaagactatgtatgtagcacgtgaacaaattattaatccaaaactcataagagaaatagtataaaaatcactacaaagttattatatatttgaataatttgtagcattttctattttatttctaattgtatataaatatttaaagtgaatttttttattataataatacataaattatatttataaaactttatctagccgttaagtgttaagtcaatagttgcataatagttcttattaattcagatcattaaatttttatttcaaaattaatttaaatttataataaaaaaatagacatatggattgtaatatgcacctttgtttattttgtgagaaaataaatatatatatatatatatatactagtatgtatatatatgcagtggaaaattcattatttaaagtaagggggcgtcattttttttttataaatcaagagcaaaaataaacttaaaaaaaagtgagggggtgtaattataagtgctattgcatgtaattagttttttataattaggtttaattaggtgatgttatataagtgcatgtatgtttaattttttttaattaggttatttttttttttaatttttaaatggcatttgaaattttgatctttaagaaaaaaaaattagctattactacattggtgtgtcatttgaatatgattatatatatacatattttttttaaatttttaaaattttcttaattaggtaacgtatactatattcttaatcaaaactcatataattaaatgtttatatataggctggatttgtaaatataaaaataaaattaaaaatatggttaaaaatatttataatattttaaatttaaatttctttatataaaatatttacataaattttttttattttaattcgaaattaaactataacaaatttaaaaatatgattaaaactatctacaatattaaattaaaattaaaatttttttatataaaatatttacataatttttagttttaaatattaataaaaatatacttaattaataggatattctatgtagaaacccaaaaagtatggttaaaccaaaatatatataatttagcttcattattacaggaaaattaattttatgtctataacaattattctaaattataaatatatatatggaattaattaaaatgaatatacatatttttgaatttttttgaatattggagacgattgctctgtggcagaagaactctgttgaataattaaaggtttggttttttgactgaaaataagagcttcaactcgttgaagagtctactcactactggacatatatataacagtacaaataaaaatcattatgatgaatcatcacagcagcagcagcagcagcaatccaagtcaatacccaacgcagaacagcaacaatggccaacacatgaactgcataatcacacatcatata

SEQ ID NO: 325750 - DNA, 884 bp, Cannabis indica
ccagtaaagaagcaagaagcataaaaacctcccaaagcctcgcaaatccactgcaaaccatcggccaatgacctctccataataatcgaaacttttatctcggccatggtaggccccatgtccgagcacgagagtatatatgcttctgtgactgcagccatttccaaccttgcttaaacaaccatacatcctccattttggcttgaatacccactcccaagaaagggtctcttaatattcagttttagaagaagaagccactgctatcgattaacatcgactagaagtccataaaattcgaaacaatatgaagtaaaatcaacaatgtaggccatagaagaaccctgatctatcagaaaaaaacgaagctcaagttcacgggtttctgagaggagaaaaagtagcaaaaatggagatctaattagaccgatcacgttcataatttcaactcaaacttgcttcacatgcaagccttcagaaagaaaagcaagaaagaaagaaaatcccaaaaagataataaaggaaaaatggaaaatatttatttaatttttttttaaaaaaaaatgaattatcacaaaatcttcttttgaaaccaaaacatacccgaaacgaaaattagttagagtcgagtaagagtatcttatcttgagctcaaagcttgagaaataacaaaagaaaaagaagaagaaaaaaaccaaaaggtgaagctgggaaaccctaatgagagagagtagaagtgccgacaggtgggctcggttgggggttgctgaagaagtcaaaatagggacgacaaaggcgaaagctttaatggattcggatattgctgaagtgaagaccaaagaaaattttggacctgtttggaagaaaggaaaagaaaaaagaaa

SEQ ID NO: 325751 - DNA, 2219 bp, Cannabis indica
ataaaatagattacattgaaatggagttttatttagggcataaaacctaacagtcacggacattgtcctacccctttacatattgctggaagtttcctcgcgctatgaggccttctatctcatcttttaactgatgacattcttccgttgtatgcccaatatctccatggtattcacataatctggttgggtcccttttacgtctcgcttgtttcatgggctttggtttattgaaagcaaccttctgttcatacacgaggtagatactctcttgagtttcattaagctcggtatagacagtataaatgggtacgtatttgtcgtgtttcttttgtttcgtatctttggacgacctcttagagtcgtctttcctctttgacttagaagcttccgactcaaaatcttccacagaatcacatcctgattgttttcctggctccccgacttgatgcctcctgaacttattctctaactcatctattcgcaaatggattgaatccccttgctttggaccaagttgttggcgaagatcaggttttttcttgtttaagcatcctcgtaggtccgattggccatgacagctggcggatctcgttccacccatagaccgtattctaccttcttgatcattgttgcaacgagttttctctcctccttgcattgatcgactatgggttatcatgtgcctcgtggtaacactcgcctcttcacaccccgctcttctctcttgggtatgattcgtctcgttcccctattgagatttgtgcgagctcctttcctataagtttggaaagaacgttggcgatctcttaacgatgacccatgtacctcaggttgtgtcaccatatttcccttatttctatggggaatttccggttcctcggttcctagttgatcatatggcatctcgccttcaaggtatcccctagtttccccaggttgtctttcctgagtgttttggggattcctttgggctgcgtcctgccccctagtttgtgagtctcaaggtttgccttacagttatctttctccatggttaggttaattttgggagctattcccttgtgccgcgctagctgcagctgcctcacgatctaattcagcattacgccggtttgcctcttccaattgaagcctgagttggcagttttctaattcgacaattggtatatactttgttggatcatatgcgccatcctcatcaactagattgggaagagacctaccattgttcattctagacccttcaagtctggtgcctagattctgggtttttttggagcttgtggtctattcaaatgataattcgaaagatccttggggactcattggctcttttccaggacgatgagtggtaagcaccaaactgttaatgtagatttttgctaactaaatttgtgcctaaacagtgataaacatgcacagaaaaatgaaaacaaacacaaaggttttttacgtggttttgcagttaaaattctgcatagtccacaagtcaatcttattagatttttgatatttttccaaggccttttctcttatgaatttttgtccctttttcagtctaacttgcctctatttataattacatagtcaggcagttaattacagagttgactgatatctttacaacaattatcccctaaaattgtggggtttgattacatattgcgtaaaataagtgcagttgatattttagtatcacatagttgtgattagtccgcttttactaggtcaaagtaaacgtgtattaaacacagtataaatcataacattttggaatgtcttggtaggaactcagtatcaataaccttgatagcgagctggagcttttcccatatctttctcaggttgataatgttaatctcgtcacttctgctctgaagacaaaacgctccatctgacaatcacagttcttggtgacgaggtgaacttcaacatccaatatcatttgaatgtcagcttctaagatgcatggagttgactattgaaggtaccgcgagcatgtcttcctatcgcgagatggacgcctcactatcacttgctttggtttacccgtctgttatacttagtttgcatactgtatattatacgctgagtgccttcacagtcattatatctcatccacataacgaggttagtgccttgtcttgtacacctgaagttacatggtttctcgttgatgcacaaggcaacaacttgtatatctttatctcgcataa

SEQ ID NO: 325752 - DNA, 1442 bp, Cannabis indica
tttctggaaaataattgtctaaaacttaaatactctcgagttttcataatgaacttttgaaaactcgcatcattataataattcccttttgcatactcacatatttgaatccatctgaccccaagttgaaaatcgacagtggttggccgtatctcaaagatttaatgctttactttctcttgataaaccttaagtcattgagacacacacacaaccattttgcttaattttggggctgtacttcatattcattttatttgggataaaaactaactgagttctcaaagtggtgggtgtccccctttaacttaatgttaatgtagctgcatgacccttaggatactaagaaactcccagccacttcttgagacaagcagttagttttgttacacttcgatttgaaattttattattcgagtgagaacaatttttgttgaaatcgcacttgcaccacgctgaaaagatcttctatcttttaaatgagtgacctatcaaacaaccgaaggtatgactttggagagagggtcttcactgatgaatcccaaacaagtgatagttttatccccatgtcactgctggatggtgagaatcttgtgggaggagctcaagaaggctcgctatctaccgaaaaaatagatcgcatggtaaaggaattagcagtattagtcaccttagcagtgcgagaaatgaatccacggtgtctgctcaaggtagtttcgcttatctgtaaatttccccagacgtggaagttgaagagatgggcaagtactttaaactacgcgatcgcggggtcacagatgatgtgagcgatgaagggagtgaaacagattcagtggataatgccctgttagacgaaccttttttctgcgaggacctagtattgtgggttaaaaagtttgatctaacaatatttgaaaggctgaattttaccatactttcacttcaaaacccatgttaatgtaacaaccccatctcccgttcaccaatcctgcgattatcctgactcaacatgtaatggcttcaattcccattatgcgttgtggagtgatgcttccttttcaccctttcgtaaaggctatgctgacacattataacatctcccccttccaaatcacacccaatagttatcgcataatccttggattctacgcgatgtacatggaatacatacaagggaaacccacagtcgaggattttagttacttttatgatataaaacatgttggccacgacaatggcttttattgtttcagtaatgggccaactctgaggtcaatggggtagaaggcactgttttcaatatgggggattggaagtcaaagtagtttttgaaggcttcaggaaaattacactttcttttgacttttcattcagaaaaaactgagtctctctctctccctatctttggccgaccactccctctctttcttcttcattgaaat

SEQ ID NO: 325753 - DNA, 1351 bp, Cannabis indica
tgcctcccatggatcttccaccattgcccactcctagtgttggatcgtcatcggctgctcctggtgctggatcgtcatcacagcctcccgagactcagagaaacaacgatgatgacattacccgcctatagaactttacttttttttattatccgattcgaacatcgatcttttaacattttgtttatatactgattttagtagaacataatataattaatgtttgtttatcttttaatgtaaattatgttggttttttttgttaatataatattataattaaacaattatatttatttaaaaaaattaattaattataattaattaaatataattaattattttttctaaaaaaatcaataaatacttttgtcggcgcattactacgccggtaaaaggtggcccaaaaatgtacgcgccaatcctcagattggcgccaatagttttgccggcgctatagaagcgccgacaaaactattacgccggcaaaactattacatttttcccgacgcactattacgccggcaaaaggttatcaaagcaggttcatagcaaataagggtatcttttaacactggtgttttccttttaccggcgtgatttctcgccggtaaaactgtcgccggtaaaacacagttttaccgttgtgttttaccggcgcatttagtctacgcgcagtattgcgccagcaaagctttaacggcgcattcagtgtacttttgctggcgcattttcaaaagtaggttttcttgtagtgatagtcgaacaccaaattggtgtagactcaaaaccaaacactatttaatggtgtagaatttggtgtgttattgtagtaaatttgtgtgacaattccacactaatttggtgaaatggtacattgttattagagatgctctaagaccatctccaatagttacactgatttggtgtaaaatcttttactttttatgtactctaataattagatataacatccaaaattctatcaaataaatatattttacttaaaagttctcacattttatattatttatattaataactaaaatagttattttgtgatatacttataaaatagttgataataagaatttaaaatcttaaaataatttaataaaataaaatttttattaaatcatttacacgttatattttcttaaaaaaaatatattattaaaaattctatagttgattttaatatatgcgaccattttcaaatgaccaaaaaatatttttgcaaaaaagaaactcacaaacattgtcaaatactttaagaatattaagattctcaaaaaacttcaagtctatatagtaaattttgatattcctcaagactaagatcctcaagtga

SEQ ID NO: 325754 - DNA, 667 bp, Cannabis indica
aaaaaaaaagtggtactcactcctggccttttattcatttctggttaagcatgtacgcaaaggcaagtaatgaaggcacattagtttttatttttattcttctaaaaataaagcacattaatagtaaagagtaaagacatagatgaatggtaagcgacaagatatgaacacttgtaggagtaccatttaataggatccaaaagtggagccccacatgaacaaaacaagaatgatccatttattcttagagtaatcggcaaaaccttgtgcggctatttggtatatgctccttttacaagctcgaaacaaatagaatatacttgtcactgatgcccccacactacatctctctttctttctcaacacttctcaaaggagaaatttcttacccttatctaaaattatttctcaaattttattgtcatattctactatggaatgttatcatatttatattgccttcactttctataacaccttattattggctaataatattcttgaaagaaaattattaaaaaaaactattagtacctatactaatactttctataaataatacatcatacaactattagtgtaattaagttacagatcttatataacttaaaaaaaataaaatttaaaaaatatcgctaacaaatttatagagtatcacttataaaaa

SEQ ID NO: 325755 - DNA, 1372 bp, Cannabis indica
ctgcccacaacgacaaaaaatgatatgttgttttccataagggaaaaacgacatgttgtttgagcaaaccacaacagccaaaattaactggaaaaatgacatcgtttgggtcgtcttcctcagccaaactgggtcgtttttacctgtttttctgcaactcttcggacctgacccaaacccgatctgaaatttcgttttcgacgaccaaaagactccaaatcaattccaaatgtatctaaatgtaaaaattaagccatccatatagagttcatgcatcgaaaacacttaaaacaaagactttaaatttacacaaaaatttcgggtccgaacggtgttttttcagaatttttttgatatttctttgttttctaaaattaattttcatgcttagaatgatttccaatactatatgaatgtagtgatgcatataggaattgaaataaataacgaaaacgaaacaataaaatcagaacaaacacggacccaaaaactaaatttttcacgtgtttgtacatatacgtatataatgtatatattacataaaacattatcaatatatgaaagatatcattattatcattagttttatgcaaattaaactggattttcaattgaattttagtttcgtagtagtttttctatactttttatcattaattcgaaacagcccgtattttgattattttagtcatcttctcaggtgaaattgctaaaattaaaggtggttctctttctagttgaattttttgtttcggttgcattaggttgctgcgtggttgcgcgataattgcccaggaagcatggatcttgagttgaaggtgtgtgtaaatggtattgggtaattttttttatttgaactctataaatatatatatatatatttgtttatttagccaagtaaaagtatttttgtaatattgttactttttttctgttaaaactgaaaaaaaaaacccataaaaatacacaccacgtgcatttatgagtagattccaaactaaattgaaaaatatttttttttcgtatttattaattaaaaatatctttatattattttttattaaaatatacacacttttatgagtgggttgcccaagatactgcgcgattggtaaatcggtttcatgcgggttccgtccaggaggtttgagagtgaacgagtatagctttcggttccgattggttattagttggtttttagatcttttgttttaatttattagctttcgtatgtgaaaaattactctttacttttagtttatttgttctttttattgtttattttatatttatattttactgttttaagttagttccaattaatattttttatggggttagaatttttagttttatgtgttgaaactaatta

SEQ ID NO: 325756 - DNA, 806 bp, Cannabis indica
tttctatatggtaaagcttctccgctctgtctctttctaacacttattttactattgtggtctttagttaaatttctagaaaataaatgctaatatctttattattgtggccttttgttttcaggtgccagatactggtccatggaattacaactttatgggtgttaagcatacccccagcatgaagttcggcgtcaagcttggtactccgagggagtactatcacgaggaccacagaccaactcatttcttggaattcagcaacttagaggagggtgatatagctgagggagatcgtgaggatacattctcatgatttttacaagattaagctttatgctgaatctaatttcgtttcgggatagactcgtaaccgtttctgtaacatcagatttgaaaagctcatttcacaagtgttggtacatttttgttgtagctattatgacgtttttggcctatttgtaaagtttgtacaatacttacgaaagccttcaaattttgtaaatatacaatgctctagaagccaattttacgccttgcagtatggtacatcgtcttgcacaataaaattaatggcatcatcaaaacttaacatgaaattgaaaatttgcttagtaaagtggatcataagttttagctaattagtaattttttcccctgaattttgacatgtactaaattgtgcccctaaacttttttagtcgttaaaaatttcctttgaactattaagattgttaaatttaaggatttttgtctaattttagtaaaaaattctaacatggatgaaagttcaaggagcgtgattt

SEQ ID NO: 325757 - DNA, 791 bp, Cannabis indica
tgtactcttgttaattttttattgttcattttttgttatctacatattattttttgttgttattttcatgtagttttttttgttgttttcatattgtttctataaaaaccgtaaaaatatataaaaaaaaattaaaacataaaaacgtaattattttacaaaaaagaaaataatgtcttatgtaattattaaagaattgatgcgagtgcacctaggctattaactctttcgtacaaattacattgaataatatgattttttaggaaaatttagtagatggtcttgattctcgaacaatacagttaattgagggcaacagttggatcatgagagtagtttattattagcataatagcatttgaagttaatccatatataaatagtatttgctagaatgagtcaaacatatttcaaacagcaacaatattagaatgcaaattatgtatgttatacaacgtagaccgttctttaaaacgaaaacgaaaactaagaagtcatccgtgttgggaattaggttagctgatttagggagctataacttcgttattaatacgaagaactgagagatcatggctaaggcgtatctgggtcttttgctgcaactgtccaactctttttcacagtttccaaaaattgtatttttttcccaaaagaaaaaaaaattaaaaattaccttcttatcgtttttgtgagatattgtccttgataaatttgactgtggtaaaaatactatttcatggacatatggttatcagatattcattattctattttatttttttttagtaaaa

SEQ ID NO: 325758 - DNA, 2082 bp, Cannabis indica
ctatctttagccgccacttccctcttcttttcttcttcaatatttcgaaattcttagtgtgagagtagtaaaataatttccaacaacgttattaccgcaacaatatttgctgggatattaactccagtagtcacaactggtgcgataggcaggttggtgcgattatttatgccctgatcgcccaactggggatcacgaggctcttcattgttacggggcgtctgagaacgcaccctgaagacaacgttaaggtgatcacggagatcgctcctatgaacttggtatcgccctcctcgcagtgtttccaccaaacctgacctggtgtacttgctgggagtacgactttgcgaagacgaagagccggactcaatgtcattctcttcgtctcgcggttggggtctgctgcaaggattacatcgctctggatcttcctccgtttgcgcctcgcggttaaagttccttgcagattgatttctcgacattggctaattcaaatcgagcccttcctgatctgtccttcattccctacgagtacggttatttggacgtctagaattgttacctgggggttatcaggttatcaaagctggtagcgggcactcgaggaggacgtcgggtcctattccgtgcatcgatctcggcctacaaagcacgtatttgatcctgtattgccgtatactgatcagtggttagttaaacgatgccctcggatgctattgcaggcgtaataggtggaaaatgtcccgtcgtagccgccggtgtggatgtttccccaatgtggggagcagcagtttgggggaataagttaagaggtgttacgttcgtccatcccacaccgccagtgataatatccgcggggggtgccctatttcccggcagtgggacattcatcatcccaatgctgattgattcgttgttaagacctccatttgtctgatttccagccattgtgattttccttctaaatcagcaaagtattatcgttcccacagacgacgccaaatgttgttgaaggaattttacaacaccaaaaataaataatagcattaatagtaaatatgaaataagtttgagtactcgactcaaaacggcgagtattcgaattaagaacacagatacttggcaaaaaaatggaaaagtaattaacaaaagaggaatatagtggttcaatcagatacatagtctgcttagtccactgttgcaaagattctgtctccccccatttcacggcggatcactcctttatatacaaagaaagtgtcctatcatttacacaaggattgcattcattgtcaatccgtttataaattgatttacaatattaaagctaaaaaacgtaaacataataaatgaagaatagtttctagtttaatctactaaatagaacaacgtatgctacttttctcagtgcgagttcgctgttcatattcttgcataagttcgcacgcttagaatgcatttgggactagtcgagtctaagatgtctgcgtctttgtaaagtcccctttgcggaaatcatataacggtctgatagaaccaagacatgcgagtctatatcggtttatcgaggctgttgggtcatccggaccagctcgcaatatagagaattgatctctctgtttttgcaggaggatcgcgaggatactcgcatatatcttgatatatgcgggctatagtcgttccttggtcctacataatgcaagccattcgaatgcgattagacttggtcatattcgcatcatctcgctgagtccggttcaggcgaggtttatactcgaggagtctctcattgacaactcagctttccttggggaaattgaatacacgtgtccttttaaataggagtctggtctcgagtttctaggtgagaaaaatcttactataataggtctcttcaatatctatccatttaatgctaattgacggttgtaccttgaatcaaggttggatacatgcgcgtgcttaacagttacactgttggaatttattttaccaggatctttgatctacgcacaagtatgttgattaacaccgtaaatatgaactttctaaaacgatgaaataaacacgtataaagtttaa

SEQ ID NO: 325759 - DNA, 1314 bp, Cannabis indica
cattccttccaaccaaacgccttctaagttcttccagcaccacctttttttctcccatctctctctctctctctcgcatcaaaccccagaagccacaaaccttgaaagtacaaatgccctgtggttctttgtgtcctcaccgtcgatgacccaccgaaccaaagccttaaaggctgaaaaccaccaaatctttgtccatcgccaccaccacgtactgagaagacgaaccagaggacgacgacatgcaacgttttttaatattatttttacaattgttagtttctcgataataatcgtaaaaaacatcgaaaatatgagcttacaaaccgtgtcgagcttatccttttagatattggcacgacacaacctgtatcttttaatgggtcagcacagcatgactcatattattgttgggctttcaaaatataggtcagattaggccgacacgcacgtatttacaactatgctcaaaaaacccaacaaccctttacaatcttgaatcacttggccaaaggcagatggcatctaaccattgttgagtatgccttgaatcgccaaaagactatatttgagaaaagcaatgcgtcttctactaactcaaaaacttccttaattcgcaacgcctccaccagctccaggcactttctactagtgttgtaaatataagcaggactttttgacatggtatgcaattgacatgacccgagaagcacacgcacaactaaacacgaaagcacgacatgatacgatgctacaaattggcacgacaatcccaaaagacacaacacgtaaatacaaataaactagcataaaagacatgacttgtcaaattaataaagcctatcatttgaaagtaataataataataataataatatatttgtcaatcaattaaaaaataaataaaatgtaaatacaatattaaatattataattctataattaaaactactaaaaaatataaaactaaaactatatattaattaatttgtagagtgtaaattttttgagtacttaaatatattacaattttaataattttttatatattataattttttgtaaaatattgttgaaaaatatataaaaaataacagaagttatatatataaaaaatacatatagtttagtaattagcttattaattataaaaaatatgaaaaagtaaaacacgaattctatcccgtatataaaaataggctatcatgtttaagaagaaaaaataatgtcatattaaaaatggttaatttcataaatgcacaaaaacaataaaaaaaataacaaaaatacggtttcacagaattttaaacattt

SEQ ID NO: 325760 - DNA, 1799 bp, Cannabis indica
ttgggcggtttgggtcaattttcaacccgcccaattaactgattgggcggtttagaattttgtcgagttatgtcggtttgtattttttatcggttttgtcggtttggtttgggcgggttattcaagttgggcagtttacgaaaatttttgtacacccctaatacaaagtacatgattgtaccaactcatacatagtaaacctggaaaaaaaatttgcagctgtcagaaatttgaatatgatgaaatgccttgctcacatgtaatggctgtattaaccaaaaagaacctatcttgctacagctactgctcatactactacacaacaaaagttttttttgtcaacgtatgaagatagtatcttatcactagcagattcaacatcttgagatataccagatcatataaaggatatgattattttattcccgacacacaagaggccagcagggcggccaagaaaacaaaggtacaaatgtatgctagaaacaaaaacacaggtcaaatgtggggggtgcaaccaaaaaggacacaacaaaagatcatgcaaaaatgaaccagttctaaagccatcacgaaagagaaagaacaccactacataaaaatagcatttttttcataacatttgatacatactattaaagtaataagtactacattagtactatgttttagcctactatgaacctaatggttccttttagtttacctaaacaaaacttgtcaaaaaaaaaaataaataaacaaatatgttacccatatccatctatctcaagttttatattttgttataatgatcttgaaatgataattaatatgcattttatacacaaaaaaatatatacatatataacttatggtctgtacttattaaaatatgcattgatcttgcaatctgacaaggacagatagatatttagttatgcagttcaaagatcattaggctgaactgcgaattgtatctaaacttacctccctaaaacttcaaaattgcctattgatgaaaatggtaaggtttatgattagttaatagcagctgccagagtccttctaaggatatgccttagagacagcgaacgacattctaaatgtcatcccatctaagtctgatcccaagacaatcttggaacgtttcaatggttgtatacttagtgtacaccattattagatccaatgatgccctaactgtacaccattattagatccaaggatgctctgatgatgaacttaagaaaagctagttctgctaactaaggtttgcatgtttattggttgttttgaaaaaaattaagtgtggactattctaaagttataagtttagaaaggtttgtttacaaatacgtaatctctaaactaaagtagcaaagtagtagagataatctttgatttaaatactaaatgttccatcatcttctacaaaagtcaaaaggtgatcccactgcctctgttgtatcgacgcgagtcgtgacaactgaagagaataataccattgatgttcttagatagaaagtcatagtacctcatcgtcgtgggagagtttctagaaacccatctcgttatgacttggatgacactagtgattacaatccattgttagtttaaacaagcaatagaaagtcctagtaaggaactaagactcgaagccaagaactttgattcagccattcacatggattaaccaaaagttgtagaatgcaaggacaagaagtgaaactatgctaggtctattcaatggacttaagctaacttcctgctcctagtatcatggatttgatgagaacatctaaacctatggcttgtgg

SEQ ID NO: 325761 - DNA, 717 bp, Cannabis indica
ttttgaaattatttatgtaattttctttatgatttttgaaaaattacctttgatgtggaaagtcttttaaaattagattattacttatttggttaaataaatatgtcatttccttaattagagtattttgtattgattttgtatttttaaggaaagaattgttatttattttattcattgtgatatgatttctttctcaagaaacagtctacaacttgtatcattgttgtataatttattttcttatttatttaaggaaacttttgttgaaaaattgtctaagtgcaatgaatttgattgaacagattgatagtctgtttgaacgaattctaattttcctttttgagaagattttttatttaatgcctaattatttcttgattcttcttccatgacctaaagggtttttaaagggtataaagacatccttaggttcgctgatcttcattagctctcttaatgtattttcttttattaagttattttcaaatttagaaagtatttttgtgataagccccgagatcttcggatcaagaactcaataaaacagtagccaaacagtaggaattgtatattaaatgtattgagaaattcaattacaaaagataggagcccttaggctcctttggtgcaattagagtatttactcaaaacattgcataccactcaattccccttaacattctatatatactattgtattccctccaaaacact

SEQ ID NO: 325762 - DNA, 1236 bp, Cannabis indica
aaagaggctatccatacctattttcatcaagaggatgtcccttggattttgggcacccccgtgaacatatatatggaggactcactcgtatggcctttcacatccaatggggagtatgtggttaaatgtggatatagggtagctcgagaattacaccttagtcctacccgctgttcgaacatggatcaaataaatgagtggtggaaaagatggtggcgacttaaccttcccctcgaatcaagttgtttggttggaagctttgcaataatgggctcccagctaaacttactttgattcataggggaatgaagattgaccctacttgtgatatatgtggtaggtatgcagaatcacttactcatgctttgtggtcttgtgctaaggcgaaacaggtgtggaagctgctgcctttctacaaacatatcagagacagcaaaggacagtccatgttcgatatgcttgtggaattcaagaacaagttgtccaaagcagagtttgaggaggtaattacgattccttgggccatttggaagaaccgagatagaaaatggaataagaagcaggtcatgaatggagcaaggctaatcgactgggttttcaatagctattcacctccaattactactcagaagcaaggggataatatcactctgcagatcacccacgatggtacgtggttgactcctcccgaaggtactgtttgtgttcactgcgatgctgctgtcattccaggtcaggagggcgttggtctggggtccgtttggagagattggactggcactactctctcggctgggatgatttttctccctgtgatctgccaggcggttctggcagaagtgaagcaattgttgctgctttgaaggcgtccccaataggtgagaacgagccctttgaaataagaacagattgtaagatgctggtggagagcttcaaggataacgacagcactttaagtgatgttagcattgttataaacaagataaagaggcaccaaatttttccccactgtacaaagcttatttttgttaagagaaagaataatgaattagcccataggcttgctaagaaaagtcttgagaataaaattactcaagtcttttctcattttttacccgagtggttggctgctattggtaaagctgacctctctaattctttgtaatctttggctttgtgaataaagttgtttgtttttcaaatatatatatatatatatatgcatactggtcactc

SEQ ID NO: 325763 - DNA, 1053 bp, Cannabis indica
gacattccaaaagttgccaaaactactttcttttcttttgccgtgttattcaaattgtactcctcaaaccgagacttgatttttgcaaaagcactggtgcctctatatgtcacacggtcagtaaaatgctcggatgttagaactatgagtcgtggagccatctgaaaaaatattgctgatgccctcaaaaaaatagttgacaaaatgtcaacattctgtcgatattatcacacttagaaatgacagaaaataattaatcacatgtcgacaacatatcgataacctgtcgacaatttatcgacaaattacatcaaaaaattactgcacataggctgtcataaaactatcgatatcccgtcaacatcctatcaatgtattctttaaaaaattgaaaaaaccagttcgtgttcaaacaaagacctactatcaacaacatattgacattttatcgacaaaaatcgatataaccaataaattcttacaaaatatatcctaatcaaaatgtcgataaaccatcgataatatgtcgataacctatcgatatacagtaacaaaatagaaaattcttgtgctcaaactattttcaattttggtcgatattatattgataacatatcgatatctcatcaataacactattaaaacacactgaaaaacatacagaaaaacacacattaaccaaatctatgaaaaatctaattttttattttaaaaaacttacttttttactgagcttggtggtggtgacggtttgactctgggttctctcggtggtggcctaatgtcggtggttcgtggtcgtgggttgtcgtgggtcgcctactgtggtcttcattgtcgtcgtcgtggtggtgagcgttgggtcgtctgcgagaaatggagagagagagagagagagagaggaggaagaaacagatgcgagtattggaagggaaggggatagagtacgtttacggtccggtttggggttgggtttctatcaccgtaccgggttggttcgttggtgtggtggagagagagaacgacgaagagagagaagaggaagagagagac

SEQ ID NO: 325764 - DNA, 909 bp, Cannabis indica
aaaataataaaattaacaccaagatacatattgattcaaattatataaatccatgtgatttatggttctactccaattcttgaataccaccaaattctttttattatttaagcaaaaaaaggtacaatataatcgagagaaatcttctattggatctctcaaagtatttcaactctaacacccattgcctaagattctttatacaaaatttaaacttaacctccgtcttttctctatatctctctctctacctctcaatttctttctctctcaaactcaaagtcttctcttgaaactcgtcaatccaatgttcttaaaatgataagtgtttgtggtatttataggctcaagattaagatcctaaggtcagtggctacaactgataagttgttaagatagttatgctataataaacttaacaacttcctcgaaacagaatctccatgtcagcgtacaggacgaggtgcttccgaatgaggcgtacgcttattggataaaggatcaaagcgtatcctgaaagggctttcgaataagaaaagagggaagtggagtcaactatcgagaatacccttccaagaggaatagctagtcatccaagactccttttcgggggagaactagttttattaaagactattggagaacattgtcccacatggattaaatgtaaaagtattgagtcatatataagaacatgagctactctactcatcaccaattgcttttgagatggaaccccatgattctcgtcatggtatcagagtcatatccctagtgggctttcgatccacacctatccaggtggttaaccagttgcacaagattcagatggacgcttgagatccgaacaaaataagcgagaaaatggcatggcctgtgataaggtcattcaagattggtgagcaaaaa

SEQ ID NO: 325765 - DNA, 1158 bp, Cannabis indica
gtgttcgggtctgggtccttgtccgtgtccatgtccaggtccggtgtcttgggtacgggtccgggtctgtgttcggttccggatcccagatcctaggtccgggaccgggtccaggtctgggtccgggtcccgggtttgggtccgggtccaagtcccgggtgccgagtccaggtctaggtctgggtccgggtctaagtctgggctcgggttcaggtcctgggtcccgggttccgggttccgggtcccgggtcccggtccggctccgagtttgggtccgggtcccggtcctggtttgggttcgagtccaggtcccaagggatctgaatcttgaattaagttttttctaaaataaatgtcggatcagatccgatccaaaaaaaattaggcggggcggagtggatctgatccaagatccaataagtatccgaatgtttcggatcagaggtgatccgtcgggtcggagctctaacccgctccaactaagtggatctttttgacatgcctagaattgaatggcctgtttgtatatttaaggctcctttaaagaagtgactggaagaataaaagctttgtaagattctgttagtcttgaataagaaagatatttatttagagcatgaggggtagacgaattatcgtgtatggaagaataacactcaaagtttcgaaggtaagcttgtggtctagtaggtctagttgttcttctaggaatggctttggttgttcattggaaatttcctgtgaaccttctgttgcagctagtgtggtcactgtgtctgtagcaatctcatctatactatgcatagaagaactagaactagtagaattagtagtagtatgtggataatcatcaatgggagtgttaaaaatggtgttggaaggtagaacattagtggtgaaaggatcaatattagcagtgctttcattaattttgtgaaatgaaaagatattttcatgaaaaaaaacatttctagagataaaaaattgtttggtgttgatgtcataaagtcgacaccctttcacaccttgggggaatcctaaaaagacacaactgcgtgctctaggagaaaattttgtcttatgattggaaacagttgatgcaaaaaccataggatggtccacccttaatcactttagaatagctatcaaacatgtaaa

SEQ ID NO: 325766 - DNA, 1848 bp, Cannabis indica
tctaacaaaaacaatgaaaaaagaattaagcaataacttaacaaaaaaataatggtagaaaaaaagtaatagtaacaaaataatgataattttagaagaaaaaaaaagagaacccaaaaaaaaagtactatcaataaacttaataagatttccatgaataattatccctgaaaaattcatcagagcgactattattagaggtgttcataagctggtctaattcaatccgcacaatccaatccaatctaatcctcaaagtacggatatctgtacttgtgcggtttgggtcttgactgacatgtaaaagtaactgatccaattcaatccacatatatctaataaaaaaaaaaaaattaaaatataatatatacaattaacattttaatgtaaagaaaatagttatttaaaagtctaatacatgtagtacaattatatttcaaaacttaataaatcaaatgtatatttcattcttatataatttttttttctacatacaatttaaaataaaattaaatatttatttatacatacatataataaaatatacggtacattatatacaatataatacaaaattaaaatacataattctctaaacctaatttgagccccccatatttttctctctctctctggggaaggttgtgatttccctcatctcaactcatagtatctcactagttgagtacacactgtgaaaatttcatccctcgttttaatcctataagcctactcttatcctaagtgtttaggattgatctggtagacactgatgtgaagtcttcataaagttcataaaacttttggattggataatcgatataaattacaaaaagaattgagaaaattttgagaggtattcgttttatgtaaaaccttttttttttattaaaacatgattctactttctactctgatttggactgtaaaaattaacacgcaatgctggtataggacccaggttgagccctaggatgttaggagacatctttagcctcatggttcattgttttagggtcattgtggcctgtttggttgaacttgtcgaaggatagcacctagaaacgactttgccagatctgagtgcttacttgctactgtcaactcgggtactgtcacatatccttgtatacaagttgatcaccttaatcttgagaggtaaggctggaaatttgtgacacgacacgactacataacttgaaaacgatacaatataaataggttgggatgaaatatttaattttcgtgtcaaagtcggctcgacacatttaacatgtttattaaacgtgtcattgtcaaattaacacgcttaatctcaaaatgacacgattataacaagtataagaatatatatattataaattttataaaatgtaaaataaaataaaatctctaaaaaattctcataaaaatacttttttttttcataaaaaatattaataaattaaaattatgaattttatgagtaatatttgtgtttatatatataattatgttaattgtattatcatgtaataacatgtttaattgtgtgttaaacaagtcaatttcaaatttgtgatatgacacgtttattaaataagttattttgtagtgtagtgtgacctactaagaattcatatcgtgtttgtgggaaatttgatttttttttttatgcatatactacccaaaaattaatttcataaacctatatgtattaatattggccatatatgtcaacgttcctattttccccataatacccctccttataccctcccgattttctcttttttctttatcaaagtcacactaaaatgacccattttacttacattttgcctcatcaaggtttgaaactccattcaa

SEQ ID NO: 325767 - DNA, 771 bp, Cannabis indica
aaaaaccttaaccctactttatatattttttatctatctcagccgcattgcatacatctcttcatcttctctcatcacaacctaatctcaaagtttctctctctctttgttgcagtggcggtggaggagatctctcttggtcgcagtggatggtggaggagacgacggcttcaaggtgcggtggagaagacgacgacttcaaggggtcgtggaggagacgacgacttcaaggggcggtggaggagacgacgacgacgacttcaatcaaaatggaaattaaattttgtaagaggggttatattattggcgatcttaaattcatcgatttgaatattaaatgtatatgtatagatttttggaaaggcataaattttcttaatcaatatatattttccctttattgtatattctttcaattcaattgttgccttcgttagtgcagaatactggatttacttacctaattattcatagcatttattttaacctttggcgttattcaaggagattgattggcatcctttgttaatttcatcttaagtaatttatttatttttttagcaaaaactaacaatattaaaacctttttattcaaggggaaaattcatccaagctccctctccttgtcgtcgatctggtcttgcagcggcgttttatgcggtctcgtcaagctccctctcctccgccccttgaagttgtctctgaacattgtatatatgtattttactatttaaaaagtcattttttttttcagaattgtatatgtatttt

SEQ ID NO: 325768 - DNA, 1265 bp, Cannabis indica
actttcaagaaaagctccttcaatagctctacaagtattgaagatctctccagcttgaaatttcacaacttcaatctctctctccagaaaacgatttaacgcagcaggaaaacatgattcccaaggcggaatatccattacggggaacatgtcgtttcgtcccaacagattaaacatgtttgcaaagaaaacgaaagagccgcaatggaatgagtaggcttctccgtttgggatacgaacgacatcttgaaccaccgaagccatcataggatcgtaaacaacgacaagtcgttttgtggtttgagagagtgactggagaagctcagcaacaggttcgcgaaggttcgttgagcattcgaataaagggaacgagattttgacgaactcggaactgaagaaggggtcttcatgatgggatataggtaatgaagatgatgatgaaaattgaagtgggtaatcatggaaatggattttggtaagttggtgaattgggtttgaggctcgagacttgactcgagagatgtgaagagttgagctaatgtagtgaactggaatgtcgtatgaggaaacgacattggccaattgaaggaactggtttaggtggctctggcctaggaatggaaccattaccaccacaactgacaatgttgatgaatctttcatggcagcactagtagcttccattaatgggctttaattttctttcactgttttcttggaaagagattacaagtgttttttgctttactcttgttttcaagtttccactataaatagagctattggtgaccctagtcggtgataagattctctgtaaattgtaagttgtaaccaataattgtaaataataagacagagaaatgttagaaggttggtactagtgctgtaaatatgggccgggctttttgacacgatacgaaatcggcacgagtctaagagggacgagcatgatctgacacgaaaaaatatgggcttgagcacgacacggcacaatgctacaaattagcacgacacggcacgaaaaaaatagcttaagcacgacacgacacgacaagcctaaaagcacgacaagcaagcacgaatataaaagctcaaaaaataggacacacaaataaatatgatttttgaattttgtacttcataattatatattttgatatttatatacatatttttattttaaaaaataattttcattaaaatttatttatatgtaacactatttatatgtatattttttaaaaaatgttaatattataaatata

SEQ ID NO: 325769 - DNA, 1091 bp, Cannabis indica
aaaactatcatctatacatttcttatctataaacaatgatctttaatacttagcttctttttagctaagttgtacaatctacatctcaacacactcgatatttctttaactagatacataggagttcgagtaaatccttcatgaatacacctgttctgatttttccacacagtgtagacagtgcagcaagaagaaagttactaacaacagttgtcatacctgttctaggagtattaatccaactcctccagtctccataatgcctcggccaaaggcagcagccactccacaaaaaatatattataataaaatattataatatttggaggttatattatatgagacgtaatgtaacaaacacataaataaatattgtaacatgaagagttacaaatcttaatataaaatttgtaacttataaagtaatttgtgacataaatacttaagtttaagttttgacggtaataattattagattatattttcagaattttcgtaagtatttggtcattaagtgtcaagttaataactatgtggcagtctctaattggttgaggtcattaatttttttttatttaaaaattaatttaaatatactaataagaaaatgacgagtggataataacttacacttatcagtttcttacggaagatctagaaatttaacttaggtatgattatcgtcaaaaattaaacttaaatatttatttacaactgagagttaaaattagatatttacgccgcaagttactctaacttatatcacatttgacaattatgtatttaaagtgaataaattacatgtgggagtatagaccaaaatgaagatgtttctagttgttagaatttgttacaatattcatttataatgtttaaatgaatattgagatgtttgggaatgcgttagctcgaagaggagaattaaaactcaaaaatggtgtgctaaaaatgtcctaggcaacatgtcacctaaacttgtgttggaagattttcgatgttttattgatatatagtttacggttatcactccaaacgacatatcgcatgaagccattttatgagaatatattgggaatttagtgggggacgtt

SEQ ID NO: 325770 - DNA, 757 bp, Cannabis indica
cacacgtggcgtccctatagattagggcgttacaatggcaaactctatatttcaagatatattctctttaaggaattttctttcccttatgaatagtttagtgctcaaaactagtcataattcctctcagcaaccaaaaacttcctttgtctcagctattatccttatgtgtcctcactttaaaccaccatacactacgacagatctattaaataccaatacagagattgaccaacatgttttaactgatagtaatgagccatatgtgcagtcaaacaacaatactcttgatcttatgtctaatagttggcatgtaagttaaccatctgtgcttgatgtagctaaatcttcatgacaatgtgttgatatgcctaatgagcagtctgagtaaaatgagaaatgtgtgcctaatgagcagcctatcttacatgatgatctcacaccagttgttcaaccatatttgccttcaattctcaacagcactccactacaagcaaaatcggcaactgacctggcaccatcttcagtatcacctgacactgctcatttaatactagcactacttcttaacattgtacggtgccaaaatgctcctaaacaacacaacaaacacactatgaaaatcaagtcgaagtcaggtatgcacaagccaaaaacttagttagtttcaagggttcccataacatttcaagaagcattgcaaaaaaatacagtggaacaatgccatggctgatgagatcttaaccctaacaggaaa

SEQ ID NO: 325771 - DNA, 913 bp, Cannabis indica
attaatattgagtcacaaatattattgttaatatatttttagtccccatttttagatcctataatttaatttattatcagtttaaattccatattttttcaaaagtttttttctttattaaataagatcgaaacttgtaaatgattaaagtatacatgattcaaaataatattaatatgtattatataatttaaacttttatataattaatatatttagctacaaaaattgagtgatagatgacataagtgataaaaatcattttaatgatctcgaatttggttgtgactaaaactgcttcatttttggtaattaattaattaattaattggagaaattcttttatttatttataaatcaagagataatagttatgtgcacggaagtgtgaatgataatgaaaggactacgtaaaattgatgtttacttaaatatacttaggtctattaatattcaagaatttaaaaattaagaaaaatggggaaacctatagctacttaattactagctagttagtcaatatgtattgaggagttccacatttttgtaaatcaaaattgattacatacataaaaaaatatagtgagtgtgaatttcatcttacaaccattttctaactatatccttatgatattttttaagctattgtattaatttgctcggatagatgcatctatatctagctggggttatacgctacattattcaattttgtttattatacttaattttaattaataataattgtatatatatgtcgtaaaacaattaataagaggaaaaattttgtaaaaaaaaaaacttacatttagtcacaacaaaacttgtgacttaaagtaaaaatattgtaattaattatgaattatcattcttatgttgtgactaaaagatccgtgactaaaaattttagtca

SEQ ID NO: 325772 - DNA, 1096 bp, Cannabis indica
ttatatactttcaataaaaattaaaaaaaaaaaattgacttttatagttgattaattctacacctatagtgtgttgatgttgaaaaatagctcaactattacaacataagattttttacatcataataatcaactcatttaaagtttgtatactctagcaatttacacaattccctctcaattacagtggttctttctagtttgactgtttttcaagctcaaaatgatcttgatgatgtattcagacagagtcttgactagttagatgtgagcaagaatttgttctctttttcaaatgatgggggtcttctatttataggtaggaatgatcgttgtaccttctattttctctcgttctgattggtccacgttgataagttctcatgtatttcttagcgtgtttcctctttccccttttcgaacttttcaagctctatttttattttgcaagttctcctcctttatttctagagctatgctcctttattgtccgagttctgctctgcactcttttcctacttcaactttgcttctttcgagctatcttttcctttaagttaaacactacatttcttagatcctaccacatcatgatataagttttttcccttctttcaatgttgcaaaatttctttcttaacctgtagtttttactgcaagcgtacatcgtagttatagtaaaattttaatactaaaaaggttgtcgaacccacaaagattgattattaaatttcactaattattatatttttttaattttatacttcaattactgaatacaaagtaaataatgattaagaatgaaataaaaaaataactgaaaaataattagacaaacaatgatttttaattagaaaataaaaatctagagaattgatttctctattttaaactatgaatctcactttactaattatctcaattttctctataatttgtagttttaagaattctaatataatctattaatctctctgagtgatgatagattttattttaattaactaacaagatatctctattcaatgttaatcaattaagcactcataaagcaatatgattctctttaaataaaactcatagaattaatggaatc

SEQ ID NO: 325773 - DNA, 1109 bp, Cannabis indica
aggggaagcatggccccggacataagatgggtttggcgtcccgaggcaagcgatgaaagaccccatacgcggacggcttaatgccagctacagtcacaattttctccaactgatgggcacagatcagggtggagcaaagctcatccgcctcccaaccgttggaacggcaagtatagttctcctgggtgaccagacccttcattacttcctctagggtggccagggtaaccgcccccttccgagaagatttggttccagatgtaggagtagacattttggttctgtaaaaagaaagaatccagcagttagcccccaaaccaaaccctagtgttaaaggagggaatgagggtccccttaccgctggaaagaggccccctccggatgtttgccaaagatggaaacccaaaggattttccttagcaaacatcgggtgtaaaaatctcaaaagcagcgaaagcagagggaaagtaaaaaacgcagaatgtgggaacaaaaattaccccataccctatataatctttcgacagagggatcgattgcaaagtagaaggaggaaaaataatgaaacacaaataaaggagagcctatacaccacgtaacatacttagccacagttatttcccaaatatcaaagacttaaccaaaaagttttgccctagcgtgtaagtaaacagtaaagacataaagtgtcaagaaaacttacgtgaaggatgaaaactgggggttggtgttgatcggcgataaaatgtggactgccagcgatggaggaatagcagtaggaaatctatggtttctgaaattttttctcaaaggtgttcttgtggagaaatggcaaagtggtgaaagtaaccaaatgaaggagaaaggttggcttttataggctggaacaggtgcaaagcagctgtgatcacgcgccatcgtacagtaggaatcacaatcggttcgcattctgcagatccaacggttgggatacatgctcatcaggggggctaaaaacgcttgagtattcttctaacaccgattaaatgcgtcgggtcattaatggacgggaagcaaatcgttgcttgcaaaaggaaataaatgttaatgatgactatcataaatgcagc

SEQ ID NO: 325774 - DNA, 940 bp, Cannabis indica
attaaagtgacatgcttaaacttatatatatatatatataaatatatacccgtatatatgtatatgtttggctagaccaaattctaaaacacagaaaaaaatgcaataaccccaaatttacagctattgtaatgaaaacccgatagccatttttgggtttttttcttttggctagtgaataccagttcaacatagagaataatgtataatgaacgaaacttcaaagagaacagaacagaacactataagttaatcaatccaattgctattaaaattaaacctatattatcagtaccaaatttctaaccagataatgttaagaatcaggggaaaattttaaaaaactaatgtgaatcacttacaatgaataacaagctccaatactcttaaacccacaaatggagtcccaattattttaaaataaataaaaaatcagaaccctaatctaacagacaaatcaaaatcaacgacaatgaatatatatatatatatatatatataagtcaatgcaaacaaatttttaagaaaaccaactgccaaatttaggattaaacatttgcgaaaatgaaatccataatcgcaatataaagctcacagaaaatgagaaaactatgaaaactcattaacaacattggaacttgaagtggataaataacaatatttaaagaaaaggagaacgtaaaatacctcaataggggtgaaacggaaggcaggacctccaaatctccggcaatggaggttggtttaggtttgggtttgggacgacggtggccgagagggttgggtttgggaggaatgcggctgcgcgttgaagttccaataggatttggggctgaatgagagtgtcagcgagagagatgagatgaattaactgagtttaagtgtcaactatttatatgttttttttttttttgggtgtctgttattgtatttatttatt

SEQ ID NO: 325775 - DNA, 1610 bp, Cannabis indica
ctcttcaatacgtgaatcaatagtttgtacatccttgtctcgctaaagactgtgccatctgcgagttataaatatactctattaattctgcatataatgagttattccattttagtattttttgatataattattagtatttttgttgattcatactccctaagattgacatgtgtcaccctctgaagtaccagctaaatttcgagtataacaattgccccttaaaaagtctctttttaataaaaggtgctttttaaatgattattgagggtattttggtagtaatatattttgaaaatatgcatgttattgattttggcagttttgtggtttcgagggacatcatttgcattaatgagccatcctttccacttctcttccaatttctatccgttggatcttctacactttgatctaatggttacaaagttcaaggtataaattggtaaactccatttttcaccatctttgtcatttcaaaaaaattcttgagctttttctgcaaaaaactccatccaattttacgaacctttgcatgccatctttgtctctgatattttttctgcgaatctcgtcgtacttacttttcgaccttaagcgtttagaaagatcatcatgccgttcgcttcatccccaattgcagaattgttcatcgcaccacaatccgatttcaaatagtaagtgacatgtccttctttgtgtttttctttacattccttggtttgatcattatttttattgcttgcacctttgtcattctatttggttttagtgattttaggttaaatttatctgggtaatttttagggtttacgcagagcgtaggcttttgggttcctcaaatttataagcttctagtttgataaatttcatctaagaattgggattgctctcttttttgtaacaatgtcccaatctggttcagaagtttattctctagaagctttagaaatagagtgccctagtgaacttgccaccccgtataaacccagaatttcggaacccaagtcaaaattagagataaatgatgcaaaaattagggaccacctaataaagacccaccaggatgatattactagtcgtcataggcgtttcttgcaagaaataacgagatgctgcttggcctgaacctcccagtttatcatctattcctttgggtaggcctttatttttacccagagtcaaaatttctttttcactagatgacctggattttgaatcatgacttctaagtctcttaaatcaaagactccccaagaccccaacattacattcgaggttgaacttatcgagtcgagggtacgagccatcggagactatgtaggtagcatcctaaggacttgtagcattgaccaaaaatgaaaatgtcaggttagatccgtagcccctggcgagttcaactattacccaccagaacggcttactcgcgaggcacccgaggggaccagtggcgaggcgagtactaatggctcgacagggataggctcttggagcctcgagctcattggggtcggagcaatcctccctctatgagattatttcaaggacttcctcaaccatctaagaatttccccattccagttggttcctatttgttgggttttatgccc

SEQ ID NO: 325776 - DNA, 1097 bp, Cannabis indica
cctgggaccaactcccaggtcctgaaagaaggcgggccgcgtcatgctaaagaccatgccgcggcacttgggttccaaacccacaaaaccagcaacctaaactcgaaaattcagctcaaaccacatccacgccataccaaattcacatataactcaaagttattcaccatgaattagcaagctcaaagataaggcattaaaatacatataacgtgcatcaaaacccacaataaaactcactaaatttcagactacaaatccatgaaaatcaaagctccaacttgagcataactcaacaaattccattaacaagaacttgaattctcaagctagcctccaccctaatatttccagcaacatataacaaaccaaacatgaaatcaaacctagaaaataccctaaaatctcattccatgctcaataaacacataacccaaaagattcaagtacaacatgctcaaatcaacaagaactcactatcatgcaacatatcatcttcttcaacctattcatgctctttaaccataaaattaagtaagggaaaatcaattaaaaactgaaattactacctcaaattatagcaagaacaatccctcaactctaagctccaaaagctaacaccaaatcaagccaaatccaaggaactttgaagaaattcttcaattagagaatatgttaaagagagagaggggttcgggtttagggggagacaaaataagaaaataacattttatttcttaaaaattcatttcttttactaagtgtaaataaagggtctaaaagaccattttgcccctagtgccaaaaatcatgcacacaaacacaaatgggcatttaagtcattccatgcttatttaaactcaaataaatctcagattaatcattattaaataaaattccaatatttcaatccaatttgcatttcgggcctgaacccggttcgacccgaaatacccagttgtaactataccgccccaaccagtcagaacacacctgaaaaagacagcacatgcatactatatgataatatagtcctataagtacgtaaacacattaagggctcttttggtacgccgtacatgttggaaattatttta

SEQ ID NO: 325777 - DNA, 847 bp, Cannabis indica
ttccattaccattactattttatcacaccaacctaaacagttttgttaactgaaataaaagatacgtttttctcatcctatacttaattatactgtatcacttaatttttgaccgttcactttcaaagaaaactagttttccattccctctgactcatttaaacgtttcaaaaaactgtagaagtgtaagacaagtaagaccaaataccaagataacttacgtggcatgggccccacatctttcaacggctagtttcctacttcatccatcctataaataaatacataaactcatatactcaaaatctaaaacaacaccttcaaaatcaaagcttcagtctctttctgtattcattcaatctttcttgataaaactttgtatttttttctttctgttctagtccaatcaaatcaacaatcatggctcctgggttttcaagatcatctttgattcttcttctactcttctctcttgttttcaccatatcagaagctaaagaaatattagttggaggcaattcagattcatggtcaatcccaacttctaatgaaacccaactcaatcaatgggctggtaaatcccgttttcgcattggagacactcttggtaatttcccatttctcatttctctggtttatatatatatatatatatatgtatatataaaagataaagattacctttttttttttttactaacttcgaatctagtttttattttattttttttctagtgtggaagtatgatggtgagaagattcagtgtggtaagtgagtaagaagattacgagacttgtaatacaggagaagccattaaaaaacaaaaggatggtaacactaggtgag

SEQ ID NO: 325778 - DNA, 954 bp, Cannabis indica
aaaagctaacattgtagtagtggaaattggaagaggtcagaaacgtttggttgctctctatatcctatttatagaacataaaaccctagagatagccacaaacacgtgtttccatttgtacaaaacttttctaacactactacaatatgggcctttagaggctgttttttcaacctattttataaaaaggaaagctaaagggtgtcaaaatacatgactggttcaaaattgaaatttagagacagttttttggtaaaaactgtaggtatagaattagactataccatttagagtctgttggaggatttttatttctgatgatttttatacaaccctattccgtcgattattagaaaataacagatggcatagggtacaggcgataattgacacgtataccctatgtcgtcaatttttttctaataaccgatgggatagggttatataaaaacccctatcagtcgtcttcttcatcttcttcttcctcacgaaacaaaataccagcagagagaacaaaccaaaacccctgccatcttcgccaaccacttctcccacagccattatctctcctatttttgcaccatttgagcctattttttcaaaaagaaatcttctatttttgatacttaaatacaccaaacattttacgatttttttccctatttcagtcaaccgaacctattggaaaatagtggtgggtataactccggccaccgatatttgttgagaaaatattgaatctcaacatccattaagatatttataatgtacatggtggctggtggctggactttttgcagaattagtcaccggattgcgcttataagtaaaaatttaaaccttaatatatagtgtgtgtgtgtgcatatatatgtatttttgtgttttatcgaatatgtgtgtatatattgtgtgtatatatattgtgtattttatttatgtaaatataatatt

SEQ ID NO: 325779 - DNA, 784 bp, Cannabis indica
tttttttttacatttttttttataaagaataataagttaacggcgttaaaagaaaacgttttaaaaaattaagaattgttctcttggcgttaaaaaaaaaaaagaatcgttaaatcaagaattgccgttagataaacacttttaatatataaagatataatcggccattattttttttggttcataatggcttaaggtatgctttagaaattcaattttaatattactgcctatgccattattatatcgacaaatacaatagaatctccatgtactattatctttatatcacatcatgtatgacaaaatgtatatcgttggattttgtgcggtagcttttatctatgataaatatataccaattgctaaatgcatttacataccttaaaccatcccaacccagatatatacatatttttttccctactgaattaactatgtgtatgtgagcatggtatatatatattttgattaatgggttgatggcttcaatatatatatacatatatgtctcgctttattttgccatcattttagttgatgtgatatatttagttatcatatatatgataaataatatatattttaatttaaatgatttaattcaaattttggtgttggtttatgtctaatattttgagtaaattaattgaaacaatatgtcgccaaagtgacctcttttgtgtagattaatttatttaaatattaaattggttgtgtgtttgtaattgatacatatattgactaacccaaaggttagtgaatattttgctagatttcaaac

SEQ ID NO: 325780 - DNA, 558 bp, Cannabis indica
ttattattattattattatcgtctttggatgcctatgacacatttcacgtgttgtggtttctttatcttttctcattaaataaaatgattaatatgatcaacatattcaattgaagtagttgtagtatactactataaatagaatgataatatgtaaaaatatgatatacaaacatatatatacatagtgagctcatcaatcaagaaatcgaatcataatccaaaatatatatcatatcaatatggagaagagtggtgtgatgatgatgatgatttgtatagtagttgttggtcttgtgtttgttccatctcctatttctgcaatctcatcatcagatcaggatcatatcatgatgaacggtcaagatagaaagatggtgactattatggatcgtgatacccttttcgaggtactattgaaggaaaggttgtcacaagataacaattgtaggggtttttgtatgccatggaatccttgcaaatctggatgtcattgtattttagtccccgctagtacttttggagtatgcgtttaaaaatataaataaatatatatat

SEQ ID NO: 325781 - DNA, 1130 bp, Cannabis indica
gtttaaatataccacagtgttaaaaataagtagtttttttttttataaacacactgtaaattggaatatgaagaactttatttttagtattataaattattcaaaatttttaagagattgtaagtgtattttacaactatcattatatattttttcgaacttcaaaattgattaagaaattgtaatatatatatatatatatattgatatagaggatgaagaaggtaaagaacttcacttatagtatagctagtaagcaatagagaaagaagaaaagaagaacacaggagcaagaaatgaacgaaagcattaactcaaatgagttagctacgtcctttgtttatagtaacaaagattacacagtcaagatccaaagcagaaaatgtaacataacaactcgagcctaatacactaaccaacttaactactaactgacagaacaattggttaagtaactgttatctaattttttgtaccttgacgtggcaatgagactagacgtgcatgtcctatacattttcgatacctaggcgaagggaagtattcctagcagcccggctatggttgcttaacatctgtaacactctgatacccgaataggatggttgagaaaatgcctaaccaagatacatacatactgttgaattaaacctccacttacactgatattggacttaatacaaaggacagaaaaggaaatacatgcaaaatccctaagttgaccttcggtctctaaaatccctaacaaaaattagttagaatggatttggttaaatccacacctaactaatttctgtaactacctaactaacacattcagaagcaaaaacaaaaaccctagagctatttatacctgcatcaatgcccagatcgagatggttgagggcattcttcaagatccagagtgagagaacttgaagaaggaagaatcaaagctcgtacatgcacaaagacacaacagagagttagttattgagagagagagatggattaaacacaaatacttgtattaaaaatagagattaccagtcaaaatgttacctgtgacttggaatctcctctgatgtacttcaaatcaaccagatctagtggaatcgagctctcatcttcaaggagcagctcaaacggag

SEQ ID NO: 325782 - DNA, 1078 bp, Cannabis indica
ataccgcctgacagtatttttgtaaaaaaatagcaaaagttagtataccatgtaaatttcccataaaaatttacttaataaagacctaattaaattttttggtccaaaacttctaattgacttgagacggcctccaagtaacaagccctaataatggtcaaaagattgagttgagtttttattatttttgttatttattatccatacatacatacatcttccattgattatgaaattaagcaatagtacatgagaaaagttaacattacaatgttatttgactttgagtcttaaggcatcacagtctgttcgtcagcacagccattccagaaataaggcctctgctcaagaaatgcaggtggccgctggtacacaagtgaggctgtttcaatcaaaattccagccgttaaagcccagatcacaaacttcttactttctgcttcaaaatcgaagtaatgtaacaagtacttgtgtcccttccactccttctcctctgctcttctattttcgtcctttgttcgatccaattcacaaaaccgagttgtgatataaggaaatatttttttaaaaaattaatcatgtattgaaatggaactggatagaatagaggtgaaaccttaagaaacatttccaagggagcatcaaatactgcttctacttctgctgcatttggggctggaataaatgctttcttgtctgaaagtactccaattacaggaactactggcaaaccaatctatttttccacattgacaaaacaatcctaattagaggaggaggggtgtaaagtgaccatattgatgttttgctgacatacttacaggcgtgttttcttgaaaataagattgaaaagtttaataacttagggatgccaatgactatgtaggagcattcattctaaaatgaggaatgaaaatataaacaatattttcaaaattaattgcttaaaattatatatatacatatatatatatatactaggtgattgttacgtgccaagtcatgtagtgttagttttatttaatattttagttatttattttaattaataattaaaatagtataattatttgaacga

SEQ ID NO: 325783 - DNA, 758 bp, Cannabis indica
taatattaataatttaatattaaaaagtaaccaatccaaaataaacgatctaatcccttttacagattagattggattgtatttgagctattgtgttgattggattggatccaaaaaaataaaatccgtacttagtgccgatcggattcactatgagcaaaatagtgcagatttgattgaatgaacacatctaaagtcaggagtgcaagtggaagccataaagctaagtgtgcaagtagaagctcaaaagagtctaagtacgtttttcttttaatttataaattaattaattattaattttctcatttaataatttttttatttaattagttgtagctttttatttgactcttgtttttcttaggtttgcacgaaactctacatttctctatctctacactactttaattgaagagctcctaacatccaccattgcttctgtcgggtctgcaaggccgcaatctcaacaaatgtggctgatcgaagagaaaaggaaaggatggaagaacttcaaacagccattgttacttccgtcggctccgtaatgcaacaatccaacgattgtggctgatttgaaaggaaaggaaagaaaaggacttttgtgaattggtaaggtgcaggtataactagcaatgataaatctaatatcatcataacaaggaaatgtgattttagaatttgagaaatttatatatatacttgaagtataatcgtacccacaccacaatgcaaaaataaatgaggtttaattatttttt

SEQ ID NO: 325784 - DNA, 1585 bp, Cannabis indica
gaaagctatagattccatatttatgttagcgcttccactcaattgcactacttgaatagatattacggtaagtttaattaaatctatgtcaaagttcaatatcggtcccttccgatgcatacaccatgcacccaacctgagcttttaaatcaaatagacaagcaattcataacatgaaccaaaacatataaatgaatgaaaaatacttttgtttctttattgatattgaataaaattggattacattgaaatggattttcatttagggcataaaacccaacaaaaaccacttggggcagctgtattaatagtcaaaatcatagcaattcttttaatgatttcctttctaaataggattcgtgtatttctgctcttaagtcatggaataaattagctaatctctcccttaaatctctcatttatgatcttcaaaaggaaatctctaggtcctaggaatcttctatttgggatcatgatgctcaattccgtgtccaatgtcttcaatctcagcttgattcattggaggcaaagggctatgattcattggctcaaagttggtgataaaaacaccaagtttttccatcgctttgactctcagagaaagaagaataataccattaagttccttaaagatgatagagataatatcatctctaatcataatgctatctgcaactctatgatttcttacttttctgacctattttgttctaacggttgtgatgctaaggctaccaaccttatcctggattgcctaggtccctccttagaagattctgattgtgcttttctagatcaacctttctctgtcaaagagattaggagagcaatttttaatctttctagggataaggcccctgccttgatgggcttaatgcttacttttactagaaaaattggtccactctggggcttgattttgctaacgctgtccttgattgtcttaataaaggtactgaattttctgctgttaataccaccatcatttctctgattcctaagaagcaacatgctcacacccttaaggactttaggcatataagcctctgtacaactttctataaagtcatcgctaaagttttggctaatcgtttaaaacttgttttggataaaattatttttccttttcaaagtgcctttgtgtctggtagagtcatttttgacaatattctcattgcccaagaaattgtgcatgccatcaattttaggaaaagtggtaagactggttgggctgctctcaagctagacatggccaaagcttttgatcgtgttgattggcattatttagagagtgttatgcatcactttaattttccccctaggtttgtctctcttatcatgaaatgcatcactactactacactctcctttttgatcaattgctctgtctgtgtgttaggctatttttagcctatattttggatcaattttatgttcgcttttcgttgttttaggacagaattatgcttgttttccatgttttcaggttcctcggagttacagaggtctcgggatgcaaaagtgcagtaaaagacgagcagagccaagaaaaacgccatttttcagattgacgcaattctggccg

SEQ ID NO: 325785 - DNA, 904 bp, Cannabis indica
tttttatatattttcaggactgaaatcttgtattggattttgaacaatgttgggagctactggttctgctctccagcttcgaacaaaaccctgccttagtcctcaactgcatgcttctcggataaccagactcagcggtagagtctcgagatgctctgctacgaggaaatcgtcaaatgctgttgagaataagttctttggaacccgtttaaaggcctctggatcggagagagtccatttatggcgttctgacggtccagggaggtcgcctaagcttcgggtggtagctcgctctggattctccgccgttccggagaagccacttggtctttacgactcgtcgtttgataaggactcttgtggtgttgggttcgttgccgaattgtctggtataagcagtcgtaaaacggtgagcagagcacgttgtattcttaaagaatgaatacccaatgaatgggaatgtacttgtttgactgagatattttcgcttttattgtggtactgtagattacggatgcactggaaatgttgattcgaatgacacatagaggggcttgtggttgtgaaactaatactggcgatggagctggaattcttgtagacctccctcacgatttcttcaaggaggtatttttccatcatttaaataaattatttttctttggcatttttatttatatattttattagtaaataactaatcatttccgtcgtttaatcagttttagtaaacctttgtgtatatttacacataaaatgttattctttcttcgtatttattgttatttacatatacaatatattctacagaaaagaaaattctgatttaatatactcactataacagttacattttttttggaattatcctgatgaaagtgttttttcataatattgtcaaggt

SEQ ID NO: 325786 - DNA, 654 bp, Cannabis indica
agtaatattttggtattttagttgaaagtaaatttaaaatgtaagtatttaaaataaaaaaaaatttaagtagcattttttttcatttttaaatcaactcaaaaattaattatattctctcttttaaatagattaattatataaacgatgatagatattgtttcttgagattttcgaaaaccaaatataataaagatgaaaaataaaaaagaaaatgagacgaggtttttatgttattggggtatttgcgagttttagtttacaagtcactatcattaagctcttagttattgagtttacaatgtattttttagtttttgaacattagaagttcaaaccctttgtatggaggaataataccatatttataggcatatttccttgataggtcggactaatctagactcattaggcttatttgggtgtaaaagcccattgttggggtaaacacaattatttattagtataatttgagctattaggtcaggtaggtgaagctcaagttgagttgagttgccttccgtacgcggtcatgctataaacagtgacaggtgaagcgtgagccgttgtcgggagaaaggaatgtaagaataatggtgtttactgaaatttttggaaaccattaaaatatttatgaatattaaagaaattgtt

SEQ ID NO: 325787 - DNA, 981 bp, Cannabis indica
tcctcctttgtttctagggctcaaattctcaatcatcctccacttttcacaaactccttctaattaaaccaaaccttctatttaaaattcgtaaaattataaaattgtctaaaaatcctgtcattaaggcttcgtcgcggtgaaggaattgcccgtcgcgatggctggagaattctcaatgtggaaaactttctgccaagtcccatcgcagtgaagctttttccccgtcgcggtggtctttggcagcaaagaactttatacattttttttctcaaccttttcatctcttgtcctctattcttgtgaatacttccatcaaacatccgggaacctaaaaccaaaagaatcaagcgtcaaatagccctaaaactagaaacaaagaacgaaaactacccgaaaatacgacccgaaacttagactaaaattagcctaacaggatgcattattacaaaaagggattttagtgtcggtcactgcgtcaggtcaaacttgactgatgcaaaagtcaacgctcacttttttatttcagttgttaagcaacactattaataattattttgcatcaattgctactttgacactagaaagaaaagtggcactaaagatgaatttttttttaaaaaaaaatggggtggaatgtttcgtcagttttgctcagacatagcttttagcattagtttaattggtttttgcgttagttatgcatcgacacaaattttgttcagtgtacagctaatgctaatttacttaaaaaaatatcacagaattggggtagacctattttaactaaccttactaatacataacctaacataatagtcgtctgcaattttctctctctccctctatatgttggaccgttgacaaaggaggccaaacaatggaggtcgctgctcgcaccacaagctcggacggaccctgcgcagccatccccacaagggtaatatatatatatatctctctctctcctctctctctctc

SEQ ID NO: 325788 - DNA, 904 bp, Cannabis indica
cttcaaaaaccgccccatccacattaatttttaactgaccagcagccggtttggaccagtaatctattgtgtcagtgcgattggaagccagagacaccgagcccaaccgcttagactgagcactcgtccattgtcgaagcgtggtaattactagatgagcatttttatattgccccagagtattgtaaaataagtggaaaagctttgtaggggattcctttggggtgtcaaatgcaatagaagtaagttatatgtggcttcttgggataaagtgtgtttaccaaagtccgatggagggcttggatttgaaatggggctgattagatcagggcaattctctcgaagtatatttgggctgtcatggaaaaacatgaccttctctaggtcaagtggtaaatgtgatgtacttaaagggtgctaacttttaggactacactcttattaatgacacaagttggtattggcgcaaactatgtcatttaagagttaaattcagcaaaacggatatgattgcagttggaaagacatgtagattttgagcttcattgttgtataattgtcttttcaaacatggagtaacaaccatgcggtttggagtaggctcagccttcctaaacacatgttctttttatggcaaactgttaatgctcatttactgactagggattaattttttaaggttccatgtagagctaaacatgttgaattgtccagtttgtaacattgataaggagagccaccaacacttattctttgattgtattgtctctaaaatggttgtggctaagatttttgtttggtcttgccctggccaacccaatccaccagtagtctacagtgaccaagaggtaaacaacatcttcctagtaggatcccttgagaaaaggaaaagaagaagagacca

SEQ ID NO: 325789 - DNA, 578 bp, Cannabis indica
tagtttttacccatacggaaaatttggaagcttgggaataagtagttggttcagagactaaataagcacttaaaatggtagcacgaaaactaggaaaaaatttatcataagagatgaaatttgaaatggaatgtgaggtagaaagctcacaaatgtagtcttggagatgaggtggacggatgattgtccttccagattttttggtgatgttggggccacttggaggggttgaattaactgttggtggtggcggtatgactataggtgaagtggcttgaatggccaattgttcgggcatcgatgaagggtgtaaattcttgggtgctgcaacttttgacggagcctgtgaaagaccagtacgtgaaccgttagtgttagtaaaaaaaacatcaatattgtcattagaacatgtatttttaagatgaaaaatatgttcatgaaaaatgacatctttagagtgaaatatttgatgagtttcaaggtcaagtaaagtataagctttcataccaaccgggtatccaatgaatgcacaaacctgagatctcggggaaaatttgtgccttgagctatccaaggtg

SEQ ID NO: 325790 - DNA, 1898 bp, Cannabis indica
ttttcgtttagttttttttagttttttttttttttagtttaaggaacatatatatatatatatatatatatatcatgttcattaaactaagaagtaagaacatgacttttgatttaatgtcaaagtaaaaattcttttttccatatgacttttataatatataagatcaattccctcaactaatataataactccacctaatacacactagctaggttacgtgtgagaaatactatcatatatttcatgagctcttcttcatgatctagcagcttaattcaaccatcccaatgataaccaattcaaattaattaattaacacttttttattaaaaatgtcaaacacgaaaagtatacccattagtgttattctctgcaaagatctactgatcaactatatatatacattaataattatatatttcataagttaattctttcggaaaaaagaagaaaaaatttatttcataagtacaatttatcgaaaaccatcctcttaatattattgctagccacgaacaaccaacaattatattgtctgcacgatgtattaatattatagaaatatatacataacactagaaaaactgaaaatcaaatcaaataaaaaataataagaaaataaatatattatattagccttacaaaaataatcaactaggcaaatttacttgtttttcttttaaatttaaattatatttatggtatattctagggatatttttggtagatatttatatacataaatatatattttaaataatgtattttaagagttttattttactatatttcaatttcttttatatataatctatgtatctatataaaagaaaagaattatgcagtaacacgtcactctaaaatcaaagctatttttcttttatataaagtaaaggaattatgtcgtgtcatcctaaaatctctccaaacctatttttcttttttttttccatataattttctcatttttaatattttattagaatataaatttacaaattgatattttactattattttaataaatttttcataaaaatatctatcataaattaattaatttttttaagaaaaatatataataataaatataaactaaattaataatattaaattaaataattattacattatttatatatatacgcattcataactatatatatgtgtgaaatttttttttttactttgcagaatggaagaatattttttttatatatatatatataaggaatcaaactttatgaattgaacaaaaaaaaaagcatgtgtgagattatgtagaagaaacaagtgtgagattatgaatcaaattttttcataatgcgttatttttgtatcctggtcatataaagttgattcatcattgtagttcctattgatatcctcaaatttctaaacttaacacccaatttaacgttctgttagtagatcaataaagtgccacatgtaaatatagtattggtcaatctaataattcttttagaaaaaataatttaaaaaacaaaataattaattaaaacaaatttatattttcaaaaaagaaaaaatattataacatattaaatgaaataaatatcaattatttttttttctatcttcttccaaccatatctttacagattaataataaattttttaaggagattaacaataaattttgattctcaattcaaatgttatcttttataattctattttcatatattcaaaattctcattccataaactttctactaatattttctaattaatgaaacgaaaaatacaaactttaatttccgtataaaaaattactctctcaatcccaataatcgaaatagcatgaaattttaagttcacaaattctatgaaaataaataataaaaaaaaaacagatctcataaatacaaact

SEQ ID NO: 325791 - DNA, 707 bp, Cannabis indica
aagaatttgaatgaaggaagttccattcactactgccagaacttcattaatgaggttatggatgcagtaagtgaaggggttccttcggttagccattcagtggagaattcctcacacaaattacaaaatggcaatggttatgtatttgaagcagatgtaaaagaaggtgaatctggagagatcgaattaaatgaggaaactgaatcatgtgaaagtaagattagggatgatggttttctcctatacaagaatttatgcaagttgtcaatgagattctcatcgcctgaacatctagatgattgaattttcttaagggagaagatattatatttggagctgctaaaggtagtcatgggcaattgggtattgatttggtgcaccaacaagaggcaaagtgatctatcttgtttcttatgcttatgcataattcaaattgatttgatgtgcatatttttttgttttagattttttatattaaaaatttaaaataaattatttattaatatttttcaggcaccaccaccatcgtcaccaactacagatcacttttccgtcctctttcattcgactagctaagaaagaattttcattatttttgagaaattgagtgctctcaaaatcactaaagaaagggcgagatatccattgtattatttagaatgtcaactgatggagtttgagttctctctcgcaatatatttttttta

SEQ ID NO: 325792 - DNA, 822 bp, Cannabis indica
caattctgttataatcctaatagtggataaaaagatgtaagcactctgaatttcggaaggaggtgcacacaactattattaatgttgtagtttacagaatttgggaggcaagaaatattgtcttttgggatgtagaatgtatagtattcatattgttgtaaatagaattaagaaagagatttgtaataggttaattttctcattttaaaagagagaagataggtaaaaaggataggatttggtttgacaagttgtgtttgctcaactaagttgttttttttaaaggttcttgggcaatagaatcttactcatttaccaacaaaaaaaactcattaaaaaaataacatgaaaaaaacaatctaataattagtttcttaattgaatcactgtagagaatataatatatatatatatagtctacgaaaatagttccgtacatacgtctaaaaaatagttgatatatagttatatactcatacttaaattcaaaaacttcttaatgttatagattttatctctttttttaattgttatatgcttatgttgaagatttgtttattaagaaaccgatttttcagtttaaaaaactagtttctgtgatatttcatacatttggtttctctaatttatgtttcaaatagggagagaaagaagctttaaaacattaaatatgagatttaaaaaagtcattacaatagtataaattacacaatatatgaaaaaaaaataaagacttaactttttatggcataattttttaatgcataaagattattgacttagtttttttttttttactaatttgtatgagcttctttatgc

SEQ ID NO: 325793 - DNA, 1176 bp, Cannabis indica
aagttggaagagtagacttaaacacatacacgctttttaaagcaagtgtgaaaggtggtccaatttggggagatgcttgattagaataagtccattttttatttttattattattatttgtgagtgatacatgacactaaatatgataatacattagtttacaatatgtcatgttgtacctgttgggtacgaataatatactatgacattgctaccacataacttgtttaattaggcaaaactacccaaatatatgtgttaaacaaaaagatttggggtattatactaatttgtttgatacaataaaatatttctactaatattcaaaattgacaacaattttttcttaaactcatttaaaaattaataaagaagctgtcattttatcattttatttttttgtttgatgaatcagaaatttcattccactaatttcaactttacacccattgaccatcaaaattgatgtcaaatgaactcaatacaagtaaactattgtaaaaatagataattacaatttttcgaactactcaatatttttttgctttacatttttggcataacaaaggagattttattcttaacttgctattttgtttgttgcattatctgttgtaaatttagagcaattgtattccacaacagatcatttttggcctgctatagattataaaccattgctgcaatactcgtcaaaaacaccttcttccgaaaattattccctttgattcgatcgagctttcgaatcaactcctgcagagaattttgtgacaactgtcagccgagccattgccccagctgagataaacattcctgtgaaaaggacaataaaaaaaaaagagatgctcaacattttcagtgctgttcctacagatcaaacatttatcatctgtcacaatgtgatatttgagcagtttgtctttagttttgagcctattcagcaaagaaatccacaccacaaagcaatgcttaggaacattaagtctattccaagcatgcttactccaatagtattgatcttcagcttgattatacaatttgtaacctgctgctatgacataccggttgtttatgaatgttgcaggatccactagactttttgacttcattttttaaactctccactagctttctctaataccagctcctttggagaggggtcgttgaatccccacc

SEQ ID NO: 325794 - DNA, 735 bp, Cannabis indica
aaaaggaaaaagctttattgaatgttcaatgtaatctttacaagaagaaattaacgaatacaaaaacagagaagaggacttatatacaagaaaggaaaagggagttaaccgactaactatagttagactaaccataacaccaactaactcaagtcaagagcaagaacactcttactgacacaactaactgaacgtaactaacataacgaaaataacggtcagtaacaataacaattagtaatgtagcagaggactaaagatagggaaataagtggagcctaattcttgataaattcaactttaaaaacgcaatccaatctaattgtaattagatatctaattttttataattggattggactggattagattgaattatgttcaaccctatatacaaataacatatgccataataatgtgacagtgtgtgaatttggtgttgtcaatgtggtggtgtcgtcgacatggttaggggcgaagggaggaggtcttatggggtcattggggtcatttgcccccttaacttcttataaattaatatttgtacatatacattttcaaaaaagttaatttttggtcccataaaattaataatttctttatttatacccctatatatttttattttatctcaaaatttatatttttcatgtttatcccatatttttgtaaagtgcaagacacctcaacaatggtgttttgcaccttatgttgggaattattttaccaggatct

SEQ ID NO: 325795 - DNA, 1119 bp, Cannabis indica
atcatctatccttggcaaaggatacttttttttttcctgtcaatttattcaatttccagtagtcaatacacattctcaatgttccatccttcttttttacaaacaaaatcggcacactccaaggtgaggtacttggtctagtgaatttcaaatccaacatttcctgtaactgaacctttaactctttcaactctataggtgccatccgatacggagctttagatacaggctctgccccccctggtatcaaatcaattttccttttttacacaattaataatacccaaaaattaattacaaatgtacaaatatacataagttaataaaaaaaataaattatttgagtcaaactccaaccttctccaccttgactcaaatttatatgcatggagttcatactcttattgaacttcacttgagcacttgtcttcacattcatcaatctttcactgatgccttctttcttcaaacaaccttgaactgaattggagtcttctccaccttgctgcattcgttcacactaattgaatgccttttgtgacttgactctaccttcatagctccacctaaaatagtcttctcgactaatttatacaaattctactctttcttacccttcacaactatcatcccacatttcgtaatagatccaaccgcaattatccaaagctcccaaagagactaagttcctccttaatagtagaacatatctcacattagttagtgttcttacaacaccatctaacatcttcaccttaatagttcctattctaacaactttagagctagaattattatccatcaaaatagtacagccatcatatgccttataagtatcaaaacactccttatacaggcacatgtggaacgaacaaccagaatacaaaatccaagagtcaaaaaagttttcatcagctatgacagagaggacatcaaagttacctccaaagccttcactagcagcattagtagaatctgacgtgtctttgcattcttgattcttcattgcatgcatcaagatgttttgtcaactctacacaaaaaaaataccaaagttcttaaaaaaatcgtctcaaacggaaaaccagatcaaaagttaataatgttcaaagtttttaa

SEQ ID NO: 325796 - DNA, 778 bp, Cannabis indica
taaaaaaaaattaactttaattttttgtttttctacttattaactatatatatatatatatactattttatgctgtcaaaataaaaaatttgttaaatatatatatttatatatatactatttttgcttatatttatttatttttagttaattaattaataattgataattaaatacagagattgtacaacaataatgcaaggaaggttgttctagctggaattggacaaattggaatttctccagcaattattgatttatatggaaaaaagactggtgttgacaaagtgaacaatctaattcaaatcttcaacaaaaaacttaaatcacttgtttataaacttaataccaaatttagtgatgctaaattcatttttgtcaacacttttcaaatgcattctagtgatgatctttcttctcttggtaaatatctctactcttactcttttttccttaataacaaatttaagatagggttttatttatttatttattagggtaaaatttattttcaatatttatatgatggtcaacataaacttaaaatgtttcaagaatatacatatataatattatataggttaatttggattcttacttcttaaattttgacatgtactaaatcataccctctaaattttttagttcataaaaaattctcctcgaactattaaggttgatttaagttagggacatgatttgtaaatatcaaggttggggcatgatttagtatatggacaatctacatattagcaaaattgaatgaaattaaaaaaaa

SEQ ID NO: 325797 - DNA, 863 bp, Cannabis indica
gtcggtggtccaaacggaccaaaaaatgagttttcccaatcccaaaagcccagaaccctgaccttccctcactttggaaatctctctttctctttcattcctctcggtgcaacaacgacgaaggccacgatggtcgtccatggttgtcgatggtccaagcagaccataaagtcgcgatgtcagagtctcaaaactcaaaccccaaagtctctccttgtgatctctcctattatttcgtcttttcaacgtcgtggtagagctcactggagctgaagctccatggctccattttggctatttcgtggctcgaaggggatggggacaagtttgtgggtttgtggttcgatgacggggacggtattcttggtttgatggggatggatgggtttgtgactttttgtggagatctcgtaagtggatagtcagggttgggctttgcagtgacattagagatcttagatctggttcaaaatagtagatttgaaatttgtgtgtatataagtgtgtgtttgtttgtttgatctaataatgtttaaagctttagttctgattaattcttttttctgtgtgaattggatataaacaataggatgaagtggtggtatttgttgcgcaaattgtgggtgatgatggtgttgggattttatgccctaaataaaaatcatttcaatctaatctgatttgttatcaatataagattagaagtcatttatgtttacatgtagttttcatgtttatggtttaatatatacaaaatctgttaagtccggaacatatagtcattcacaattacagtgatgtcaacatagtggaatgtgattgtgattatatgcttcaaaagacaatgtccctgattcatcagt

SEQ ID NO: 325798 - DNA, 1077 bp, Cannabis indica
ctgttaatttttgaccaagtctatcctcttctcaagttaggtttctttctttctcattttaattatgaactatatatgaagcaattttcgtaagtatatatacatacattcaaccaacacaagaacgtgaaaatattaattacaatacttaaattttgtgaatatagtcaatatcattttttttttctttcagaaatattatattattatttttacgggctacatgaaatataatcttaataatctctttcagatattaaaaaaaaaatcaacattttataatttattatgatcaaagtgaaaaatatgtaaattaatctctttcacaagcctttacaataaaataaaaaaaaatagtataatctaaatatacatttttttaattatttgaaacattacgtatatatttcactacaaaaaattttatttataaaaaattgtgactaattataatgagtattcttatagtgtgactaaaagattcgaggctaaatgtattagccgtaaaatcaaatttttttgtgattaaatgtatttttaatctcaatatttgttgtgactaaaattaaattagtgacaatttttatctaaatactatatagtcacaacttttttttgttactaaaagtcacatttagtcacaaaaatttatattgtgactaaaaaattatcactaaaaaattatatatttttgtagtgtttattgacttcgtttgttataaaaactcaagaagtttaatcgatgtaaagagtctcactttgctaatactggaaaagatagtaccatatataagatgtatgagctatactttcattgttaattgattttaaaataaaatctcatacatcttaccatacaatcaccttcatcttagtttttgtatctcacttttgtcacacttctaaattataacaaagcattaattctctgcatacaaatacaactccaacttgaatcattctcaaaaagttctcactgtcgagaccagggccggccctgggcataggcgggctaggcctgtgcctagggcccacctagtccaggggcccaaaaaaaaattttgcccttttaaaatt

SEQ ID NO: 325799 - DNA, 1375 bp, Cannabis indica
aataaaaaaataagtagtctatcataacacattattttacatcaaacaatcaagttttaaaaatttgaacaacaaataatagaagattgagaaataaagagtatggtggagattacatagtcaagataaatcaaataagagagtgactatgtctaactggatgagaagaaacccaaataattgtctatgatttacagatttcaaaaaatcatacaaaaaaatatttttaatatttttttaactgcataattatcattaaaataatagtaattaaacgaagtcaaaaaataaattagaatcatagaaaaatcaaaaattaaattctaataatgctagaaaaaaagaatcgtcaaaaaaatgacgtcggatggccgcgcacgcgcccctgccgagagtgggcttcgcagaggggtgtcttcttcttcctccagccgggttggaggtggggatcacgcgacccaattgcagactggttgtgtcagagagaaatttcggccaatatcacaatgaaaagacgcggattttgatggattttgtaattgggacgaaatttcttatcaatatatggtattaatttcgggtataaatgactaaaaaggtgtcgatcggattgtgttcaaaatcctaaaactaagaacaaacaagagagcccaattttgatagtttgtctcaaccgaattaaaattaaattataaaatattgtaaattaattggtgatgagatttgcaccagcgattgtagtgcataaacatttgaatcaaaaaaactcaaatttaatttataaagaaaatacataaaccttaaaagttttatcttaaaattctcctaatttactcaacgattttagtcatataagatatcaatagaaagacaattttatgatgaataaaaacctctaaacttttaagattacacaacgaaaaatttaacaaaaaataataatgaaattaatatgtaattgtaaaaaattaacatatagatatattttttttaaaggaataagaaattttattgctcaaatcaaactttacatcacaacaatttacatctcaactagtattttctgtctctaactttaatcatatacactttatattttcataatccaatccatgtcttcatcctttgcttttctaggagggaaagctttaatccttagcaaactgagttgtttgcttttcagtacagccgtggaggtcagccaaagttgctggttccatagagcttcattcctggccttccatatgtgatacacaaggctggccataactgtgttcacatgcttttccttgctgcattaagactctttgaatgatggcaggcttgcaacaattttgtaatgtcatctgccattgttttccattacagtaagtct

SEQ ID NO: 325800 - DNA, 2582 bp, Cannabis indica
caatgcacatgaatcagggactttgtctttcgaagcatataatcacaatcacattccactatgttgacatcactgccattgtaaatgactatatgttctggacttaacaaattttgtatatatattaaaccacaaacatgaaaactacatgtaaacataaatgacttctgatcttttattgataacaaatcagattagattgaaatgggttttatttagggcataaaatcccaacagttgtggggtctatgagcttatggttttgcttctagggtgttttgagatttgctttgatgctaatttgttataattgcttattgtgggatggagagaatcaaggttgaattttaagctcaaagcttgagctctcatggagtaaatcatgttaggacatgatttttatttctgtcacgtagagattattgtatggatgttgtatgattactctgtgaagtttggaatgatttggttaggtttttgttgggttttgagaagatgaaaatcaaggtttcatattttttgtagaaaatggcagacatttttttggaaaaacggtctcccattttccctgtgaggaaccactgaaaatgacttcccattttctaatcatcttacttttttggtggtgtttagaatcctcatttttcatgttttctcaatgtttagggtattggtaccctagtggcctatatggggacttgtggtgatggattaaggagatagaacagattaggtcaagtgattaattgttgttttcattgttgtgacataaggctcaagatcgtttatcattctccaatcaggtcagccaacatacctgaatcaaaactcaaggtaagaaaaatagatccataccaactagcatttcaagatatgattattatcgttataactcagttatgattaaggtaatgggatggtgattaccgttaagtcgattaaagtcatgacatcaagggaaactattgttaagtttcttatttatcgattatcttattagattgtaactaagcttatggatgtcgggttagggcatcgaccttgccttattaagcaatgagttatatggatgtcgggttagggcattgaccttgccttattatgggttatatggatgccaggttagggcatcgaccttgccttattaggaaatgagctatatgaatgtcgagttagggcatcattgttgccttattaggcaataagatatatggatgttgggtagggcatcaaggttgtcttagtaagcaacaacagaaatggttactttatgaagtaacaaatatggcttatcttgactaatgcaaaggatttgtggagcaaattcaaagtaaaccaggtaccaactccttcctctagattaaagttcactgaacctatgaaggtaggagatcaattggttgcgaaacttgacctagaagagctagaagtagaggcctctttttggaagaattccattgtttgtatagtgctaggtgcctccgttcaagatttttgagggatttgtgaagagaatttggggaaatttgggagtggataaagtggttagaatgcattctggatgcacattagtgaacttcaaagatgaagcaaccagagaccttatgattgaagttggtgtgattcattttgataggaagtcagtggtgcttcgaccttggtccacagacttagacattgctagaatgattaatgcagtaccagtttaaatacggcttaatggactagggttacagtattggggcaaaaaaaatctaagtgctttggttagcacaatagggaaacgagttatgattgacaaggttactcaagaaagatcaatggtgaaattcgcccgagttcttgttgaaatagagatatcggatgatcctccaaaactgattgcttttatcaatgagcaaaagcaacttgtggagtagacgatcgaagaatggctcccatcaaagtgttcggcttgtgctaaccttggacatacagttgccaattgcaataaggagaggaaagtggtttggaaaaagaaacaaccagtcgataaagaggctaagcaggatagggagggtgaagatcaaagaaagaaggaagacccaaagagtgacaaggaagatactagacaagttactgttgcacagaaggaggagcagcagtaccaagctgaccaggaacaagaaaagggaggaaatgcttggattacccctaaaagaagagggcagaagcagatagaagcaaccaaaaacaaggaagctcgtaaaataggcagtagtaacaatggatatgctgttttacaagcagcttcggttgatgatataattttagggagactttgttaatttggcagaaggattatgttcaggtcaaaataatatgtgaagagcctcaattagtgcattgcaaagttaaatgttgtggttttagaaacctttttttgtcacaatagtgtgtggtagtaactcgatggaaactcgaaaaggtttatgggattctcttgatggttttgggaagatcatcgagccttggatcatcttgggtgatttctattgggttttatgccctatataaaactctttacaatctgattagttatc

SEQ ID NO: 325801 - DNA, 801 bp, Cannabis indica
aaggctgtgaagaatccagaatcaagagaaggacattcgggctcagatcttgatgatactctactacagacaggatacaagggttagagatatgagtggaaggagccattaatatttcactgcacccactataaggtttcctaaactttatatgtgtttatttacattgttttagaaattcatatttagaatgttaaataacatacatggtagtaaatctagatcctggtaaaacatattccaacagtagttacatatagttgagtgctcaagctaatgttttgaatgaacatgttgcaacagtttctaatgttgtgtcttttgaacggcagggaaaattgaatgtaggttaagattaactgtgacgctgcaatctttatcatctaattttattatagtttctttagtcaaacaatttgagaatcagatgacctattggttggctcatttttttgattctaatcttggttgtattttcaacaaaggagatgtcccaattgagttgcagactattattttagttaattgcttttaataaaattacatgatttcttcaaaataaaataaaatatatatatataggactcttctatggggattttttttttaaaaaaaacctataggtggggcatttaattttagtggaccccatgtcatgtaatgattggtaagtcaaatatatatttgttattgtgaatgaggacggaggagattaatgggctgtttggaatgagttaagagaaatgctaaagggcactcatgatgcctaacacccttatgaggtgtaatatcgctattagt

SEQ ID NO: 325802 - DNA, 648 bp, Cannabis indica
ttgactaattggttgcagtactagatagatagatagaataatcatatgggattagggtacaaatgtgttcacttaagagcccaatttagtgtataatggtttattgtattggaaattcaaagaagctcaatttgctatttttttctactgcacatttgcatacttttgagtaaaattacatataaatatgcaaagtcatatttctgattctcaatccattactataaggtagtaaatcgtgattacaataatgcttttggtgataactcaaattttttacaggttacaaaacttaacaaacttttcaaatcagacttgcttgagggctttttgggagcaacttctggaaatatgtcatgttggttgggaccttaggtaataacaaatgcttttctacaatatttcttaacattcctatcatttttgaaatttatgaaccattttttctttctctgttacattttgcaggatgttgaggattttatgggataatcgagttagcaacacctaagaaatgactaaacatgttggatgttggagtttgactcaaattatttatttatctatatttgtaaagttgcaattttttttttaaataattatttttttttttgtaaaagagaaggaggtcgctggtcttagaacgac

SEQ ID NO: 325803 - DNA, 1068 bp, Cannabis indica
atatatatatatatatcaatattaagctgcaaatagtaagaaatggtagtgtgttagtataaaattaagatgttgcttatacaagatcaaattagcaccaacaaacaaattagaatagctaggtaataaggttacctcaaatgagactgagactgaagctaagctaagcaagaagatacgtataaatatttagaagaaaatggcgtagactataataataaaagattgcacatatatatagcaaggcacgtgatattcatttatttaaatggagtggttaggtagagatcatgtggtgttggttaagttaagtatcatgtatggttgtaatgaatacacgttcgtacaaccacatttggatattctatgaaaaaataaataatatatagaatagaataattatttaagtttaaaatacttaagtttaatttttagcggtaataatactaagttatatttttaaaattatgtatgtatctaacggttaaatgttaagtcattatccacgtcttatttttcccttttcttattggtataatgacttagagtaatcaggaattgccacgtggcaatttactaaaatacttaacagtcaggtacctaccgaagctctagaattataacttaagtattattaccgctaaaaagtaaatttaagtatttattcgagatttaaatttaagtatttatgccgcaaattactcaaataaatattctaaataataaatggtcaacaaatagtgtaattagagttttttttttacacaaactatctttttttaaattttttacaacttaatatatttaattttaaaaatatgcgattttataattttaaaattatagaaatcgtaatttctctctaaaaaaaaaaaagagaagtttataataatatatatatctattctatataaagtgtgtctatataactaaaattcttggtttttgagaaatttatgggtgacttttaatttttatcattaatattggaactgatatttgatgttaaatattcgagaatcacaacacatttaaaaaaaaaaaacaacccgggatttgatactctga

SEQ ID NO: 325804 - DNA, 901 bp, Cannabis indica
aatgtttaaaattccgggacatattttataattttttgttgtttttatatttttgtgaaataatcccaaaaaaaaaaaaataggagcatccatggagagaaagtatgagttatattgcttaatgatgtctctcttacaatgattttacaacttccttctaagtctgagaatgagatatttattgatactatttacatgcctactagttgcatgtaacagagtagtggttgcagggtaccctttgtcgtggtgtcagactatgcaggtgtgatgcctttattacttgtattggtcgtacctcattgtactgccactacatcgtcttaggtcgaacaagtgacgtggtcgtactctaacatgtccttggtcgtgtgcttgtctcatcctcttaattccaccctaatggttccctttttaatacttagaaaaatttactaagtgttagttgtgttattaatggaggtgtggggatacaaaatcttaaacaaggaatatggttatcttaaactctgggcgagatatgagagtaagttatatatgttggaacatattttatgaatcttatttactaacacgtatttcaataattaacctaattattgaaccacctagaatatgctttctaaaagagaaaataaacacattaagtttgagtatacttatagcagtgacattgcagaataatgacttcttctgttcggtattctagctctcgaattttttctgtagcagagtgatcaccaaatactgaattcgaatcttttttccatgaatatatgaatgatgttcatcaaagtcttactcagtgccctgagtattacacatgacaagtgtatgcaatctctcaactaactaagaatgatatttatggttgaaatcagcgagagagagagagagagag

SEQ ID NO: 325805 - DNA, 918 bp, Cannabis indica
aggaatagattgtggctgttgatcgatcatggatggtaattgagatgggcagttgtagtgatgatggtggtctgttgtggatgataatgcaaatgatagttatggtgatgatggtggatgaaccagagagatccaagaagaaaagaaaaaaaaataataataataacttattttattttatttatttttaattttaaaaaaaatttgtaatatttaattattattttattttatttttgtaaatagttttgtaattttttttttaaatatttatttatgtggaccaattaaattgtgccacgtgtacactgagtccacgtagacattccaccatggcagttaacagccaaaaatggatggaaagggctaactgctaacggactagtggtttaggtaattttaccaccaaaattttagattaggggttagttgcaaaaacctgtccactataggaggttttgccgcaaataacccttattaaaaacaaaacaaactaataaaaacaaagtgatgatacacaagttttattttgttttaaagaaaaagaagtgatgtgcgtgtgtcatgtgaaagaaagtcatgaagaaaagctgtttatcgaatctaatgtataccgaatataaatttgtaattgaggtataaatataaaatttaatttaaattttaatttttaacaataataataagtaacttataattttgtagttatctgttaaatgttaaataaattgatatgtgttaatttttaattagtttaaatcatttaattttttttaaatagtttaaatataccaataaaaatatgacacgactcttgatatttaacggtcagtacttacagagttaaaaaaatataaattaagtattattatcaataaaaaattaaatttacatatttatatacaatcaaaattaaac

SEQ ID NO: 325806 - DNA, 1004 bp, Cannabis indica
tatatattttaaaatcttttttttttctataccttcagctacgctacccacccccaccatcatcttcttcctccagccacaccacccccacttcattttcttcctctagccataacaaatccctacttcatcttcttcctccaaccacaccctgacccgcacccacacccacatccccatgatcaccgaagtttcaccgcgcacggtggccatctatcatcaacgatgaagcttgcagaaaccatcaacaagatctgaaagatctttgcaagtagatcatatttttaaaagtcattacacttaatgaatctccaacacgatttgattggacccaaaagtttctaagccgacaactcttaatggtaactgaacgataaagggagcttcaggaaacttgaagctcgtggtttgaaactcgatgaaggccacggtagccttgactccagaacgatggagagtctcatggtgtcctccattttttgatggcgagacttcgttggtgtcaagaaaacatcccaaccgagatagagatttgggacttaggggttcagagttagggctctgagatttaatatatttccacacttcttccataatcatgagatgattaaatttaagaaataaaatagtaatgggagaggtcaatgtgctgaaggaagaagatggaggagaaaaaataaaaagaaaagaaaaaattggttttaaaatgtattttgttaattcttttaatttaaaattattaggtggacaaattatgttgcaacacgtggcagttatagatatgttaacagattagttaagtttaggattaatgaacttacaaaatagtcaaccttgagtattattgccgctatttttggaagttggagactaatctatatcaacatgaacttttcaaagacttttgccgtaaaattttccaaacaaaaaaataattattttatatatgcgtgttacaatattatgattaaagggagtgctatatgtaatttttccttttattt

SEQ ID NO: 325807 - DNA, 1884 bp, Cannabis indica
gtaacacaacgcactagactaagaaagaagcattttcacaaaaaatgtcatgcaacacatatagtgggacccatgtgtgatcctaaagttatagaagaaagacaaaattgcccatgcagttttatgctcaacaacattcaacttttgctcatgtggcagtatggcacgctcatagaaatgaccattggcactaatggtgacgtgacatggcccaccatgaaagtccataaatttcaagcgatgaaagagtattccaatattggcaaactattggggttctcggtcaagaaaatactcacatagtgatgtgtcatttatttaatcaagacaaagacaattcaacaatacaagcattcaagttaacatattcaaagaaattatacaagcttatacaagtaaagtaactaaaaacacatatttttctcacttaggaatttcaacaaacactgaatgaaatgttgggtatgtgtaattcaaatgaggggaaaggcattatttaaagtagaaaaggccatgacttgcatttgtccaaggatttccaaaaatacctttgggataagtgccacacagtcttcacttaaagtctaaatgccatttctttccctttgccacttatcacttgtatggacaaaaagaattaatttgcacatgacaaaaactagaaagaagaatttgattctgtgaaagaatgaaaatttgttggttgatgtgatgctggtgctttagtacgtggaggctcaggatgccttattagtgatggggggaacatgattggtgaaagagggttttgaacatggtctcttcccccctcatcaacaccaatacccttaagagctggagatggttgagatggcaggactccattgttgcgtgttgtgcccctctcctcacgggagcctcctcgtggggaatatgtagcattatcttgtgggggtagtaggtccttgtgcgtccctcctagtttgttgttgtgtaggagggggtgcattgttcctcctattctcataacccaaggttgttacgcgttgtcgttattgtgaaggaggacgctcactcctcctgccatggttgtcgttctcacgacaaggttgttgtggtatggcattacaattagtatcacgactttgggttgttcgtgacctatatcactcttggccttcgagagggtaacctgtcgaacaactcccacggtgtcgtcccttcttgccgtcttgggatgcccgcgggttcctcttcgttgtggccttgtggcttccttggctccatatctctcttactactctttgttgagtctgagagtttcatctaaacgctagtgcaatgcctcgttttccatgaacacctcatggacattggtagttcgtcgtacaccatgggatggtgatgatgagcttcccgcatctctttgtcgtcaggcataggttgtttgcctggacgtcgagaggtcccctcgccagcgggctcagcgggttggtactcttcgtggtgttcccttcgttcatgggatcatcatggtccgccttctcatagttccttagtctcgtactcaccatgatagtaaggggtgattaacacttgtgttcactgctctcaatgaaagcaccaaactgttgatgcggtttttcatcaacggatctaaaaagattgtaaaatgagcaagatgaacacaaacaatagttaatcaaagtaaaccagtttgcaaaagtaaattcaccaaagacaaacacaagaattttatagtggttcaccccctttgaattttatagtggttcaccccctttggattttatagtgtaaaaaagtgaattgcttaatttttccaaatatccaacaaaataatttagaacgaaaattcaattattttcataaaatttcacaagcatc

SEQ ID NO: 325808 - DNA, 1860 bp, Cannabis indica
ctccatctgtaatgggattcatgcatccttcttaggattcaagcatccttctagaattatcacgtaccaaagagtgccactctaagactgtccatctataatagaattcatgcaactttcgtaggatttaagcatatgtcctagaattgtcatgtagtaaaaagtgccactctaggactctctatcggtaatgggattcgtgcatcctttgtaagattcaagcacgcgtccttaaattgtcacgtaataaagagtgccactcgaggactctccatccgtaacgggattcatgcatccttcataagatttaagcatctgtcctagaattgtcacgtagcaaagagtgtcacttatacactttccatctgtattgaaattcatgcatctttcttaggattcaagcatccatcctagaattgtcacgtagcaaagagcgccactctaagactctccatctgtaatggaattcatgcatcattcgtaggatttaagcatctgtcctagaattgtcacgtatcaaagagtgcaactctaggactctccatccataatgggattcatgcatccttcgtaggatttaagaatccttcctagaattatcactcagcaaagagtgccactttaggacttcctatccgtcttacatttcaggcgttagtgttaagattttgaggtgttggtcaattgtttttctttatttcctcaaagacaaatttgagtttacttctcgagttagacttgaaaggggttaactttggtaaaaatgatgattcttgaaggggtaattgagattgattacgcgcataaagttattttaggttgtaccatttgaataattataaagattatattgaactaaataagtgttaaatggtaatattataaaagttttttaacctcagattgtcatgagtttactccttcagattgttcaaatgctcatatcttattccccagtccaagtatgggcatgatacaatgtcgatgcttggacttttgtcgtatctggatcattgcaatttttgtcaaatgcttatatatcattccaagtaacatcctgcaatgtcaaagggcatggttgacggaaaagccgtcaatcctccaaagcttaacttagtattgggatattgcagtaaaattcaattgattgaaatttttttacctgacggtcaagtaccaagccttgtgatgtttgtatttagatcctaaaatgtcaggggacacggtcgacggcaaagtcgtctaccctccgatgcttaagtcagtaaggtgaaaagagtatgattgaaattaaaacttaaaattgaaataaatttgatagtttagatataatattgtcttagatgaacaacgttccaactgttgcttacatcacgtccatatgatgtttggagtttgtaaactccttgtccgactatccttgagatcttgtaaggtccttcccatgtcggacctaactttccagctccttcttctctcgtattttgaaaaagtttccttagaacccaatctccaacgttgaactgacaaactctcacgttcttgttaaaatgttgcgccactttatgttgatatgtcgcaacccttatcagtgcttgttctctttgttcatctaatatatcaagcgtgtgagccatattttgcaagtttttagcatccattgtgtgttaaaatcttgtggttggagccttgcctctacgggaatgacttcttctgttttataggttaaggagaaaggtgtttccctggtggaagtctttatcgtcgtcctgtgtgcccataacactcctgggagttcatcttcccatattcttttagccttgtctagtcttttctataaagtgttgggatttatgccct

SEQ ID NO: 325809 - DNA, 504 bp, Cannabis indica
atcaatggctaagagattcaacacgcatcaactcatattttgtggtatagactatcatagtaccatacattaaaagattaatttatagcttaaaaataaataaattaccattatcttcttaattctttcctttttatagtttttttatatataaaaaaataaatcaccattcttatttatttgttttttttttcatttttataatattttacttaaaaatttcattaaatcatatttaaaaaaaaacaaaaataaataaataaataaaacagtagagcactcaaaacaaatatccactaaattaaaaaaaagcaaaaaaacaaataaccatataataataataaaagaagattttgatattagtttgttagattaagtggtttttttctaaaacaaaaagaaaaaaaaataatattttaaactactagatagatgttacgtgccaagtcacgtatgttaattttattttagtttttagtttttttaatattataattttaaaat

SEQ ID NO: 325810 - DNA, 864 bp, Cannabis indica
gtattctgccatgtcattgtgcaaaaattttgataacattttcccctcaagtctgcgtgggaccttctcggtccaacgtggactttactcggtctgaattcttgtccgaacaggtggcacgtggtcgtggtgtcgattgattactttatgtaactctgaccatgactctctttagtttcagctcattaatgctgattgataattttacctcgaaccatgcctcaaaattttcacgtgatgactgttattctataagtaagaaaatccataacgtacacttttagggcaaatttgagacatttaaaatttgaaatgattactcctcttctttcatctgcttatatatagggttgaaaatcctaattaaccacttttagccatttttactcttgaagaatcagagcaaaaatcttttctctttcaatttcttcgaagaatcctcagaaaacactgaccagcgtcatctgaatagatccaaagcattgaattagtcggtaagttctctatttcatcctttttattcgtttgcattgtttaattttttggatttctttctacaaaacttgactgttcttgaacttgttttaggagaaccataaaacttaggtttgagaaatagaaatcttgattatgcgtaatcacgttgcttgatcataatttcgttttaatttcaacatgatgacactcattttgacttaaccatttgtggtttagtgagaatcagaccttaattcaaaattttgaacttattggttgcaaaattcattattatgcaaaattttttatttttgatcttccaatcagacctggtcgatataatcaacctgtaacaccctaactagcaaaggcgtattacgtgatttt

SEQ ID NO: 325811 - DNA, 526 bp, Cannabis indica
gggatgggggtataaataggtagcgggaatgggagcagagattgcattccccatacattaaccgcccaatttccatctctagacacacaacaagaaataaatcaacaatgaccaccttcttgatcttaatgatgaaactttacttgcttgccatatggattaagtaatagggtccagtttaggctaagatgaattaaaattgtgcttaggacccactcaattcagagacaaaaaaaacatagttatcctttaaaaatatatatatatatttttttagtagttttttaaaatattacatattttttaaatgaaaggctcaataatttttatttttcaaaggcccactcaatctcggaatcgactttgtcaagtagtataaaaaccgagcgggaacatggcggtttgtaagtttatggcttgatgaatgacacaacaaaagcaactttgttttgcttgatgtgaataggcactacaagaaatgtcacatttgccagcacattttggtgctggcaaaagttggtattgc

SEQ ID NO: 325812 - DNA, 649 bp, Cannabis indica
acgaatttccaccaagctttaattgaggatttattcgaacattcagcagtaatgggattagtaaaccgaagcttgtatccactagcgaccgagtagataccattaggagtggagtgccaagtgatccaatccggtttgttcatgggaggcttgatgcctaagacccaaggaatatcatcttggtggaaccaactaaccacttcattaactttccaacttccattaggatagagcaaagaactaattgtcacttcttttggaatttgaattttggtgtggaggttgaaaggaggacttctaggcatccataagtcctcattaactcgaatcgcatgaccatctccaacacaccatctagagcctttaataagaagttctcttccccatattataccactccacattgaggacccataatgccccaatttagcttcaaagaagctctctgagggaaaataaagagcttttaagattctagacagcaaacaatccggattagtaattagcttccaaccttgcttagccaagatagcttggttgaagtcttctaaatttcggaatctcatccctccttgctccttcaatctacaaagtttccgccaattaccccaatgtaacttgtgtttattcttggttgatccccaccaaa

SEQ ID NO: 325813 - DNA, 1153 bp, Cannabis indica
ttatttattatgttacagaaccgattatatttcaattataaccggtttgagttactagttttaattcatataacccgttatatttttagttatatctaagacatttacttctggtgacttttccgacgacgttgacttttctagcgacgttaacgtttccagcgacaatgattttttcagtgactttttcggtgccggcaacttttctggaaaaatttattgttgttttacaaatatgagatttcaattttttttttttacaaaatatggcataaaaaaactcatataaatgtaaataataataataataataataattataataataataacccataaccctatagtgttatttatttatgctataaaaacagtaaactatagcctcaattatcatatttatgaaaattcacttactaaatttgagtttgtagtatcccgttagagatgacgttagcttaggcttaattgtaaggacacatccttgataattgattatcatagttggcaagttaaaatactttataaattagggtggcgtttggtaatatttttttattcaattttctctttttaaaattgaaaaagtggaaatacttttcaaaaatatgttttataaaacagttttcacttttcaattttttaattgagaatcataattttgaaaacaaaaaaaaaatgatacttttaattttttttaaacatttttttcttactcaatatttagactccgaccagatctggacccaaatcctctcccatggagttgaaccggcctcagactcgaatccgaatccgactttagacctagacctagagatggaaatttatatcgtggggatggttaaccgagggtacccgcccctaatggggtgggattccccgtcttggtggttaatggggcggtggtgggggacaatttcaatacccgaagcgggaatggggtgggggcggggataatactatccgcaccatatccgaccccgatatagatatatataatttcctttttatcttaacatatatatagtatatatatgattgataatctaaattattttgattatcatccataatcaaaattatatatcatatgcttaaattatgaagatctaatgacgatagtgaactgatgatcattgtggattacatg

SEQ ID NO: 325814 - DNA, 1865 bp, Cannabis indica
ctctcttatttatagtatagctaactaagccaaaggagagtcttttaattttaagcttaaaaggaaaagatagctgataagaaaaagacaataatcttttctcttaacctaatttcttaatgaattccgaaattcctatgagaataggaatgagaattctcctaatgctatttagagtttaaaaagaaaaagataaattataagcaaaagatcaaaaatcttttatcttcttcttttttctctaaatttcaaatggcatattcaacaaggagtaggatttcaatccaattaatcctaatgccatgagaagtacatgaaaattttacgtttcaaagaaaaagataagtgaaaaatgataagttttttctctttttctttgcttagcaatttttgaaaattcccaaacacaagaacaagagaattcaaagtcctaattctattgggaatacttggagaataaaaataattgtccaagattgtcaaaattgatgcccatttagtagttcgagagaaacgggctcggttcacgtcatcaagtcaccccacacaagtgttaagttgacttgggggccaaatgttagtccaaaaaccttccctagtgacgtggacatcaatgtttgacatgtggaaagaaagataacatctcagagttgagtagtcttgagtcaaaacagtcgacctataggggtccctagccctgcacccaggttgactctgggaactccggaatgggcgttcaggttctaataagtcatttccaactctttatgtttaagtattctgtaccatgaatacacagaccaaccaagactaggccctaagagctgaaaatacaggaaccagcacctcaaaagtcaacttgggaacctagggtttcacccaatgtccaagttaacaatcctcactagggtttaagtttctgggactgtcttagtgcaaatgggtcaaactttgcattgggacatgaactaggcataccaaaacatatttgaggcatcagaataagatttagagaactttcatttttgagcatctagacacctgttgcctaagttgacaattcgtcaatctaggccacttccaagcatcaaacagaaaattcgtctcgtgcgtcttctttttcgtcatcaaaaatggggaaacaagtgcttttggggaagatacaacccatcctaggtgcaagaacaagggatcagcgcccaagttaacacctgatgctagcccagggcccaagttagcattttgttaacctgggccaattccaaggagtttttttaaaaattcttctgggaatattctttgttttcttcagagattaagattcaactatttttttggacaaaatagaacttccaggtggcctaaaactggacccaacacccaggttgacacctggtgttgggcccaacgccaagttgacattgggttgtttctgattggttttccaaaaaactgttatgaacatttttaccgtcataaaaaataacgaagatacaaggaaacttgagaagaaaaccacaattttgagggcctagaaattgagcccaacgcccaggctgagcgcccaagttgacaatcaacctggtgcacaggttttgatcattcaaatgccaattctgctttgagcattctctctgaaatggtcaaaaacagggtaagagacctcatcctttataaccttggaagtatcaaaacaacatttcgaaagctccgaaataagcacccagagcccatgttgacatatggcctggtgcgttgggttttgcttatccgattctggttccatctcaaccgtttgccctagtttttttttagaataatttagattcatggagtcagaagagtcaaattcacaacttcatatt

SEQ ID NO: 325815 - DNA, 1671 bp, Cannabis indica
tttgcctccttattctgatggttaattctacctgatgggcttgtaggatcacaacctactgatcttttctttcttggaattcacatctctgctgggtgaaagaatcactcatggcaatgcgtgtttcttcttgttaatgatggagaatgtttgtttgatctcgcacttgccctatggcgtatcttagtctggctagcttagaatcttcccccaagtcaacatggggctcgttgacactagtttggccaaccccaggcctagtttttctagcgtatacttggcggtagctctaattaaaggaaccccccatggtactttgggtaggttttctagcattgacactgagacttgcctagtaatttttggatcttgcctggtattagctaggacttcttgtcaaaaacctgtagatgggtttgcccaaggtggtcgggcaaggatgaccagattgtcaacaatggatggaacccaaacattaggatccacaactatcagatcttggggttcagtggacacacttctccttgtcaagaccatggtgattattaggtgaaaagagatgagatcttcataaaaatgttaaggcaatcaatgaaagtaccaaaatattgactaggaaaattaccaactgactcgaagtctaataaacattgagtaattgtcaacaaagagttaggaataaaaaaaaatagaaagaacacacaaaattatagaggttcgacccccttagatttgggtaatgacctactctccttttagttgtattgattatgagataatattgtgcagatcactaaagaagacaaaatgaattcaagctacagctctcaagatgtttacagaaaatattcagcaaagtgttcttaagtgctagattgtgatttcaggtcctttcctcctatgaattaatttagtatttatagggggaaggttgctacaattagaactgttaaaggagtaaccagaaagtaaatacccttatattctagggtatagttacgatctgttgaagctcttacaatttgggtagatcagtccaatctgcatctataggatacagttcgagaaatttgtggaagttttttgatgaagaattaaggcttgtgtagccttgcgtgacaaacctggaatcgttcaccctggttggcgtgttgacaccctgtcaggcttgtctttcttatgaaattatttgcgaaacattcttgcaaggtgagtcaatcttcccttctctggccggcataatgatagcacaactagatgcttcttggaagtacatttgtagtttatggatatcagcttcatatgggacttgtcacgcatacttctacttggaagtctcttgtcatattaagggtgcattggcttatatcacgcgtaggtgccacgccaaaggtgcaaattttgagataatagaaatatatttttttaaaatgtgtgcaatgagttttaaaaagataactatagaaagatattttttttaaaataaaatatgtctagtttaaatttgaattacaatgggttaaaaaaaaagaataacactttgggtagcgtttggaaagctataatgtaattggatttgtgtgtaattggaggtaattactacaatttgacatcttttgtctgaccatgtaattacactgtaactgtgtaattggaagtaattgaggggtt

SEQ ID NO: 325816 - DNA, 665 bp, Cannabis indica
gagttctaatattttattgagataatcctaatgtaaaaatttaagttactgttgaactaattttcaaccacaataaagttttatttgtaaggtaaaaaaaaaaggttgttaattaaggataaatgctaaaacatagacctatgtatatatgggattatttaaagtttccacttttatcttctccttttaaattatctttatttatatatgtttctagtttctactattggagaaagaaaaggatcaaatagaagcaaacatgtacttttgttcttcttagagattacataatcttttattatcttaaaagattcctgggtagctatcctatattacctaagctagtatcaatttaattatggagaaactcaaaaacgacaaatttagaaatatatatttatatatataatatacacacaccacacaaaaagtgaatttttcaaacagattatttggtgattattatgtttaaatttgtccaataaaataatataattcctcttgtcacaaaaagtacattaatttacaatctctacttctaataaattaataatatttataatattcattatatatttaattgtaaaccttgaagcacatttttagtgatgcatgagatgctttcttttgcttctagtggatatatatttttttttttttaattt

SEQ ID NO: 325817 - DNA, 727 bp, Cannabis indica
ggtccctatatatatatatatatatgatgacctaatacattgtgcatataatatattctcgaatattaatttttgtgagttccaaaaccaataacatattcttagtactcactttccaatgtggtggtccaatgtctcttcttaatctttatatcaaaatattatttaagaataattatattacagcctaaaaaatgagacatttttacaaaaaaaaaaaaaattacttaaagtgcaattttccagactattattcaattaggtataattgtttagatggtaaatgctattttagatttgatattttataaaaattattgattaaatttattattttattaaataataaaatttacattttgtattttcaaaatagtacgaaaacttaataaattgtactaaaagtaagaaaattaggatactacattattgtaaattctatatatataatattagagagtagtaaatcagtcaaaagttttacattagtatctaactattctatgagataaagtaacgaagaaaaaaacattaccagctgagtgtattattactatcatagtatcatgtgttatttgtagttgaggagtactgctaattacaaccacttattacagttttttagtcaatttttacattcgaaattacatgtcgaaataattttttttctaatttttttccattagcggtattcgttatagttacagtatcatccttataaattttt

SEQ ID NO: 325818 - DNA, 773 bp, Cannabis indica
tggaaaattaataatgaggatggtgttaatgcagatttttggttaactatatttgtgcctaaattgtgatagacttgcaaagaaattaaaagcagtaaagaaaagataagagctcaaaggtttttatgtggttttgcagttaaaattctgcatagtccacgagtcagtcttattagatttctgatatagctcttaggcctttttcctgatgaatttttttgtcccttttttaatgtaaccttctcgtatttataattacataggagggcagttaattacatagttgacttatattttacaccaataataccctgaagtccttggccttgttatttatgcccaagaattgttgttttccttcgaaaggacttgtttcccaatttttgatgaatacagattcaattcaagagtcggatctttgatcggacacttgaaaggtgcccagactgacagattgtcaacccgggtgctgggtgctcgggcccctcgcgcctcagggtgtcaaaaatcaacttgctcagaatttaattttaatgccttaaaaatgtccatttgggttctcctcctctctctcacatcgttttcatgtgtacatggagatgcatgcattacatgcacacgtgaaaaatcacatggctcagcctattgagcctcacggcttgaagccacaacccttcggggttcgtggctcgtcgattgaggtgttgggctttgtgccctaaataaaactccatttcaatgtaatctttattattcaattatcaataaagaga

SEQ ID NO: 325819 - DNA, 727 bp, Cannabis indica
cttgagttagccaaactcagggaagttgtagaccatgagcctagaagaaccacacactctgactgcgatatattcgctcaatagagatgagaatcccttgaagaactacacactgctgatggcgatgtactcacttagtagaaatgcaaattccggagatggatggatgaccaagaacacatccttcgatctcaccaggcagagttagattgctgcaacagagaggccagcaatctaataaggcagttcaaccaaagaactaatagagagaggccaggatctcatcagagatccacttcaaaggagaattgttgatggatcagggagggtctataaatatgctgatcaacccagttcctcaggaactcggacagatcttcccttgccagagggattacaatactttccttaaaggtcaaacgacaaaaactggcaaatcttgacaaccaacaacatggggggctggccagggatctcaggctcaacaacagcccccttgtccatcctgtggctggccaaccaccagtaggagtcctcatggctggccacactcctccaatagtccccatggccggccatagaagatcactccctccccaaggggagtgagtcatccaaagatcgattttcaagagacgaggattgggagcatgtggaaactattgggttttatgccctaaataaaactccatttcaatgtaatctattttattcaacatcaataaag

SEQ ID NO: 325820 - DNA, 808 bp, Cannabis indica
gaaattcatcaatatttaaaaatgaagttgatatgcgcaattaactcttaattatttggtgatagttcaaactgcataaacggtaaaactgcaccgcactagttttggcagttacagtttttggggttttttagtttagcagtgcgtgtgcggtttgagaaattgaaaaaattacatgtgacgggttagtttaaaaaaaatggtcaaaaactacactatccgcactgcgaacgacccttgtatttattaggctttaaattttatttacatattttattttattgttttaatttggctattagattccatttaagcagatggtctaaaattggtgtaacagataatgtcaaaaaaaaatgtgtccattaaactataaattgttgagataagcgaaaattattaacaatatactatagaaaatcaatacaaaattaaataaatatttaaataaaaaatactcaatgtcatcatctaacctaatagcaagagaacaattcgattaaaaaaaaaaaactcaatagcaagagactaattaaaaatctctcaagctaagttttaggaatcagttcaagactccataaataattaggaatgaaattgccatttgaaaaaaattgaaaaatgaaacgcaattccattaaaagaaaaattgggatgaaattaccatttcaaaaataaaagaaaattatcttatatactgttttttaattttttttttaaatttacggtttgagtttctaaagtaattgcagtgctagttgcaataggagtttctatacgattttttgttacaatttaagttgtcaac

SEQ ID NO: 325821 - DNA, 1309 bp, Cannabis indica
gatttttttttactaaaattagacaaaagtctttaaatctaacaatctcaatagttcagggaaaatttttaaagacaaaaaaagttcaagggttattatttggtacatgccaaagttcggagagaaaaattactaattaactatttttttttcttttttgacaaatttcttactacgaaatttgatggaataagaaataggggactagtttgtgtgtcattttgaagtcatattttattgcgtgatcaaattaaattggttaggttaaaatgatgctaaaatgtagtattagtttttttttatttttgtgtaaatataaaaaataggaatcacttttttgtaaattaatgttgatttggtacttatattggaccaaagaagctaccgtgtgtgttgttctagttcttaaatcgtaaagaataaagtaataaatggaaaaaagaagaacaaaaaattattaatttaaatatatatatatatatatataaaaaaaaaaaggccatttttttcacttacttgtcgaataggttggagtaggagggcatgtcactttagtgttgtaattttttgttacgttttttttttagaagaaggaaaacgcatgatatgatgataagtatttatgtatatagtacaataacaataaacatcaaatacatacttcatttttaatgactaataataatatgtatgatataggtacacaaccatgttctaacaagtcctcaataaaaaaaatgaaaaggaactttcaacaagtaaaaatgtgtgtagttttgtcaacatttgattggtgaagtggagtgcatgttttgttatgttgtttatatgatataatgtttagattaaataattgtgtaacaagtaattttgtcaaataatttatataataagaagttacatagttatagtatgaattatagaaaagagttgcaaattcttaattaataaattgagttactagttgtatctaagtgtgattaaatggtagtcatagaatatagttgttgggaacttatttctatcatgtatagggtgtataaatgataaaaactaatgttgaaagtattgaactgtttagagtgaagtgggcaacatccaatacaatccaattgaactgaactgatctaatttaatctaattataaaaaattggatatccaattacaattagattggattggatgctaaaaattgtattctaattggattggatcagttattggatgtcaatctgaaaatccaattcaaacccgatctaatctaaatacatttatatatgttaaaaaaattatttatataataaaata

SEQ ID NO: 325822 - DNA, 1044 bp, Cannabis indica
tatcttcatatttttaagttaatattaaaaattaagtttataatttgatatctaattaaaaaatcgattcactccaattagtaattggatcgaattagattggattttgaggtctaattagattggattggatgatgatttttaaatccaattactaattaaattggatcgaatcagatgacaaaaaaaaaatgttagattggatcggatgtccacccctactaaagggtgtcaaaataccaaaaaaaaaggcttaaaagtagggttgttcatataattcgcaatttgtggttccaaacctcaactaatcaggaccaaactagttgagattggacaaaatgaatctagtatcaatagtttggtcaatccaaacagttaataattttttgctttgtgcacggttttaaaattctcgcttgtgattcaaaccaaactaaacctcctaattcttttttattattgaatattgatatttagaaacaatcttatgcataatattgataattagcttaatattgtgttaagaatatttattttcattgttattttcatattataagcattaaagtaaaaataattcagtaaaaaaatattaaaacatttacgaattaaaaatcacagtttcgaaccaaaccaatttgttcttaagtggattggtttggtttagtttgagcatttattgctctaattcggttttgaattttaaaaaaccaacattattagtttggttcgaaaaaaaataagaaccaaaccaaaccatgaacgcgcctcaaaagattaaacaaaaaaatccataggaaggcccgaccaccaaacatgggacttgtctaaaacaagtgttgttactgatatttcgcaacaccaaaaagtacaatttaactggaaaaagagagaataatttgagagatgacaaatgcgagtattcaacctagaatggcgagtactcgaataggaatgcgagagtaaacaacaaagctggaaaaataaatgagacggtgaattatagtggttcagtcagatttcgttctgcttagtccactgtag

SEQ ID NO: 325823 - DNA, 1059 bp, Cannabis indica
ataattaatttattactaaaaacggaagtgttacccattggtaacctgctacttaggtaaaagaaaaatgtaaccatgatggttataataaaaatgtaactattgagtagttacccaaattattataaactaatttataaaatacacacgtggtgtccttacaggttaggacattgtaaacacattttaatctttattttttttcatgatggtgtgcattgtaataataatgaaattcatgttactttttaatttttttaatattttataatactaaaaataaagtttaaacaatttattttgttaccttcatactcaatttttttactagagtaaaaacagtttaatgtaaattcagcaatatgaaccattcataatttttgaaaatttttaagattcactataatattttccgacatataaaataattggaatcaatacttgaagtgtgtcaattaaaataatatgatatatatatatatatatatatataataaatatgcacacacaaaattgagggaggtgaattgtcccccttttcccttcatagatctgcctatgatcataaaaattaaggtcgatgacgtttagtaaaccatattgcattgtatgttaattgtattgtgttgtatagtctagtaaagtattgtcttgtcttgtattatttcaatataatacatggttatttatgacatgtataaatagattgagttaaattatactacttttgttacacaatagtattgtattaaattttttgttttatataaataactaatatatattaggataaatatcattttggatcttgtgttttacaaaagttactgattggaccttctattttattaaatgacaaaatggaccatatattttgtaaaatggtaaaaataggaccctgagcttaatttttgacaattttttttaatataaccaacttgaagacaatttctaacacgaacagatacagaaaatgtaaacagttttgtcataacacatttagatcgaattattattacactactacaaaattcactattcacgtcggtcaacgcgact

SEQ ID NO: 325824 - DNA, 518 bp, Cannabis indica
aaaatatatttatttattattatgtgtctttttaaatttatacaattgataacatagttagaaaaaattgacaattttttttcttttacaaaagtgctaaaatatgtagtacttcaataatgatgctattataatcaagtattactttaagttaacttatgtgacgagaaaaattatttttaaataatatttattttattttttttttaaaaaataggttccgttttaaatttcgcccaagtctctcaacatcctgagaaggccctgtttaagagattcaattgacaaagatgctttgatgagaggtggtaggaatgggaattttaaagctaaggttttttaaatctctcttacctctccaaggaaaattgactatgctcctaagatttggcataaaatgaacatccctaaacattggttctaggaatggcaaattggggttttttcgcggatcggatcggggcccgacccgatggggcagtcctgccccggtagaatcgaatcgatattcgggtctt

SEQ ID NO: 325825 - DNA, 856 bp, Cannabis indica
gaaagttaaatttttcaccactaaaagcatagattttacatatatgatacggcgtaagctggggtctcgacaatattgatggatcgagtaaattatgaaaaatgggtttcgggcacacagcattgtaatttcggaaagaatgacgtttaatactatcaatcatatatatgttctatacatattacataatgccaacgtgtgaacacaaatccgtacccatttttttcaacgccctttgttttcgttaaaagttcgttccatttatgtataataattcaaaccataatataaatcccagcctaggcccctacctttagtactgcttatatatataaatatgtagttatatatacatatttagcttgtttagaacttagctgaaaaggatttgattagattaaattggattatactgagactaattttatgtttagtttaagaataaatttattattatatttatttagttttacttaaaaaaaaaaaaacttaaaattaaaataaaaatatataataataaataaattctcagtaaaaataataaaaataattaaattgtgaaataaaataaaataatatatcatatataatcaaatatatatcataaatatataataaataatttattatatttatatttaataaataattacaataataaaataaaatatttaaataatataaaattatttatactaaataataatttaaccactaatttaatacaaatattaattttctaaaataatactataatttttctagtaatttataaaaaaaatataattttattattataatatttctcttagaaacaatttaagtaattattattttaaattttgaaagtttatgt

SEQ ID NO: 325826 - DNA, 1843 bp, Cannabis indica
ctcaaggtcttctcctaggtcaaaatgaggctcgccaattgttgacttgcccactctcaggctggtctctccagcgtagaagagttgaggtccagttttttcgctaggtggttgtcgctcctgggtctttccttccctagaaggtgccaatggtggatatactcttggaggtgtggccctgccacttggattcactgagatgctcacctctggttggccagctgtgttagccaaacttgttgcgcctattacggtgacatgattcaccacatctatagtattcatggggattctagttatgattagaacccgagtacctagatctgcaatttgtgagtcttgagggtgacgcgaagatgcaaatgatgcgataggagttcttcttgtgttcaccatggcgtttgatagatcacgatatccacgctctgaatgaaagaaccaaactattgatctcaaaaaataatcaaccaacaatggggtcgtgcacatctgatgcttaacatgtgtgtgaacaaataagaatgaaaagcaatagacaataggatttgtgatagagcttcggcctccttgtgatagcgggtaatgacctacaccccttttagttgtattatatcgagccaattactatccaaattgctataggtgggatatgctatagtaccttaagattacaatgtataaatcaatgcttgtgaaaattcaagtgttggacaacctagggtaagcatgtgagagagagtgagagagagagtgaggaagagagagagtttgttaggcacctagagtttcagatcaggtttctagcttagaggcaacttagtttttcacttagagattgatgcctttatattggaggccttaaaccctaggtttacaattcaaatccttcattaatcgtatagttagctagacattaaaaaaataccaaagtccacttgactttagatagtatgcagccattcaactgggctcttagggccctattcgcagcccattactattggccatgtgtggaagtgtccatcaaggcctacagagcactccttggtcgaccaagaccctgtggtggccaagcgggccggccatagtgttgtccccaggccagccaaccaactcttgagagggagtagatctgtcaattgatccccatttgagtgacgggaacttcgtttactcgagtactcacttggccatccttttagtgagatgtattgccatgtggcactggttctatccactaggcatgccacgtcataaggacaaaaattgggataacagtagaagttcacaacttcagtttaaccctctaattggggatgatatgtcttgatgtgcttcaagcttgtccctaggagtttgaataatttctcaaaaagagacttaggaaaatcttttctcgatttcacactatagagtagggtttcccatttgtcttgaccacttcttgcgcaaaaacttcagctactgtagaagttgtataaggatggcaaaagggaacgaagttcccatacttactgaaatagtctaccacgactatgatagagtcaaagccatattacataggcaatccctcaatcaaatccatggatatgtcatcccaaacttgttctggaatgggccattgttgccacaacgcggttgacgtttgagtgaaatacttgttttgttaacagacaacacactccacaacaaaacgctaaacatccttcctcattttaggccaaaacaagttagttgcctttcgttgaaggagacgaatactagcaaaatactatggtaataccaaccttcctctaaaaaaaaggactccttatacaagtgtgtaactgttggaaatatttta

SEQ ID NO: 325827 - DNA, 1061 bp, Cannabis indica
ttgtcatttccatcaaaaaaattaatcatccaacaatgaggtgttacacgctaaggaagatttttcatgagtgactggagaagggagacgtggggactcgcacgcgagctatgtgtgctggaaatgggggtcgtgggagatgtgagtgggggtgggcgtcatgcgacccaagcatgcgagtggagtgtgcgcgaggggtagtgacgagcagtgtgtacactttggagggatgtaggtgtagggaaggaaatgagggcatatggataaaggtgaagttgagtaagaactccaaggacacggcgtgcagaggaaggcatatacccacgccttttgaaacctctgaatgaaggggagtacaagtagcggcaacaacgaacctggatggtctgacgacccgaccaaaggtacaccatgacgactcacctaaggcttgcatgtgaagactcccaaacctgcaactggggaccacacacctacaactcaaaacgacgcgtctgcaactcaggagcacacacatgcagctcgggaccacctaggagcgcaggcttgcaatcggggaccacatgacactagacaagagtacgaggtgccaaagcactccaggcacatgcaacccacagtttgaaagcgatgtgttgataccctttgaccatgttgtacccttggccactagtgcctataaatacccccatttgagatgtgagtggggttagaagttcattttttggtaactcataaagaaaacgcaatagagagcattattcattcatttcacttcttctctttatctcatattttaatagttacatattttttgaaaactaacttggttgacgagttctgtccatcaacaccaagctcaaaagaaactctcatttcacttctaaataatcatagaagctataggtgtacgtatttatgattaacactcctactcaattgaaatactaagttcccaagatgtaagtatgagctacatcgatgggtaaggtggtttcgaacacgttaaaaagctcaagtaatataattagcttaaagcttaatcatctcaggattgagat

SEQ ID NO: 325828 - DNA, 1020 bp, Cannabis indica
catcactgtaattgtgaataataatacgttatgaatttatacaaaaaatgtatattaaaacataaacatgaaaataacatgttaacttaaataacttctaatcttctattgatagcaattcgatcatattgaaacgagttttatttagggcagaaaatcccaacatgtatctcattgcaactcaatgtacacttcaccaatacccttatatactaatctgatggctttatattttgctaaacatatgtatatctgtatctcagtgtaactctatgtacactttaccaataccctgatatgttactctaatgacaactggaatatgcatgctaaacatttacatatgtgtgtccattatgctaatcttacctcaattttgtaatcaagtgtgttagtcaaactaagtggaagaaacttctcgatgatcagagaccctaagtcacattcacataaaattggtaagtatttcgctaacactgtcggggatttaaagtcaaaactaaaaatttttctatcaataaatattgtggcaataccctgaatatcaagaaaacataaaaattgaggtacctgaaaaccaccgtaatcggtggactagatccccaaacagttcaccatttcttggggtcttgtctgaggaaactgttcaccatttttacggaaacagtttttcgtagcaaaaatcccaaactcaaacttatcttcttcaattctaccttaaattttctcaatctttctagaacacattaaaatcaagttataaacatatttcaaagcttaaacgcaacaataaacctcctaaaagaaaatcactattggagaccaaactttgaatttccaaaactcaaaacttggttccaactacaacaactgccacaagcctccaaattcaaccttaaacaatcataaaagaacttaaaaaacaatctatatctagcccatattcatacaaaaacaaattctccaaaactaagttttcttttttaaactaacaacataaaagagtctagggctttacct

SEQ ID NO: 325829 - DNA, 871 bp, Cannabis indica
aaaaagaaaagaatagtctcataatctaactaatgactctaaacctagtttacatcttgtcagacaactagagagttttgagacttcttcttctaaatttcaaaatccaagagtgttcgtcacataaaatttcgagccttagtgattgattgcatgcccactcataacaagttagtcctcaatcatagtgtataagactgtgaagaatccaaacaattgaaggagtatcagactcagatcttgattatactctgcgacataaaagaacaagggttagagatctaagtggaaggagtcatttaattccgctgtaaccaatgtaaagttcctcatactttatatgtgtttaagtttcattgttttagaaattcatatttaggttttctaaaacatacttgttagtaaatctagaacctggtaaaatataatccaacacttttctcttaagaaagctaaagaaaaacagaggccaatcttacctttaaccttagctttgattttgatcttgtttccctttgcttactctagctgacatgattggaaagagacagatttttgttgagttgtttggttttcaaaagaggctgagagaaaggatttgagaatgaagaagaagcttttaatttttggtttggttgactaagtctttcttgtcattacacaagacttagtcacagcttcacctcacgcaaaggttatgactcaccagccacccacacacctagctttggatgactaagctccatttttctaaatgactattttgtcccttacttcactcttaagtaagcttataactctaggaataaaatgttggatatattttaccaggatctagatttactaccatgtatgtttcattaacatccta

SEQ ID NO: 325830 - DNA, 733 bp, Cannabis indica
ggaaaggaaaggccatactggtggagcaggaacaggaggattctttgaatgacgatgctctttctttacttgttcaagaaaatgcccctgcccacgtgcagtgtactttaacttgcattcaaatcttttgcatttcctcatattgtacttgtttgtaaccttctttattttattcataaacaaatatgtctaaaaaggtgtatcaggctctaaattaagaagagatcaggggatagctttggcaaaatacctccggccaaaagatcaaaggtggatgaggtaccgcccaaggagaaaatttcggttgagtcacccattaacctcttcgaggaggtggtgtcagtggtggagcttccagtcaagaagaactccaagtctaagaaggccaagggaggaagcacggagggatgtgtactgtccaagtcctcaggtgctcttatcgtgctgaaccctgagaccaagaagggcaaagagatgcttcaattttataaggattggttgctccaagaggtgaacaattagttgtccggaggggacggcatgtttgaagaattgctgatgggcaggatactgaaggaggtaacccgagtaagtacttctccttcagttcttatttcattcttttacctgtccaggttttgacctttctccgtgcagctcaacttgaagatggcctacacatattcttgacccaagtccacggccttaaggactatatgttggaaattatttt

SEQ ID NO: 325831 - DNA, 509 bp, Cannabis indica
acataaatatttttatatacatttaagtgtattcggaaattttaataattttcttaaatactactaaaaatatctgtcactgtcgtttttataattaaacactttattttattttgttaccatataaacctcaccattttcaaaactaggttagagttttaataatttaaattaaataaatattttctttgatcttacgcaatttttataggttcgatctcgttcttcacaatttttacactccaataaaaattcatgtacttgcaagttgataaatataaaacgtaccattttgataccaatacagttctagctaattcccttgtaattgtctttctatataaatatagacaattctcagattagtagttgttagtcgttgatatacttttagaaattatgtagttaagaaacattgcatattgataagctcctttaaaggatattaattttaaaaaaaatattaaattattaaattttgatctaataacgaataataaaaaaaaatt

SEQ ID NO: 325832 - DNA, 909 bp, Cannabis indica
ttgttttaatattatttgaaaaactcttttaaatattttactttgatcaacgggggacacttagtataacaaacccttaaaattagataatatataataaaaaattaaaaaaataatgcatacatactatttggttgcaatgtacctccgcctctgaagctatctttaacttttttaaatagatttactattttcaaagaataagtgatgagaatgaggactaatactctatgtttataggtgaaatactttattagtatctattccaaaataaattatcaaaatattttaacaattaatttaaaatattaaatcgagtaatcaaatattcgatgaatcgaaatctaaccatatttagaatatttatagcaatcacataattattttggaattaattatagtcaatatcaatctcatatccaaaacgtaaaattaattcatacacatataaaataatttagagattttatacatacataaaaactatactaattttctcccacttggtgagtatttaaatttactacttaaatcgaacgattatccttgctatacaaaaaatatataaatcatggaactatgtccttattatataacgagaattatcgtccatgtgttacgatatatatgttactatttaacaagatttttgaaaacaaaatataataaaaaaaaaagctaagaaaatgaatcaaataaatgaaattgagatggagatttttacatggttcatgtattaatgaatcctaatccacgagtcaatagtattaggctaagtagccttgaagtattacagcaatgttcgtgacaagcttaagaacgctaactttttgctatagtatttgagtccttaatttttaaccgttttcatgaagatatattattgtaacaccctaactatcttaggcg

SEQ ID NO: 325833 - DNA, 778 bp, Cannabis indica
aatagtggagtgaggagtaggtgacgatgagagtggtcaatagaagtagtagtagaagtagaaataagagatgtggagttcaattagaggtaagtatatatatatatatatatatatatatataaatgatcttgaagataatgtatggtgtttgcttgcttctaaggaagttgttaaggaggcagagaagaattagagtaatttgccaagaaggttgctgatttttgttctatatatgctagtgtaagtgtaatggaggacaaagttggctatcaaatcaaaacacttattgatgaacatgatgactgcttgctggtgcacaacaataaagaatagatgcaaagtttgctgtctgaaaaatagaaagaaagatttagatcagatcctggaaccacctgcaatgggttattgaccaagtaaagatgactttaaaagtgaagtgccttatttatgcaataatgagtactaaagcaaaaataagaaacaaaagttaagaaaatatttttttaattgctacatattgttgaaaaatatgacaaatatatattgatatggtattccaaatgattcatttatatatgatcaaatttggtgggatatatgcatataaatttatattttagttagtaaatgtacatagagagaaattatgatgtgttagcttattagtcttgtacgtaaattagtcagtagttctgtgatccgcaaaggtaaatattgggtaagatgtgcaatctcataggagtaagcaaaaaatccaagaaaccgaccaaaccga

SEQ ID NO: 325834 - DNA, 972 bp, Cannabis indica
gacaaaagtccttaaatttaacaatctcaatagttcggagggaatttttaacggccaaaaaagttcagatagcacgaattactacatgtcaaatttcaaagggaaaaattattaattagcctttaacaattctaacatattaattaatactacactaatgttacattattaaatttcttcaaaaagaaaaagaagataacatattagaatgggcacattttcaacatttgttatagttaataggcactactagaaaaaaaaaattccttttaattccatcaacattggactagatacaaagacatagaaagagttatttgtagtaataaggagatttttactacctaaaaccacaacaagggcattagttcgtgtggaaaagtaaaaattaattacatatttatgggattttctttttgtgtcttccaaaaaaatgaattttcttttaattaaattttatatggtctttttaaaaaatttaattttttatgagattttttcactttagtttttatactatatgtttagtttttttttccttcaagaaatcagtttctcaatatttatgaatgcgtaatagtaacttgattctttttttggtgatataagtgtattttatttgtgttgtttttcaattggttttttatttaattattttaggaattggttcttgatttagttaattcaagaaatcgtttgtttttccatgcaacttgtttttgtgggttagtcttaatttagttattttatgtaatcagtttctttgtatcatattttttatttagctaatacatgtaactagtttttgtatttttctttatttaaccagttttttgttttaatttatcctttaattatttagtattttattttttcatttcaatttttactttattgtattaaataactagtttgtgtgtttaattattggcttttttttaagggatattttcaaaaatatgggaaaaatga

SEQ ID NO: 325835 - DNA, 1086 bp, Cannabis indica
aacaaccagaaaaaaactaaagaaaaatttaaaaacaacaaagagaaacttacatcgcgtgcagacttggaaatttttgctctcttagtcttaggagcatctactttaacaggaagggctcttttcttagtgcccgatgtctctggaacatcagccactaaatttttagcaattttttttaaccccatcttaggttcgactttggaagtaacagttggagccttcttcgattttttagaaactttcttcgccggagatggtgatttcgaaccacttctagtggttgccatttatatagagaaaatatagtggaggatgacaatgtaggttgaggaaaacgtgggtgagggcttggagaaggtgatcgtgggaagaagaaattggttagggcttgataatggtgatcgtgggaagctcggtttgaagagtggaagaatcagataaatgaaaaattcaaaaaaaaaaaaaaataagaaaggagttatgaggtggcgtgcgtgtacgtgtgtaaggaagaagggaaaaggtaaaattgtaattattaaactttttgaaaagtaaaattgaaaaatgtaaaagttaaaaaagtttaaaaaaccgtgtataggataaaaatgtaaaaaaggtgtcaattttgacatgaggtgtaaaaatctcataaaaatatgtaaaaaaaaattctccatcaaccatatataacaaagcctcacaaatttagaagccttagcatttatattttacacaaccaacttgtattttaaataaataattaaaaaaatgtgagttataaaaaataaaaagttactatattaaattgatggtattttattatttataattaattatttagggtatgagttatcaaaaatataaagacactaaataaatattcaactaatgaaagaaacataaaagtggagagcgtatgcccactaaatgttctgagacagttattgtattgtttttttttcatttgtcttcttgatcaaccttctgtaaccaccatcttccttcccaaattcaacttttttcattgttctagtaatctttttttactatacatcacatggattcacttgaatattc

SEQ ID NO: 325836 - DNA, 661 bp, Cannabis indica
aaattgtcaatttatattttctacataagaattccaaatttatattattttgttaaataattgtttcaattaattacattaaaaaggtcatgtatagcattattaaatatttttttaaaaaaatgtatatgttttatagctatagtgtcctttttttagggacacttattaagagacacttaatatttaaaataaataaactaatataatgacccattcgtgtgactttaaaatgtattttttctgacacttgcattagtgtcctgcattgaaggatcactaaaaatcctttgagttacttacaacatgtaactaatgttagaatttgtgaaataagatgaatggggctccatcccaaaaccaattggcaatgggaggagtagccctttcatcttatatatcacaatttatttccacacattagcaatgtgggactaactcttaatacaccctcctcacgtttgggcctggaaagtgtgggtataacgaacgacctttaagagaccacaggactgaacgtgacatttgaaagaatcccacaaggccaaatatcgggaaacttgtgggtgtacacgtcgggaaatttgtggattttgaaacaggtcaaagacccaacactggaaattggcacacattggccgaaaggtcccaaatagaggtt

SEQ ID NO: 325837 - DNA, 590 bp, Cannabis indica
aagagatccaggttcagatattgataatgctctgctacagaaaggaatcaagggctagatatctgaatggaaggagtcattatattctgctgcacccaatgtaaggtttactaaactttatatgtgtttatttcatcgttttagaaagttcatatttagggtgttaatcaacatacttgtgagtagatctaagatcctggtaaaataatatccaacagtcaatgctttgtggtcacactgaatgaagctgcatataagtggtttaaaaggataggattggggacaatcacatcgtggaagcaattttcattttgaattcctcctccaacaccacgaggctgcacgtgattacataatgcatgtcacaagtatcaccaatgtgaggcaaggggaataagaaagcatgcaaaactacatccagagcttcaatgtcagagttatcgaagtagggaaagtgtccaaagatgaactcaagattactataggagtacacatttgtaatggactatggggaacatgctgaaaagataattggtggcatagatgagtgttgggttttgtgccctaaataaaacccattacaatctgat

SEQ ID NO: 325838 - DNA, 604 bp, Cannabis indica
attatattttaaatgacgtggaaatgtaaaacatcttaaaaaaaaaatgctaacagtggagatggtcttactgcagtaaatttatgtcacaggaaaatattaacttcttttgttttggaatcagtacgtcatgctttattgagaaatgtccaacgtaccactaaattctcaatctgcggcattatgctttgtctgtagtctgtactctgtacttaacaaccacatttctttttttttttttctcattattttattatattttataatattatatatatttatgttggaggctttttttttttggagttcttttttattattttgacacctaaaaatatttttaatagtaacatccaatattaaaaatttatacatctaaaaataattattatttaatatttattttaatttttagctacaataatttttttagctttaattttttttataaaaaaaaaaattaatagcatcaatgccacaacatagttatgtatacaaatttttagaataacatcattttttttcttcaatggtataacatctcaatattttacgacataatatgtccacctcactaagcatcctctaaaattttaccattaga

SEQ ID NO: 325839 - DNA, 763 bp, Cannabis indica
cagctggcaagacatcatattctcttccaaaaaaatatctatgccaatttgtgttctttaactacttaatcagagaaaattgatatacatttgattccatatggcttttatatgaaaaagaggattagttttggtttcaaaaaaaaaaaaagagagagagaattagtttttaaattggttttatatgaagatattagagaatctcacattgctaatgtgtgaaaagataatagaatatataagagaaatggactactcctcccgttaccccattcagcttattcctaaattctaacaagaagaagaggaggattagttttaacaatctctattacgcctctcaaagactaaagcaaataagaatattagactaaaacatttctccgtgtttaagattccatgtgtaagaaataagatacaactctcccaaagtttccataccaatgaggataaacataaggtgaactgggtattaccagaagttggtttcaaactccacacgtgtctaattaacttcaataaataggaccatcaaattcaaagatatcaccaaacatattttgattagtccccgtatatttaataggaaaatttacattccagtactttaatttcattctttttacaaaaatatggtgttgtcatttttatatcaaagtgtaccgttttgggtactgttttcaatttaattcactttttttaaattttttttttaaaaaaaaaaaaaaaaactagactgggacgtgtgtgatgtgtgctgacg

SEQ ID NO: 325840 - DNA, 920 bp, Cannabis indica
ttaaataaatatatatttttaaaataatattagatgaaaatacacttcaaataatgagctttatataagatatcgatctccattgtggtctacatagtctgtttagtgagtagtcaaccctaatgaatgaatgttcattagcaatttaactcctatccaagggagttggtattggagaaggcttgttttgctgaaagaacagttcagagatatttgtgcaggtcagttgtatgctcttcagccttatcatgttgccaaaggctaccaattgttgaggctgaatctagaaaaggtgagctagagtcaatatgtttgggggagatcaaacatccccaaacacagcttcatcacattggttgcaattcaaggaagacttaaaacaaaggacaggttggtttgaatgggaattactggtgatacgcaatgtgttctttactgtcaaaccgaagaaacaagctcccatttgttctttgattgtttagttgctgcagaatgcttaagtgtagtaaaagagtggctgcaatggcatgctactgctactgatttacctagaataattaggtggataggaagagctaaaatgagcaagtttcggaagcaaacctatgttgcctccattgctggtcgagtatacactttgtggacagcccaaaatgccataatctggagcaatgaccaggttcatcccgagcagttgattcaacgagttaagaatactatgaagcaaaggatttcactttgttggccagaacgagtgaaagaagaagacaaagaatggttccaaatgttgtaaagattgtaaataaaagaatagtgataggtgatatttgtatagttattcttggcccttgaggggtacatttagtttgtaaaaactttgattgtgagcaatacaacttctctgattcatcaaaaaaaaa

SEQ ID NO: 325841 - DNA, 873 bp, Cannabis indica
aattccaagagtggatggatcaacagataaaaatcatgagacctcagcaagaggcatttgataaccattccaagtatgttgtcgtgctgattaggcaagcctatcaaataattggacaaaaatcagtggcagacactctgattatacaggatacaaactgaaggaaaaatatctacatccccactagatctctatacaggccagaagaatgctcagctggaaacactcagtaaactcaaggaaacaagtcgttcaatcgaaggtcatagagtcaaactgtgggccacacggtagatgagcgagttttgcctactcattacttgggggaaatggccagcataatatccatccttggatagatataccgaaccaacccattactataacaaccatacatgcagaccttgggtgaatcagtatttaagggacgacgttaatcacaaacagggaaacaatggacaatacatctctcccaatgttcagccgacctattattgggatttatgctttaaaagcaagcatttaatagataatatattacagaatatatgaaatacaattataagataagtgaatatatttattatagaattataattaataaattatcttataattaataaatatctaaaaattccttattatggagaaggtacaatcttgtaaggatggacaagagaattaagattatacaatataaataaaactagtcggtagtgtattaatgtaaatgaatctttaatatagaactactaagtgcagtttactatacactatactctagtgtctgtgattttgattcgaatcatatatgtagataaacatgtggtaaaggttctatgtataatttgattatacatgactgaactgata

SEQ ID NO: 325842 - DNA, 1704 bp, Cannabis indica
aaaaaaaaaaaattaagtcaaaacatatcgaggtacttagtataaatttcatgcaatggacaaaaattttttttttgataaatcaacaagtttattattgatccacaaacttttacattctattacaatgagagagcatcttttaataaaaaaagatctcaaagctaattttgtgcaacttttacaacttttgaaactaatctctatcttcttgaccaaactttctactctatgcttgacactattcttaattctttgtatagttacatctttgttttctatgtgtttgttccacaaattatcatttcttacataccaaatcgagtataccaagtgggcaatggcagcagccgataccctctttttaaacttgctgattttgcttttgtgaatccatttgaggagttgatatagatcataagcttgtgttctccatgaaaaccactctttgattttctccacacaataccgtgcataagaacatctgaatagcaggtgttcgattgactcatcatgctgcagacagagattacaaacaacatctgaagtaatttggaatttctgaagccaatctttagtcttgagcctattttgtatagctagccacaataaaaaattgtgttttgggatattgaagctcccccaaacttgatcacaccaatggaccctgttttgaattggactaagcaagttatagctttcagagatacggtacctgctttgtgtgaactgttgtgtagcagtaagagttttgactgtatttggctgccacgatttgcttccaataccaacttccatgactcagaacttggtatccccaccattcttcttctttgaggtatgtatcaatttaacccagaggttgtcttctttgtttgctaatgcccatacgtatttaaagagagctgttgagttccattctgatagcttcttaaaacccgatcctccttctgattttgattgacaaacattagtccaagctattaaaccagccccttgcatcatgtgttgccctttccaaagatgctctgcatatagcttcaatctcatgcacaacctgttttggtaacttgagtatctgacaccagtatgcatagattgttgaaagaacatagtttatgaggactgctctactagcaaaagaaatattcctagtgctccaagattgacttctagttgtcattttttctattaagaccgaacactcctgtttttatattttcttagcacaaatagggacaccaaggtatctaaaaggagtgaactgccttgaaaaacctgatacatccagcactcggcatacctcatgttcatccatgttgctgcaaaaaattacagatttggaattgtttggctacaaacctaaagtagccgagaagagcttcaagccttgaagcataagaacaatgcttctataatcccctctgcaaaaaagcaatacatcatctacaaagctcaggtgattgagttttagatcttcacatctttcatggaaagtaaaaccctccttgctgccaactttcttcacaattcttgtcaaatactccataccaatgacaaagagaagaggggataagggatctccctgacgtgatcccctcattgattcaaagaatccatggagagatccattgaaaaaaaagagagaattttggggttctgacacaattcattacaagcgtaataaattgttcaggaaagagc

SEQ ID NO: 325843 - DNA, 871 bp, Cannabis indica
tttttatctagcaatataatcatgcttttactaaaaaaaaaatgaaaaaaattttgtttaacaaattaaaagaaaaaagaaacttaatattgtgagaaataataaagaatgaaagtttttgtcaccaataagcatattgaaatattcgttaaaaataacaaaataagaacgttgaaatatgaatgttcttttttttttcgaaaatagcgtagatatattaaacaacaaataagttagacctcacggtcattataaaataagttacttggaatagaggatggatccaccatacccgccacattacagttaaaatcccatttagccacattatgggcagcacagttacaacttctaaaaataaatgaaaaattacaaccagtcaaaagggtcgagagctttttacaattagttacataattagtaataccccaattggaggacaatcccttcagagtattagttacggtctcagaattgctctcaatgatcacaaaagaaagcttccctctaaccgctgattccagggccaacaagcaagccgcaacttctccaataagtggatcagaaaaattgaggatattgcttgcaatccacaaaattgacttcttatgatccctagccaaagccaccacacacattgagtcgctaccaaccttaacgtcacagttgattttgacccaatcttccggcgatggagaccataatgacgtcgtacaaatcactggagtgggaaataaacaaaggttgtaatctgtgtaacaagtagaaatatagtcaatacaatgcttaatgttatagatgtaagtagtgttagacttttatttgggcttacattaaattttattggttttattaaaacttgggttgattg

SEQ ID NO: 325844 - DNA, 1156 bp, Cannabis indica
tttaactaatcaaaatgcatataataacttacatttaaaaaatattggtgacttaaatatttatgatatatattattttaaaatactgtttactaagatggtaggttactgaatgacaatttatcatttttaaaaataaacttaaaagttacttaaatgtattaatttaattcaaataattaatcgattatttaagtgcatatgtataagttttaaagggaaacaaaatgtattatcaaattatataatgtagaagtgatactttttttatgaaaaagttacttcttgatttattatcaacatcataagtaaccaaaaggttctttttgaaacgcaaaaaaattgaaaaataaaagaatttcgggaaaaatgtttccctctactctgctctctccctccatggcgaggaagaagaaggtaggtcggaaaccagtcacgcgcatccctttagaagaagtcttctttggaatcacaagggaggtggaggcggacgatgattcacgttcgacggagggcttgcagttgatagctgagatggtcaatgctcatgacctaattgaaatagaggactcaaatccttcacctaggagtcgatcccaaagctgggctgaagaagttgatgaagagcatccgaaggtggaagagcaccagcaatccccaaaatcgcctcaaaattctgggagagtctttcgaaggaaaagacattgaagagggatcaaaagcctctattcatggagccaatgatcagagatgggttgaaaatagcacaggtggatctggatgaagtctgagaagaagaactatgctggaaatcagcagttatctataaggtattgggtgctaatccaccaattaccatttttgaaagatttgttaaaagggtttggggtcatcttggtattgctcaggtttcaaaactgtgtatgggccttatcatggtgcgatttaacgatgaagcatcacgagatcaagttgtggaagtgggagtggttcaattccgtcgaaagtcagtcattgttcgaccatgggctgcggatcttaacacagtgaatttggttcgcacagttcctttgtggattagattacatgacctaggtgttggaaatattttaccaggatctagatttactaccatgtatgtttcattaacatccta

SEQ ID NO: 325845 - DNA, 1725 bp, Cannabis indica
ataaatcttatttatgacaaaattgaaaaattaatttcggaccttaaaatatggctcacatgtgtaggcccaatctacacgtgtagagtgacatataaagacccatgattaatttgttttgattgttttattggttaaaattatgtaaattaaattaagttaattatcttttaaatattaattaaatgaattatttgataattgtttaattaaaagaataattattaaaataaaaaatctactgatatttgatattcagttattaaatatttatatttgaattttaattttaattcaaatcaaattagatatttactttattttaaataaaggataaaaaatactttatttataacactatatataggatatatagtaacataataaaaaaggctgaaacagaaaaatcagaaccctaaacaatagaaagtaagcacctaaaagcaaggaaaaataggattgatttttcactccctattctctctctcatgcgcccactctctctctctctcccctctctcacacgtgtatacaactatttaggtgtgtgtgagatacaaaaccctaactctattatagtgtctcatgagttgagtacacactataaatacctaaatttgttcatccaataagatctaattgcccactctattcttgagtattgaggttggcttggaagatcaaggtgtggattcttcaacaaagttcttggattggatgttcgaaattatacgaaaagaaataaggatatcctgataggcttcaagaggtataatctttctttcagtagtttagatttaatctatatatattatgttgtgatccttgggcttatggttcatattatataaaaactatttttatcaaatttcgcttccacttttataactctgatatggaccataaaaactaacagtgacttgtactgtacgaagaattaagatcactgaccatgaataaaatagttagcaaaatttaaagttatggaatctttaatcaacgtttgttattacggcttattgatgctggttattttatgcaattaatctcgattcgaatagctaatgtaatatgatatttaagtgaaggtattgtatataataaagattatataggacatggactgatatgtaattaagttttctttatcaaacatgttgtttactttaaagaactaatacatatcacaacaatgatcaatagtagatcaacctgaatcttgagtaatcataaactcctgttcatgttattagtttctgtgattcactcattaaaatttctcaaagaatatgattcttacaacttatgttttgggaagctaataatgtggatggctggaaacttaatttacaatcatggaatctgtaaacccgtaaactttccctggtgatgtggacatcaatgacatgaaagataacatcttggagttgagtagtcccgacgtatagcagtcgacctaggaggggtccctagccctacgaccatgttgactccaagaactttggaatggaagttcagattctgttaaatcatttccaactcactttctagttgggttttgtgccctaaataaaacccatttcaatataatagatttactaattaataaatattagaaatcgcttttatgttgcatggttcacatgatttattttatgattatgtttaatgtaaaaattctattaagtccagaacatatatgaatatgtatatatttgttcatga

SEQ ID NO: 325846 - DNA, 1009 bp, Cannabis indica
actgacgcctgtacttacgcccaatacgtcgctaggaaaattacatcacctaaccaggtgagctcatacctacgctcggtactgacgctcgtacttatgcccagtacgtcgccaagaaaattgcatcacctaacaggtgagctcgtacctacattcggtactcatcatatatcactgacgctcgtacttatgcctagtacatcgccaggaaaattgcatcacctaatcaagtgagcccacttatcacatgcataatatcattacattatcgatactcaaccaatcaatctattcattatataaaaatcttaactatatctcaatattaatcatttcattgcaatactaattgtatcacatacaacgtaatatgcagtataatatacttttattaccttaaggttcggtttaagttggtccacctacttggagtacgatcgatgatctcgggccctacgtcataacaataatagactaattatcgtttatccaaaaacacttcttaacagttgaaaaggacaacttagggtttcctaccaaaactcgtagtttaaatatgctaatataaaacttatattttggatctaaaacatactccatatggtagagctcattgcaaacttcaaaatggtatatagaacatccaaaatggacacctgagtgaaaagttatgacaaaaatacgattcccgagttcccgaagttgcctgaaatggtaaaccggttgtctagaactggttgaccggtttatcagggttaataatatgatttttcaagtttacgcacttaccaaaacgctagtagaacctgtccaaaccaccccaaacttcatagggcacatatataccatatatactaccatacttacgtaatagcatctaaaatcgagcacgtaattagcaaatgccactagtgtttggacttaaattataaaaagttctaaattcaatttataactaaaaatcacctcaattttagcaagaaaacatcagaactagtcccatgactac

SEQ ID NO: 325847 - DNA, 1032 bp, Cannabis indica
atattgtttttaaaaaacactaaccaaacatgatttgtttttaaaaacttcagaaactattttttgttttcatttctaaaaataattttttgaaaacaaaaaacagaaaacaataccaaacatgctctaagtttttcaaaatttaagactgactcgagcctcagagtgtctaatcgtaagaaatcacatgagtctttaaacaaatcctaacgaagaagagacacaagaattgggaaaagttaggatattgaagtaagctcataagttaggatattgaagtaagctgattgagtacagtttctatttttagggacttcacattgaccaatttttcaatattaaaacaaaaataatgaaattgaaatgttcacttaaaacttaaattatgcacaaaaatattatacatttaatgtaacattatgtttaaaaattatgaattttcaataaatattagaaaaaaaaaccactgtcgcatatcattactcataagatcatatttatcatatatggttcccataataaatgagcaatatatataaataccttgacaataaatatattacaggttgaaagttcttctacatatttcttatgaatcgaatccagaaacaacacatcagaaaatcctcttttctttgctctggttagtgctttcaaacactgtctcatgtgaaaacacaacaatatataaaaaccaaattattttgtagtgatcataattagttataattttattattattgttttattaattccaacttactggggaatagtttgatatggctttcacatgtccagttccaccaggagatgctctatgaaactcatcctcaacatatatgtttaatggagccaaaccttcctgttaattaattttctcattacaaacaatatatatgtaaaaattaataaagaacaattctctagcttgtggtctccaggaaaaaaggagattcattataaaaaaaattaattagtaattttttccccctgaactttgacatgtactaaatcgtgtctctgaactttttt

SEQ ID NO: 325848 - DNA, 1345 bp, Cannabis indica
taattaaggaaactgttttatttggaaagttgtgctcttgcttctccctatataaagcaacttttgttctcttctcttctatgcttaagaccacaaaataggatgttaatcaaacatacttggtagtaaatctagatcctggtaaaataattccaacacctcaaacatccacacaactagcactggtggtggtcctggaagaagatgaactagatccatgtgtaggtgtggaaagaacaattaaaccaatggaggagatagaagaagtgtgcatcagtgatgaggatcccactaaagtcatcaaagctggaaagaatctatctccaactgctacagaaataattatctccacaataaaagaaaatagtgatgtgttaaacatagatttgtcatgcattaaacatagattccacggtagaaccagtctgtcagaagagaagaccattagatccggttcaagtggaagtagacaagttgaccaatatagagttcctccgggaggctttatatccactttgacttcccaatccagtattggtcccaaagcctaatggaacctagagaatgtgcatagacttcacaaatctaaataatgctttcctaaaagactgctttacacttccatgaatagatcgaatggttgacactacctcagggtatgaacttctgagctttatggatgcataatccatctataatcaaatcaaaatgcatgtggcagactaggaacacactagctttcaaactaataaaggcatttatttctatatggttatgttgtctggattggaaaatgctagagccacatattaacgccttgtcaacaagatgttcaaggatgttttggggaagaatatgaaagtctacgtagatgatatgcaagtaaattctaagacctccatgagccagcatgaagatttaggagaagctttcttcatcatcctaaagtatggaatgaaactgaacccaaaaaaatacacttttagagtttcctcagggaaatttctaggtttcattgttagtactttcaagcccatgccaccaaggtattgttggaatttattttaccaggatcttaaatctactcacaagtatgttgtttaacatcctaaatatgaactctaacactctaactagcataggcatgtttacgtgatttaaacgtattgtgcagctcgttgctaatcaacgaggtttatggaaattgtgattaattaaaattttgcttatttaattaaatacttataatatttcatacaaaatactttgggatgccatttacaaaatactttacaaaaagtttaatgttcattacaaaatacatgtcgcccagcgactaactaca

SEQ ID NO: 325849 - DNA, 897 bp, Cannabis indica
gatcagtatagatctctcacatttttcaccgtaaagataatgcctccatatctttagggtaaaaaccacagcagcaagctctaagtcatgagttgggtagcgctgctcataatctttcagttgacgagaggcataagctatgcctctatcagcttgcatttgaacacatcccaaaccctgtctggatgcatcacaataaacaataaatttctcttgatctgatggcaaagctaacactggagctgttatcaaacgttgcttcaacacctgaaaacttgtttcacatttatctgaccacacaaatctgtgatttttcgtagtcaattcggttaggggcattgagtttgatataaaatcgtgttcaattaaaactttaaaataataaaataaattcagaaataatgtcataaacataaattgttttacaaaacctgagatcccaaaatctgtctttcaaattcaaacataatactcaatgattaataaagctgagcccatattgtcttgaagacctgaatattctaagtctaatcatctagatatgtacaatcttcactgagctccaatacccacagtggttcagccctagtctttagttgcacatgaaacatatatttttgagtcaacgaacttagtaaaaaaaacataaacataaacataaaactagactgtaacaaggtaccaatacaccgtatcgtgatcctataactaggttaggaacgttcttaacaaaagtattactaatcataatatcatcctatactggcactctagtcgcactgatgtgatagcgctaatccatactattagtacaatcgactagaataacaacctatactcagcactctagtcgtactgataaggtagcatcgattcatactaactaaatttcccaac

SEQ ID NO: 325850 - DNA, 843 bp, Cannabis indica
ttatccaaacacaattattatacatatatatatagtacgttcatgttgatatagtgtatcatcatattgtccatagatatatttgttgatgatattccatatagttcatatatatatatgtgcatgcgcgcatgatatatggatacaatacaaatatattatatatatcggaaatatatataggtagtgtgttactaataagagatattgttagaatttttatttagatttatattaatttaattagttttaataaaacgtaggttaataggataattgttatattgtatgtgtgtaataaagtttaattaaagtaaaattataggtttttctagttaatttaactaaaatcttttatgaagcatttaatgagcatgctcaatctaattaattataatgttatgtatttaccttttaataattaaataaataaaattgcttatacaaattttgtatcttaatttattaatttttgagttacataccttctataatatattacagtggtactcaatactttttataaatagtattcaataattagttagcgaaaatattttttaaaaattatttttttaaagttatataaaatccgacatttaattaaactaataatagtatgaatatacactaagtactaataatatcttttaacgattctcatatcttatatatgagaattgctaaaagatactggtacattccttagtgtcataataacaggtttcatataacttaaaaaaaaactaagtccacctaactatattgtatgggagtatgattttgtcctgttattgtcttctcggaattgtaatccgtgatgtcggcagccgtcagatgatg

SEQ ID NO: 325851 - DNA, 662 bp, Cannabis indica
aaatactcatttttgtagtagtgctagagaggaatgatgaaaagtggccgaactatatataaaaattaatagaacttaataataaataaaataagatgcataaaaaaatttacaatactttctaatttgttataattttgatgtttctttttttataaccacttctaacaatttcaatatcattgataccacataataagcatccaataatattataaaaataataaaaagatgttggaatattatatagataaataattgaataaatttatttaatataataaaaattaataattgaatattaggaatattagtaagtgattgaaaaaaatgtgagttacgatttttaaaattatgtgatatttgaaaaaatagctactaataaaaaagaatcgtgtgattttaagaaaataagtgattttagagatgatatttgggtttaaagaataaagtaaaagaataatgtgtgaattatcatatttgaaaacaaaaaaaaagtttttttttttttttaagaaaaatgattttagagattatttttctttttaaattatgtgatatttgaatttatttaaaaacaaactttaaaaaaatgatgtacaacacgtataattaataaattaaaaaaaataaaaaatagatttggagttattattttttaa

SEQ ID NO: 325852 - DNA, 1905 bp, Cannabis indica
tatttttgagtgaatgtcactttgaagacaccctccataaaaagaaataaagaagacatcgattgaaacatttgcattagagacagtgtcagctgaattaagttcgaagtgacaattttatcatatgtataagtgacaaaatattattgtatgttatgtatttttgatgatgatgatgatgatgatgatgatgatgatgatgattaacttgaagaaatatattatttcataaaaataagcaaaaagataatacatgtgagtattcctaagaatgagggggacagagagagccctacaataaaccaagacccaagtataaaagtagagacaaaggatgtaagttcccatgccaaataataaagtagaggattttgtcactacatatgacaaatataaatgattagtttataatgtgatctagattacagtgaacattaaactcaagtacgaggctgagtgagtgtttcaattacttcttctaaaaacaagacaacttcttctatgtacatgtcagtggattaaactataaagtcttatttgactcacacaataatatttatttggccttgtcctaattaatagtaaaattatttcatacacaaagaaaagaaaggggttcgaatgttttattttattagcgcctaaaacattatatatgttagtgtcacacatcacacatcagacagtcttataacacttaataatcttattgctagtacaaagactattgtagcgtttggttggacgtaatgaaatggaatggaatagaaagaaaacaattttcatttcattcatttgtttgattgtattttaaagtattgaaatgacattctaatagaatgctctttccaccattttggtggaataaaaaagaaggaaagaccatttcaatgtaacaagagaaaaaatttaatgaattttttatcaatttttttatgcattttaaattttattccattccattcccattacaatttctattcatattcccattcccgttgctaatcctatattttttaaggtcgataagagagatgacttgtgatacagataaaaagagatataacgctaatccatatagtcaagatcaaactcaagctttccctaaagttggcttttcctcttagcctttgtaggttgtgcttttgagattaacacttactatatagactttgctattatatatcttctgggtggtaatctttgagctaatgataatattcttatgatctatcctaataaaggaatagcccggcgagaaaatttagaaagacatgtttggaaagatagataagatttttattatttaaaaacttgtgcccttaacagaaaatgagaggccatatatataggccctaaacaaacagaaaatattacacatttaattattacagacagaaaaacattaaagacttatattacatctttccctagataggaaatctctgacatacaagactcttttttttttattaaccacaaacagacaaaattttcagatggccagaggaatctctgttgtctgaaagatttcttgtcgttagttgtcattttgttacgagaaggaatctttattggtcttgggagtagttactggtcaaggcacacgaaacaatggactcactttttaggagtcacatgtccacttcattattgacataagacaaatacatcataaacacagatggacatctttccagtggttcaggagttttaccaattttttttaatgggctcatgtgagggactgagattcatgtactcctctatgtcactatcgtcttcttgccacgatgatgaaggacttgctcttttgtttccacttgttgatgcagtgggtttgttgttgacaggtggagatatagacaatccctacatatttcttcatcaaggtcattgagtgag

SEQ ID NO: 325853 - DNA, 753 bp, Cannabis indica
aaaaaaaaaaaagagaatttacttatatacatttctaacttttattattttcataaatattgtgacataggttttttaacatttatactgggaatttcaattttttttacaaaaatactaaaagactaacgcatgcatctcaacagctaacctcccacgcgcgtgtggtacactgctactctttcctgtgcttcgcacacataaaagctaccgcagcattagtgcccatacctagtgcggaaagtagtccttggaatgtcctcctctcgaatactcaactgatgatagcccaatcgaagatcaatcttagagaaaacagtcttcccctgaagttgatcaaacaagtcgtcgatcctaagtaaaggatacttattcttgatagtcattttatttagttcctggtagtcaatgcacatgcgtagggatctgtctttctttttaacaaacaacacgggagctcccaagggtgacacactaagtcatggaaaccctaggtcaagcatccctaaagttgaatcttcaattctttaagctctgccggagccattctgtaaggtgctttagaaactgctccaggtgctaagtcaataacgaaatctatttctcgctgcggtggtaaacccagaagttcatcaagaaatatatctaaaaattcctgaaccactatgatgtcttctggtcgaattaattcaggtcatgtggtatccaataccgctgccaaaaaccctaagcatccatcttgtaacaaatctc

SEQ ID NO: 325854 - DNA, 862 bp, Cannabis indica
cataagttacaattccaaggaagaaaacagctgcaaaaaagataaagagtgaggatatctggaactctttttttgtgcgggtactgaagaggttgcgaacagcatcatcgtttgtgtttaaaaagagcgaggcgagatcattgtaatggcccggtggacactgaaaggccttatagtttccagatttaacattatggcagctaactgtaatgccttcagggcaagggatgcacttggcagaccaaggcaacaagtaagagcagcatgaagttaaaatggctattgtcataaccagcaagattttagtaacagcaccttttctgcaatgaaatcaaataatgcttagtactgactgactatcatatttaatgaaataagagatggtgatatatacccattcataattttataagctcgaagaactttgttcacaaggtagttgtagagactgccaaggaatcctccagtaataccaatgaatatcacagccaagatatcaggggcattaaatattgctgcagctgagcttacatcgtacatgatcagacctcctagcccgaatagaccacattttcccgtagagcaaaattgtataaaagctctcaacactatagcaactattgctgttgtgaaaaatgccctccaaagaagagcattgcgccaccttaaccacaccaaacacaacaacctttagtactgcaataaaatagttcatgtatttattattatactaattttgtttgacaagtaagatgtggaagaaagataagtaccaagaagcagcctcctcaagggcgaacagaacaccaccaacaggagcacgaaatgctgcagctacaccagcagcagcaccacaagtgat

SEQ ID NO: 325855 - DNA, 1397 bp, Cannabis indica
tctaaaatttaaagtcaaagacttaaatttataccaaataattcttgagttactattctagcttggaccaccactactaatctaactctaagtttatgttgcctaaagtaaacatatacaagtaggagatttctaagatcaaggatttatatcatttcgggatagatagtcgggaatatagtcatctgtgtcattcaatttcataagagaaattttgagtgacatcataagcattgatttataaaccatctatccaatgatatactatctaagcaatttctaaataaaaagctaaaagaaaaataaaggataatttcgattaaaataagaatccaatgatgtcccatttaggcgagagtcaaagttattcttattttataaatctcttcacagtacaacaaatgagggtttcaggggcgacaatatcaggaacgacgaaatattttttttgatagtaacaatttggtttattttaaaaataattaaatgattatttggaatgacaatattctcatccgatgtgaaaataggatatatttttttcgttcctaatttttttgtctttttttttgtcaaattaaatggattcttacctccctaaaaattaaacatcaccatttcaccatttcagacacagctgccattctctttcatctccaaccctccttccatctccgaccatggcccagcacctctccgaccgagcacccaaccggtgatcccttcgacgatcctcggtaagttttatttctaaatctagatttatctctatctctatctcatatcattaatctaaaaatacatatcacaatttttttggggttactatgtttgtagccggaggcatcacgacgtcggagccaattaattgctttgctgactgctcttcatagacgatttctcagccaattgcttcaatgactgctccatcgacaattgctcagcaacttgcttcggtgatttatccatcaacaattagaaatatcgatgattgctccagcaacgtacatcgacttctggcttttggtttgctttcaggtacgatgatgattctctttctttgatctgattttgatttcttgtttgggttagctctcgagaaattgctggagaagagaagaaaaatttaaactatggactgtggctatctgttttctaaactataagactcaactcagtaatgtgagctagttgcatatgatgccgatgccacaaatgcaacaaccatcacagatcccagcagtacaacctactaggacagtacaaaaaaagttgtaaaccgtccaaaccgaataacccgcccaaatcgaaccgaaaaaactgataaaattacaaactgaaataacctgaaaaaattacaacccgcccaatctgttaattgggcgggttgaaaatag

SEQ ID NO: 325856 - DNA, 611 bp, Cannabis indica
ggtattcataccagtcaagatatcgaagctctttaggaaaagagtctaagccatgaggaaactgaaatcgatcgttgaagccatggttccacttaccccgcgatagttgaagaaattttaatcttgacatttttttaaagacagaagggtccaagtttatgcatttttttcctctctcagaaccaccccaatatatcccttggatttttgaagtgccctaaaatggaaaagtataataaccaataaatttcaaataatgaatgtttctttaataatgatcaagtttttttttttacaaaaaaaaagataatcaactttattaacatttaaattttgctaccaaacatcaagaaagttccttgaattaatatatatatatatatatataaaggaatgtataaaagaagtcatgtttttaattctttatttttcaataatgatctatttttcaaattttctttttatttagtttaaattcattatttttatttactcatatttatattgaatattactaattaacactacaaatacaaattttcataaatgataattaattaacaaaaaaaaatatgaagagtttatggattataataattacaaaaaaaaaa

SEQ ID NO: 325857 - DNA, 938 bp, Cannabis indica
agaagaaggtgaaggagatacagattaaaaccctactaagaattttaaaagtatgaccgaaccgaataattataaacaattcagattcactaaaattattcaaattaaccaagttcattaatgtggtcagatttgaaacctacattaatgtactaaaaaatctatatggttactaaaaagcataagtttttttgacataataataatatgttcttaataatattttttatttcttccaagatcctttattattacataagtctttattaatgttaatgctataattctaataaataaataataaaagaagggaaataataattatggggtatatatagcagaatgatatatatatttatatatatatatatatatatatatatatttgacaaaaatgagagacataacccctgaattaaggcctaattataataatacttaatcagtaaacctttgctcaacaatcatgatgcatttaatgaagaaaattcatataaaatatatgataaaacttcttcatctgtagctataattgtagagagctctattcttttagtttacttgataattaatgtaataataataataataatatatttatacaatattaatagttaagttaactttcatgtaggggtaagcaaaatatctgcttaaccacaaaatccgtattattcgaactgcatcacacagtgtaatgtggttaactttattcgtgctgcggttataattaaaaaatttacaaccatccagatacgggttaagcaaaataaatattaaaaaatttaaaataaaataaaatattttacaaaccatttctatacttgtgagaatgattacgtatatataatatgtacatatttcgagtattaaatatagacataagctttagaaaataagagaacctataaatgctacattgggatatgctacaatta

SEQ ID NO: 325858 - DNA, 1289 bp, Cannabis indica
attacacaaagttaaaaaaaaaaagagaaagagagaaaagaaaaaaaatagaaaagaagagctcccaccaccaatattttttggtcatcaccactaaaaccccaccactcatactaagaagagtaagataatcaaatgagcttttgacaaagagaaaaccttccatagacttgaccaaggcaaaaaaaaaataatcacatgccttactactgtttctgtttcttcctagccatgaaaactctagtcccttgtttgacaaaaactaacatgagaatgaacagttacattgacttgacagtctctctctctcgctctcggcatgagttgggaactaagagtacagaatactcaaatgtcatgagtgataatagaccaaccacagggtttgggatctttctgttggtggcattaggagggactgtttgattcaggcttaaccatagttggaccatctggttggtgtgttcggaaaatagcagaagccagagatatgggcatgatgcagagtgccttggactgaaggaactgcatggcagctcctacatcttcttccatcagttttgctacctgttgttctgtgccatcagtcgaccacttctcccaagctgcttcactgtctccaccttcaactcctcctccctttatttcacaaatttatgattacaaaaatgagaagtaaaaacactagtccaagcaaagttgtttcaaaaagaactacgtaatagtatgtttgaatatatcactatatatggctaatatagagcttagccgtcttgtggaatgtaactgattgatagttttttatttgtttatctttaattacaggctatgtaacaaatattgttaggtaaaggttcatctaaggattatagtacctcaactgatgataagggtacatcagctacaagctgagccactgcaccagccccaccgagtctactcatgcttaagacctgtttcaacagccgaaaaacgccaataaatacagcaagctgaaaattcatgaaaattgcaaaacatggtcttcctatcaaatcatgaattcataatgtatgggagattcctattgaagacactcaatttcagtttgacatcataactacttcaaatagaaaataatgaaaaatacaaatatatacatctaatggtatctgggacctactacatgataattacatgctacggactatagaagaaatttactacacaattggtaagcatttgaaacaagtttctaaaaacatgacgttagaaaatgcataaaaagttttacctagtaagaaaaaaaa

SEQ ID NO: 325859 - DNA, 469 bp, Cannabis indica
ttggacatccacataattattaatatttataacaagtattactttctcaaactaaaaatgctagacaacaaatattttttaaatgaatagatcaaattcatttgacaaaagaaaaaaaaattgaataagtcaaataaaatataaacaaaaagtaatatataactcaaccgagatatctataatattattataaaatattttttgtctattaaatatcccaaaaataaaattaacaaaatctaaatatttttataagactgtatgcacagtagttattaggtttcatttttttaggacatagtagtacaatctgcacctaatatcttctaataacatccccaaagtcgttgctaataatgtgcatgttgctcctaatagttcgatgaaaaactctatgccccctcaaatccgtcaatattaattgtaattgatacatgcctttaaaaaataataaaaaaaagggtaaata

SEQ ID NO: 325860 - DNA, 717 bp, Cannabis indica
ataaaaaaaaaattattaaatttttttcttattaaattggaatgacatttccttccttttaaaaatagaatagtcattacatcaaaatagtggaaaaaacatttcattagaatgtcataatatatattatgattttgtgcagctattgtctaaataaatgttgttatttaaaaaaatatatataagtataaaaaatatcatatatattttttgactgaaaattttaaactttattagacttcaagattttggattagactcaaaagttaaatgacaatccagatttaatctagcaactttagcaaacgtataaattattacatttattgatcatttaacaaaaaaaaataacaacattatattatgaacattttatatttaaagatagtattatgtatatattttaagcttcattattatgaacattttattataaaaaaattatttactccatttaaaatatgattcttttttagtgtagcattatagtattttataatcaattaataacttaataacttaaaggtgttaattgaaccatgtaaaatatgatatcaacactaaaatatgtacaaatatataatttcaagctgcaaattggttttgaatctaggatgcaaatttattaagtatacgaggcccaacttttccatgaatatgcacacccatatttgataagatgggtaatctattgaacataaaagatatgaaagaatg

SEQ ID NO: 325861 - DNA, 820 bp, Cannabis indica
caaaaaaaaaaaaataataacatattaagtatatctaaaataactaggtggtccggtttagtttgaattacatacagtttgaaaaacatgattaaaccaaagaatcattataagcaatctaaattgattagaccattcgcaccagattcatttggtgtggagtttggaacctcatattctaaattatatgaaccttataatattgtatactttgttttgtaactgtgctttctccttctatacaattcatatattaattattaaaatgcctttatcaaaattgattattccgcgttatacaatttgtctaagggcttttaaatgcagttctaaactaattaaagtggcaaaatgtgaccaagtaatttaaagtaacccactcgaattgattaatttcaaaccaatcaatcaaatcaaatatcaaacaaagcatggacccctttgaaattttgtctcaaattttcgaatgtagtcaatctatagcatttaattatttttttgaccttctttccttgttgcattaacttggatttgttgctacatttggtcccagtttttgatatggcataccaattatatgtaattggattatataatacgcctcgattatagttgtcaacttacaatttactgaatttaggtagcgtttggttggaggtaatgaaatggaatggaatggaaaggaaataattttcattccattcctttgtttggttgcattttaaagtattggaatggcattccaatggaatgctctttccaccattttggtggaatggctattccattttaaaaaggaaggaatgaccattccaatgta

SEQ ID NO: 325862 - DNA, 1277 bp, Cannabis indica
gggttcttacaaaaaaaaaagtttgtccttctagcctttcttggcatccatctcaagagcactcatgcacctagttctcgattgtggctcatgtgacgtacctcattgtaggtgggggcgatccgcctcagagggtcttgacgaacatttgtgagcggggttggagctctcgtggttaagccctgataaaagagccacacttagtagccctctcctcttcttattatggagaaaaaataatgtaggtttttttttttaaaaaaaaaaatactagttaaaatagcaatttatgataatgtgttacgatattgaagcaataatatgataacatcgttattaacacgttaaaagtcaaacttaattgttgataccaaaacacatgaaaaaaatcatgtaagtatagtatttaagttaaaaaaattgatattttaatcgcattattgtacattattattatctttccatttctcaacaatcaattatttaacatagtttactactgagtgagcggtctagtgacaaagtgtttactccaaagaattttttgtgttggttcgaatcttatagctcatttgagagtcttaaatgtgatgataaagtttgcccttctagtcactcttggcatccatctcacgagcactcacgaacttagtgctcaattgtggctcatgtgacgcacctcattgtagggggagcgacccgcctcaaagggtcttgacaaacattcatgagcggggttgaagctcttatagttacgcccaaatagaagagccacacttggtagccctctgctcatcttgttatggagaaaaaaatactagctaaaatatacatttaaaataatttcaacttgtattttgggtaataaatttgaaatgtgcttggaaagaactatgtaattactaaatagtataattattagggttgtaagtacacaatctagtaattacactatattttaaaatataatatatttttggatataagatagtaattacatataaatttagtatcttgtttgggaatataattaaaagttacacagaaaaataatatttttttagtagttaatatttaatttttttttttttttttagtaattacactcaattcagggtcatgtgaattggaaagtataattggaactcaatggtagaataacaagggcccacgcccaaaacccgctctcacttaagcccaaaaagccctttaacaaaaaagctctaaatttattttttaaaaatatcatatttatattttaattattatttattaaa

SEQ ID NO: 325863 - DNA, 887 bp, Cannabis indica
aaggtgacagcattgggcttacaacccaacttgaaaatcatcttaaataacctaattgcctcaaaaatcttattctccaaacacagccctttaactaaagatgtataagtcacaatatttggattataacccttccttatcatgcttcccagtgccacaaaaccatcagaaactcggtttaaattacagtagcaattaagcaaaacattgatcattatgaaactgggcaacaacccatttgagttaatccaatcataaagcttaaaaacatcagagtagtgtttgttcttagctaaaacaacaatcaaaggattaaatgaagacactggaggagtggggttcatacgaatcatctcatcaaagcaggaacgcaattcagagagagaaacattacctgagttgcggttgagtaacttttcaagtaaggtcggcatcggagccttgggtactgaacttggcgaagacttaatgggttttgttgtattaatttgaggggttttgggttgattgggtgttttccgtggcataaagaaggatgagagtttatgttttgaagagacagataaagattgttcctttgcagcagcagcagcagcagaagagtaagagggcattgatttgaacaccattggagaaggctgaacagagacgaagaagaacaaagaagagagatattttttgtgtttggtagttataatatagtttttattttgaacaaatatataatgtaaagaaacttgatttaaggtgtcaaaatgtaattgaaataatcagttgcacccgttttattttgactatttttgaactttatttttgaaatttttacactaaaatacaaaatacatattttattactaaaatactaccacacggttaagcctacattt

SEQ ID NO: 325864 - DNA, 930 bp, Cannabis indica
atttggctgtgtttgaaaaatgtacttttttatatttatttatttatttattttatttttttttttttttgtaaaatagtatagttacaatcctaatgacaaaataacagcccctacttgtaaaatttccataaacatatatatgcatattatgaggtaataataaagaaaaatagtaataaaacctctctaaataatttactttgacatttttcaatatattttatctagaaaaaaaaattaccttgtataattttttattttagtttaatattgtgtatttattaggctatagtgagaattgagaagtgcattgtatcaagaaaatgtaatagttgaagaaaagtaccaaaatgacaaaagtttgactcaatatagtgacatgttttgtagttttgtactaaaaaaacacaataaatatggctgatgtggcaatatatagatatacacaaattaatacaagattctttcatataaaaattccttttttatttttacatgacatcatggcatgttatgtgtgatgtgatgactaaacggctaagatcactctaaagtagataattacttatatcgtccatcctgtatatgtgttttttttttgtaaattattatcattataagcacttggaaatattttataattagttatctaatttttataataattattaaattaacaaatattaaatttgatacatatgcatatattaagttgatgctagtatattataattaattttctttttaattaagttaattatgtgatattataatgttctctttttaaattttcattggatcttatacacgagtatgtcactctgactgtttcatgaaatgacgactgatcctataaatcaacataatagtttctagcgtgctttgtcctcaaccgcacacttcatgggaaaacttctcaggaggtca

SEQ ID NO: 325865 - DNA, 764 bp, Cannabis indica
gtataaattatttctttttaatttataaaaaagatgtgacgtgtcagaattgtattgaattaacacattatgggacacaattttctaacagaggatcttcattcaaaattgtgatatatttgagtcaaaaaactaactaactttgctatgcatttgtattaatttttaatattgtgtttcaatacatattcgtataattcagtgtaaatttattatttaatgaatgttttcaattaaacataaaataatttaatcaagaattttattatgtaaaacaatgaaaaattaatgtaaaagtttataattcagtacaataagtaatttaataataaagcactacaaaatagtattgaagtaaatacaaaaataatatattatgatacaaattttatatttaaattaatttttgttatgttgcaaatttaaattaactttttacattattaaagcaaaaattcttacatgatgaattatattttaacaatagattactaatttatccaataatttaattaatttattaaaaagttgtttataaaagtaggttatttaaaatttttgtttttgtttttatctataattactacttataacttcaattttttagtttattaaattatttccctaatccaatactgcatcatttaactataattaaaaatggataatttcacaaatgcacaaaaataacaaaaatacgattgcacggaattttaaacatttttacgattttttaattttatttacagaaaatacgatttttt

SEQ ID NO: 325866 - DNA, 1188 bp, Cannabis indica
tatctatactcagtttgtatattcgaataatataccctaagtatttttagtgttgtcgctttctctttcacgcagcaaggttgagatctcatcataagcgtatgcactcacatggtttatcgtcaatacataaattagcagttcgtatgtttttgtctcgcagaaggctattcagccagccgagttataaacctaccctgcgagtacttgtcatttgtatgtttgagttcttcccagctcgacacgtgtccacctctgatgtgcttaccgaactttgggtaaaacaactatatatacattacacaaggaaagactagaaaacaacctaactgttaaactaaattaactaacaacctttaactgttttaataggccacctcaagatgaagtgtaaaaaatttttacactcatcttggagaataaattatgaaaatgtgttgggaaaagagtttttgtaaagatgtcaaatatgttggatttggaggagacatgattggtcttgatctttctattatcgatcttttcacgaatgagatgacaatctatttccatgtgtttggtaccttcgtgattaactagatttttagaaatatgaagagttgcactgttgtcatagaagagtgttgaaggaagtttgatgttgatgttgaagtcgtgtatggagtgtagccatgttagttcgtaggtggcattagccattactctgtattcggctttagctaatgaacgtgagacagtgtgctgcttctttgatttctaagagatcaaagagttgccaaggaagatgtaatatcctgagatggagggctgagtgtcccaacagactccccaatctgcgtctgcaaaggcttaaagattaagtggtgctggtgtagaggcatggaagaataaaccttggctaggggtgcctttcaggtactggaggattctgtcagctgcatggaggtggggttctcgaggtgtgtgaagatactggctcaacttgttaatagcgaatgagatgtcatgtctagtgatggttaaatagatgagtttcccaatgagactcctatattgagcgaggttttgaagttgttttcctgtctcattattgagattgatgttgggttccataggagtggaaaccagtttcgtaccaaggtgaccagtattgtaacaccctaactagcataggcgtattacgtgatt

SEQ ID NO: 325867 - DNA, 562 bp, Cannabis indica
attttgtaatttttgtgaacaataaaataagatgtgcgataaggtattaatatatcatcgaaatgtaataatttatgaaaactttgaatagtaagatattttttagacatattcaacaatcgaattgttaccttgatatctcaaaagatcaataattgtattataattaaaattatttgtgttgagttaaactatcaaaatgatccaatcggtttagaaatcgttgtcgatcaaactcgtatgtagtagcttctagtaatgctagttgataatagactctaattagtgtgtgatataattaattttcttttcctatttatacttaatttcaaagtttgacatagccccaccatgtcatgagtttgtctcttacgtcagactcagactcagggagtgcgtgaaccactaaaaagaaatcatatttctattaacaaaactcatatattaatttatctaatgactttttataattttcaattaattatttttttttacttatttacttgaatatttataaattttaattaattatttttttaattttaaatatatattaattttt

SEQ ID NO: 325868 - DNA, 744 bp, Cannabis indica
caactaagcgcctctttgacacttaaggtagagacagttgaaaacgtctcgattataatatataacaatcagtaaacaattcgttcacggcggagagaagataatactaaattttaattttattaaaattttactaaaattctactaaatttatgaacttaatattaaaatacactataatatgttaatttttataatgcttaacatattaaggtgacaaatattttctcatgattttaagttttccaaacattaatttacttgatatgatctctttaaaaaagtagatcattattggagatcacactaaggaaaagaaagttaataaacttattactatgtcatgggtttataactttttgttttttcttaaacatttttacccctaatcaattaattgatgctgctaaagaaaagctagataagtattaagtgcagataaggaacaaactaaaaagagaagaaaagtggaaataaaaaggtgaggtccttaaaacttacggctacctttctttggatttgtttcagatattgaagttattgacaattcagtcttctcttatacagtaaaatttctatttaaaaatattttattgaaaaataatttctaatttgctataaaaaaaaatcaagtctcaatttagattaattataaataaaaataacttttaaattataattagttatatatacattttctaagtctcgagtatactttatataagaataattatattttaataa

SEQ ID NO: 325869 - DNA, 1922 bp, Cannabis indica
ttatttttttacttattttacatcttatatattagaacacaattataaatagtatatcaaatataatacaaactaattttttatgccaaaattcaatacaaattttagatctagcattaaaggcgtcatattgggattggctagtaatatttcagaaaaaatattattaaattatattagacttgatatttaataatattaataacatatgtatattttaatatttctctatagacaaatgcatatatcttctttttttttattaatttaatattgagtcttatatatattttaatttaataattattataaaaactcacaatcacttagaaaacgttatggtaatatattattatttgtataattaaatatttttaatttataatactaatataataactactattaaatatcatcactcaagataatattaaacaccactcaaataataataataataataataataataatttatattagagtggggtgtttccttggcggtggtagcttgaatatcactaataattaaaaacaataaaagaaaagaaaaaggaatgggcatgttcttatattttattccattgtttctttgttggagacaagtctctatctttccaaattttcaaaaatacctttcattacataacataaccaaaacaatgaatgaacctttctaatttgtcagcctaattaattatctcactaatgtttattaaatatttagtagtgatagatatgagatcaatgagattcaaattaagttgaattttgttgtgacatgacatatttatatatcatagtgtttaaaagtcaaatgggtccattttttattcattaatagtaaaaatcaccaactatgttccttgtagttggagcaaaaagataatatggagaaagaaataacaagatttattagatattttttttcttattttttggttgggaaaactaaaacaaagtagtagaagaagaaaaagtgaaagtaccaaaccaagttgataaaaattaaaaggattaattggtgaactcaaaagggtaaaatggtaataacacatgaaatgtgatgttgtctttttgtaatttgatagagacaatacatttaagtttgacagctaaatgtcgtaacccttttggtctctaaaaatactgtattccactttgccctaagctgccacctcatcacaccaccaattacactttcaacattttttttaaatttttttttaatatattaccatcaagtttctaaggatttccatatatattaagtaaaaaaattgatagaaaaaataaataaaaatcatctattcataattttattaaaattaaaaatttacctcttgataaattattaaattgcttgctatcatttttgtaaattttgtaagttgcattctagatttgtaatatactctcatatttgagatttaatattacagctgatttttaataagaaacaaaatataatatataataaatttattgtacataaatttatattaattataactaataaaataataataataattaaatcaaattaaatatttatttatttaaaatattaaataacatatttataatatttaaataagtattgtaacactaattaatttagttacagatattatttttaaattaaaatatttactttaaatttattagtaattttgttaacattctaactatctgtttatcttttagtactattattttactaataaaagttaatttagatccaatttaaatttatgtatgattttttagtcatgtaattaacacttaatcaatattcgatttgttaagaaagttaagattttatattgactatcagttccaagtcttctacattattagactatcaaaacaaaaattataaatttctttttttgagaaattttaacgagtgaattaaagaa

SEQ ID NO: 325870 - DNA, 2266 bp, Cannabis indica
atcattattgtaaaaaaaaaaaaagttgtcacattctattcctatgtcaactaaacaaagtaatcttcatatttctaggcatcatcataatattactgtgcacaaccaaacacggtaatgttgctttcctaggtttataattccctatatcactctttaagcaatgttaaacctattcatatgaaatgaaatgaaatgaaacatgcatatcaaattgctcttacgtgttttgaagataaaatacattgaagggtagaacggtatatttgtccctcctcgatgtagatcatctatagaggatcattgattatttggattataacaatatataattaatagcgtatctatatcttgaaacatatagagtattttatataactaagagtgcaattctgaatctatagtggagtcgggaggaactaataagttaaagagtttacttagtggtaaattctagaactgcttattggaagcttgattatataggctcatggtcaccacactagttgagataatactgcttgtagactcagtgaataattggttttaattaatcaatactaattttaaaagtagactatgtcttatatatgaattttcactaagcaaagacttaattatgaagaaaagaggttttatagtttattgttagttaagagactttataaggtctaattaattaattagttaaatggtgttttatttgataaaattaattttaattattaaataaataattttgacatttataggattaaaattggaaaatatggcataactggaaaaaaaaaaagagataatttgttgaataaaataacaaaattgtaactagtgggtccacttactatggtcgaccacttattgattattttgctattattttcttttttattccatataatttaaatcctaactctagatgaaatactatataaaaaaaagatggctctcattctcataaccttagataacctagttttcattctttgtcacacaactagaaaaagacaacctcattctatagtaattttgaaataccttctcttcttcttcagttaatttgaacccatagtgaagagtacatgcccactcatatcaattcaagtactcaatcatagtatagaagattgtgaagaatcggacacctggctggttaaagtttgccctttgagtggctcgctccccttggggagggagtgtacttccctggccggcaagagattggttaatgggggttgttgttgagcctgagatccttggccagctccccattttgttggttgctgggatctgggtgttctcgccattagaccttcgtgggaaggcctatcctccttcggttctctgattgaaccgccttatcaatttgaaggcttctatgttacggcgatccagctccgcttagtgaaatcgaagcaggtaatctttgtcatccatccatctcaaaaatttgcatctctgctaagcgaatacatcgcaatcaatagcgcgtggttcttcagttaattcgacttggcagacggcctctctaagtctggctaactcgagatcttctcccatgtctacatggggctcgccaatatcaggcacgccaattctaggtcccgtctctctagcatagtattggggatgcggtccagtttttgttcctcaggaatgtttccgaagggtccttccttcagtgagaagcacctatggatggtcctttcttggaggcaaggaccaattgtttagatctaccgggatgtttgtgtcatcctagccaattgtagtggctagagtcgtggtgcttgtcgagttggcaggattgaccacatctgcagtgttcatgggaattccagtcttggatggaacatggacatcaagatctccagtcaaaggatcttgaggaagactcgatgatgcagatggtgcaactagatttctccttatgttaaccatggtgttttatcagatatgatatcaactcgctctcagtgaaagcaccaaactattgaccttagaaattggccaaccgatagtggagtcgtattaacattgacgattaccacatgttacacaattagaactagaaagtaaaagaacacaaggatttttatagaggtttggtttccttagttagcgggtaatgacctactccatttttaattgtattaatacctggagataatactattcatatcactataagtgggatttgatatagctctcttaaggttacaatgtatgaatcagtaggcaggtctctaatgagagagagagagag

SEQ ID NO: 325871 - DNA, 719 bp, Cannabis indica
catatagaccttaaaggaatgttgccttcatttttctatactctggtctaactctacacttgagcagtcatcacaattttgtggtatatttggaatgaaagaaacagagaacagcatggtaataaaaccaagcctcatgatatggtcttatattttgctttgtcatacttggaggaatttcaatctccccagcagtcgaaggcttcaactaactcgacttctccttcacggtctactaataaatctgagcccccgtggctcaatcctccttcgggcaagctcaaattaaatactgatgcggcagtaaacaagaccacgcaaattaccggttgtggagttgtgttaaggaactctaatggagacattgttgctgcttcttctaagtcaataccgggtgtttttaggccagaaataatggaagctttggctttaatgaatgcattaaaattgctgattgataatcagttgactgctcacatcttagagatagattctcttttagtggttaatggattacactcatctatcgcttcagtttatgatttccattgtctgttatcagacatttcacatctagtcttcaatttcccaggagtgcaaatttctcatgtgtatagatttgcgaatacggctgctcatttgttagtgaagtatgctatttcggtggattctgtttgtatttggttggaggaaatccctcccccgttaaatgcttattg

SEQ ID NO: 325872 - DNA, 1269 bp, Cannabis indica
aaataataataaaaaattaattttgaatggtttttaattaaaatcaggattaggttcgaataattcaatggagtttaagcatgttacatattaattttattattttgatgattaggctacttaacttgttttaagatccctaaagaaagtgttatgttaaaatataaacaaaatattacatcaattactaatttaatttattaattccatttaatttagataaaagctctagtggaacaaagtcaaaatatatttatctaacaattgtaaaaaaagtgtatattaagtaaggatttttgtttctactaataatagtaattgttttatttatgatttaagattttatgttattagagtttctcatttatatcttgattgtatttttttaggatctaatctccttaaaatcaaattgatttagttaaatgaaatttttaaattaaaaaaataaaaaaatattatttttttttgaacattgaaggtggagaattgaaaggatctcatctttatcatgagatgtatagtactattaaactatatttatgaccataatagagattctatttctaaagtcatcaataaatttgatactttagaattaaaaatatatatatattaaaaaattagcttaaaatgccattttttttttaaaaaaatatatagtttataaggaaaatgtggaacgaaaaaaattatatatattaaaaataagtatataataaaaaatgtattaagagaaaatgttattttgtgatcaaacatcttttgtaatattatcttttatttaatttctaatatttatcgttaaaaagtcaaattaaatccaaatagactatagtgatattgacaataatttttttggttttctcgttccttaatgaaaaccctagaagtattttgcactcgattggagtgtaatcggtgtttgtttgtgtattgccgggttacacttatcttgatattagagtatgcgatcaataaagtgccttatgtttccccttcctatttttcggtctttggttgaaaaaaaaataacttttgttacattcaaatcaaaacatctttctaaatttaaattttaatatacaccgtcgtcttaccctcttattaagtttgctgattaggcccaaaaaaaaaaaattattttgtgtcattgccttttgacattgttcaacattaattaaccatctaatgttataatttccccttatggattatccctctcgaaaacgaatatttgaagtgatctataattactgagtactcggt

SEQ ID NO: 325873 - DNA, 515 bp, Cannabis indica
ggacacactaatagtagtgtgggggctatagtgttaaaaaaattaaatatcttctatttaataaaataattatacaacaaaatagtaaaaagccctcccaaaatgattataattttcatgtaaagtacatataaataattttataatatttaagctcccacaaattaaagattctgagttctggctgctactacttgcttctcacgacagccacaccagctcttttttattttaattgcttcatttgattgggccttaagcccttatttggtcaatccgactaaatgtggtggagccaacaaatgttggtgcaactatctttgagaatgaaggtgcttatggagagggtcttataaatcgagttgttgatggttctttacttgaggcttttgctgtttattattcaagttttgtccaagcagtgattgttgagattatgagtatcaaggaagcattaagttgaataaataggaaacactaagggctcgtttggaacgccgtattaggtcgtattg

SEQ ID NO: 325874 - DNA, 765 bp, Cannabis indica
cgtcagatgagtttatatatatgttttaagtatataaacaaaacaatacgaacaaaccctacatcatccattgaacgaaacccccatctccctctatccattttctttagttttcaacccgaaacctagcgatctaagctttggtagtggcgagatagaaaaccctcgaagaagaaaagcttaaggcaaaatcatttcatcttaagttaaaaacgattggttttatatagtggctttgtgatttagattagtcatggagattctgactttgcagaattgttctttggtagctatgggactagctttgatgtttatacttgttaaattttcgatgattttgagttagaaatttagtttggaacatttttaaagcttagtctaaatgttaatggagttttccgtttaggggcttgcttttaatttcagtaactttgggactgtagtataggtaatatcctggaaaataaaatgatattgaaatagacatattttattaagggtgactattcaatggttatatttttattgtaaccatatggttacatttttctttgacctgtaatagcaggttactaataggtagactttccttttttagaattaattaattataattaactattttcataaaataattaattaaatagtagacattccttttttagaattaattaattataattaactattttcttaaaataattaattaaatattcaacaagacctcttttagaaattaatatttatatttaaatccttacttga

SEQ ID NO: 325875 - DNA, 826 bp, Cannabis indica
aagcgcacataaaatcgatctaaaatatagactaaaaatagcctaacagtacttgtctcagggaaaatacatagcagatctactcaagaaagcaagcatgacacatctaaaaccctatcctactcccatgacagttgggaaagttctttccatacaagatggtacacctctacaaaatcctatagaatatagaagtctaattaaggctctccaatatcttacacacacaagacctgacattagtttctctatcaacaaactaagtcagtttctataggctccaactaatgttcattggtctgcagtaaagaggattctaagatatctaaagggtactgaagatcatggccttcacatcaaacattgtgacagattgactcttaatggatactctaatgctgactgggcttgctgtcctgatgacaaaaagttagtagttggttactgtgtctattttggagattccctagtgtcatggtcatcaaagaagcaagttgtcatctcaagatcgagcactgaatcataatacagagttcttgctcaagttgctgcagaactttcctggatcaatccttactccgagaagttcaatttccttttcaacagactccaattatctgatgtgacaacatgggggccagtgcactagcatctaatcccgtttgccacgcaagaacaaagcacattgagctagatgtgtattttgttagagacaaggttttggccaaagatcttgacattagatatatacactactacaatattagcctttagaggcagttttttcaaccctatttataaaaagggaagctaaagggtgtgaaaa

SEQ ID NO: 325876 - DNA, 757 bp, Cannabis indica
tttcaaataacataaaaaaaacctagcatcaaatttaatatacgtgcctcgcacgtagtttttttgctagtatatatatatagtacatatattataatgtggctcaaatattaactacgttgaggatgagggtttgaaatttcaatagaaaattataatacatggtcactactctcaacaaaatgacagctgcttcaataaataaataaagaaattgcaaaaagtgcgactcctgtatttgttggagaagaagatggtgtttgctttttgggcttgggatgacaatttagtagaaaaaaaggaggaaattacatgggattttaaaaaatttttatttaaatatgttacttttaagtttcactaatttatgtagtatttttttttaagtaattttatggtatttgagatgttatatatatgtaaattaggtttttaaagcccatatttaatgtttttatttatttttaggaagttttatttgttatcggagttggaaaagtggccggagtttgtaaccggcactaaaaaagtcgtcggagtagctgtcatcagtgtcgaaaaagtcattggggttgctgacaatgcgagaaaagttgtcgaaattggcattatcatcgaaaaaattacaagaaaaatcaccaagaagtaattaccagaaattttttctggtaatttttttgaggacaataccaatttcgacgacttttctggcaccgttagcaaccccaatgactttttcgacaccggcagctactcc

SEQ ID NO: 325877 - DNA, 1148 bp, Cannabis indica
tgacataaacacagctgtcataagagctccttttgaaaccatttctgagtacaaactcatcaaacattttgtaccattgccttggtaattgtttcaatctgtacacaattctttttagatggcatacatgatcttccttccctttgacttcataccccttaggttacttcattagaatattttcttccaaatctccatgtaaaaaagctattttgacatttagttattccaattcttggtcattgattgctacaatgctcaacattagtcttattgatatgtgtttcaccactagagaaaagatctcattgtaatccaccccttctctttgtgagaaaccctaagcaactagtcttgccttgaacctagcgttttcaactccgggaattccatccttgtgtctgtacacccacttgcagcctataactctttgacctttaagccttctaactagataccaagtcttgtttttggttaatgaagtcatatcatcatccatagcattgtcccactcaagtttatcatcagattgcattgcttcctcataggttgctagttcttcatttcccattgcattaatacttagagcatagttgatgacatctgcaaaaccaatctatatggtggtcttgttgcttttttttttcatctctagtcaattgataatcttgagagtcatcttctacatctggttcttcctcagattcaactcttccttccatttcttcttcttcttctggttcaattgttctgtccacaacatgttcccttccattagactccacctcaaactgtattgtgccatttgagtctttgtctggtatgtcattcttctgtacatttgcaaggtccttgtacatggtcttctcatcaaaaaccacatctttacttacaaaattctttcagagattgccatcttcaatgctttaaacttggtagccctttacttcatctggatatcccagaaagatgcattttcttgctctgggatctagcttcccttctttgacatgagcatacacaaggcaacgaaatattctgagatgatcgtacattgttggctttgccttttccacacctcaacaggtgtcttgaattcaattgcagatgagggacatctgttgatcaaatgcaggctgtgatgctgc

SEQ ID NO: 325878 - DNA, 1414 bp, Cannabis indica
ccaaggcttttgaacttaggacagggtctcttctcccatctttgatcatgctagatttagcgcgtactagattcaacattagcattgaggcagcatcccaggttgacttgtcaacctgagcgctgggcccaacaacaagttaacctgcgtactaggccctatttatagggactcgtagtttttctccccgagtttacttgactcttcattatttttgatgacgatgaagattcctagagcaatttttgctgaactgaattagaaatagcctaggttgacaaaatatcaccctgggcgcaggtcccagtcccaagtgtcaacttggacgctgggtccttctttttcacatttgaaagtttcgtttggtccccaaaaaatagttgattctcaatattttgtaaagacaaagatgatgatcaaaagagctctgggaaaactcaattttttgtggcccatgttgataaattgtcaacctgggtgtaggggccagccccaagtatcaacttgggcgctgggccagccccaagtatcgacctgggcgctagtgttgggcttttatgccctaaataaaactcattttaatttaaaaatatcaaaaaattaataataatctattaaaaattaaatattattaatttaaaatagatatttaagtttaaatatattaaaaataatattttattttgaaattaggttttgaaaattaaaaaatacgaaatttggtgaaaaatcaccaaaaaatgttttcaaaatagatctaaaaacttgattgctaggttgttttcgaaaacaaaatttgaatcagtatccagatttgctttctacatgttgtgaaacttattccaaaaccctaaaatcatattatgctaatcttcccattctctttgttgatagatgactactaaggtgagaaaggattagaaaagagatgcgaattagaatttggggatcataaacgtttctaatgtgtagggggagcattgctctttcgttggacttgtagtgtatatttctctacataattgcctaaagtagctagtgaattgataattaatactactaaatccctcaagatagtattcccatgtatgttccaatgacctgttttagatatattctgaaaaatctttgccttatcgaactgtatatacatatatttgcgacaaactttcagcattcattaacaaggactaaaagtgcgcgaggaattcgaacattaaatttgctttcaaatgccgaagggtgaagcattgttgggtttgcgagagtagggtagactttagacaatccttccaatccgggaaggaggattgaggatgcatcgtacccttattgatctatctcacacggcaacaatatgcatacgagggtcatgttgaatttttatgtaacaagcttcagcttctaggaagga

SEQ ID NO: 325879 - DNA, 1295 bp, Cannabis indica
gagagagaaagaaaggaagagaaggcatgcaatgcagttcatgtagtaccgattctgatggatgcatctgtcaactcagtgctgttgttttctcaaggccgaggtagcacggacaagtgtgccacaatatttattaattaataagtgggtatatagggtcccacatatatatttctatctacgagtattcacggctgtcattattattgactaatttcacacacaacacaactctttcaagtgtatgaaccaaattattaccaaattaactcaaactgtaacattatcttccacataccgtacagaataatatgtatatattgattatagaatatatcacgttataaattatatgggctgcggaggttgttcacataaagtgataagataaatatatactacactttttgacaataatggtcatgattatatctatacttcttttaagtaagaaccacatctggttgattatatatatagattgtagaatgtagattatagacatataaatatagagaaatgcttatcccgtatattattaatgaattttacaaaatattgataatcatttataagtcgtcatcttatcatagttctaaatattattagtacctaatagcaatgcttatattcatgtataggcattaatttgttcctcaaaatggtgatatcgtcctctaaatggccggcggtggtactgtttcgtctcttttaattgcgaaaagcgtttgacacctttcctctcataagtatttttctgtgagctgtgttaaatttaactataagaaagtgagcttttgtcagtacaaatttgcgccgacaaaactaagcgaagtgcgctggtaaacttttgttcacgcataactgcatcggtaaaacttgtctacatattcggtcagtaaaacaatttttatcagttcaacaaccaaatgcaccaataaaaatggcttttaccaataagtttatgtaccagcaaaaactcaaacgtcggtgataaaaggtggctaaatccacctgtaggccggtaaaatgacgtttgtgaattttttccaattggcgaaaaatttacaagtgcaaatttaaaccaaaaaactgttacctgccaaggattatggcagaaaatagttatatcggtgcacttatgcactgataaaagacttacctgccataatttattgatggttgggtaagttattttggcgcaatattgcgctataataaaagctttttaaatataatttattattgtcattcatgtttccagagatgcgtgacatgaaaagagaagtatggct

SEQ ID NO: 325880 - DNA, 410 bp, Cannabis indica
tataatgtgtgtattattgtattattgaaaaatagccctagctggttgtggtggtggcaaatggtgtggctggcggcgatggtggtgcctggtcagggccggccctaggcataggcagactaggcccgtgcctagggcccacacttttccggggcccaaaataaaaaattaaaaaaattattaggcttttatttaagtaaaatttaagtgtattataagcaacaaatatttatagcttagttggttaaggtggatgacataatgttcaaggtcatgggttcaattctcttgtgcctggtgcatggtgcgggagtgaggagcaagcagtgcggtggtctatcgtagccttcgcttagtgagggttctagagtggtgtcggcgccggtgtggtggagagagagagagagaga

SEQ ID NO: 325881 - DNA, 1102 bp, Cannabis indica
agcttttcattttcaaaatatcctcttttgcaacatgtataaaagttgtcactacaatcttcataaatcataatggcaattgtgtcgatagaagcaaatatttattgattattgattgaacattactattagtcactattagtgtctaatattactttgtaatagcattttataaatgactaataatattttataataattattaaattaaataatgtaagatcctttactagtgacattttacattgctgcaactatttttttccaaactcgatcacgctacatcctgaacttttaataccaaaggctctgagtcagaaatcatcaacgctataagattaacccagaattcgatgagttttcatctttaactctctttctctcttcttttttgtgttatttttcttgctttagctttgcacgattttgatttgaagtggtaaaagaattatttttaagtctttcaagcagtctttttcccccactgaattaagttcttcccataatttcagaatctttgaagtatttttatttgtgacaaaaaatgcctttgtctaagttttaattagaatttctagagtttttagaagggaaaaactcaaaattatttgtcttaccttcaacccacggtctaatcaaccaaaaacaatactaaaaataaatgatgagaaaattaagttatttaatgaaaatcttaattgagatgatgttttggctcgctataaacagtttatagacaagatccttgatggcaaacgtcactctttgcgagatgcggcttggccagaactccttaattaaactaactatcctcaagaaaatcctatgttttttatcccaggttaccatttctttttctccaggtgagttagatttcagcatcatgcctccaaaagagcgcaagtctaaattacctcagaatccaagtgttcaattcaaggttcaattaattgagcctagattaggtcaatcgccccttacgtgggaccatttctaaggtcttacggtcaattaattagtgaacgcttttttaattaattttttgtttttaaaattagaaaagtaaaaatatttttcaaaatcatgttctataaaactgttt

SEQ ID NO: 325882 - DNA, 3234 bp, Cannabis indica
aaaaaaaaaattaatctttagaaatataatactatatatataatatataatccttttcttttgccatgcttatgtattttataattctaatatggtgtcaatattagaatatttttttttatatatgttataaaattaatttatttattttatagggttataacaaataaataccatagattgactatatttggttacaatgatatggtcagattaatttattaaatatttattacccgatttgatttgtcgaattaatcgtcaaaatattctgacaattaatgtgatgcagatactgatagagtatctcacttataaatataaggtcacagttcccgaacccttcactcattctgtgcaaacaaccaattctatctaaaaagaggagagatcttaagcccgatttcccataccgaagttatcgttctgattgaagttcaaacatcaatagctagaagtatttcgattctttcatcacatatacggttttgatatatttatagtttatttcgctttacatatcaatcatatgtgctttatttttcatatcaaaattaatctaacaattggtattgttgactgagattttcggcaaccaattaaataatgtattgagaagagctgtagaaagtttaatgcagaagatttttacgtggttgggacattaatgagccttagtccacgagtcttttgtatttatgagagtatttattacaaagaatgtccttggtgaatctctctcttcttttctctcttcgattccttaactaaaatcgatcgacctattttcagtctgtttgtggggtatttatagtatttttctaagaggatccctagaaatggtcacttgtcttttagcttcataggggcacatattcttagcatatacaaaataggaaatacatgacctatactgtaggtatcttaggagttaggtggatataatcttttatcctctcttgactaatgtgattcctcataatgtagccgtcactagactcatcgattgttgtgtaatcgccgtaaaaaggggcttacgccatctatcacatcttttatggaggttcttatacgtttttccccatgcggcattaaatgtgaagtgattgttcaagtaatctctttacctcccgaaaatgccttgacatgactctagcctctcggagagtaaagatgtgtcttatggtctcctccgggaagcccactctctgtggtattctttttgtctaagacttagttatttttagtacgtgggtgttcttacagatccacgtgtcgcccttatccgcgtctacgtattttgagaaaaatcaaaggcatcaggtatcagagcttatttctatttgtgccttgatttacattttaatttttcgtatgcatatatatacatggtcagattggttacgttttcacgtgttatggtgttctacatattaatactataaaattatagaaatattagagatttttttcgatatggaagaaaatttatgaaagtttataaatatcatgaatatttatctaaaaaatatgaaaaataaatgataaaattttaaaaatactaataaatttaaataattataataactcatacaatcgaataacaaatagaggtcgtacttaaatattataatatcattttgattacaccattataaaaaataaatatgataatatttgatacactccataagaaaatattaatactaaaataaacttctaaaaagattagaatattagttaaaattctctacattcatcaattcaatttactttcaacttccttcaaaattattatttaaaatatctatgaaattaacaggtgttcacagattgtataagtctagatttttaattttttcaaaccaaactaatagtacgattttttaaaaattcaaaaaccaaaccaatcaaattaaaccatagtttgtatttcgtagttgttctatttttttttacagtaattattcattttttcggtaattttatttacttttaataagtttataatacataaataacaataaaaaattattatcataacaatcaggggcgaaaccataaataaaatttagatgggcatttatctatttttataatgaaatatttagggcatctatgctgcctaatacaatttatgaagtatcataagttattgatgcaatttaatatcgaatctcatttattttacttttaatattaattatagaaaataataactatatatagggcgccacccatatggtactaagatcatggtacttaatcgcaatgtttattcttatattatgtggatttcaacatttaataaaaattataaaatgtggtatggaattttgaacttatgaactccttaaactttatatatagatttaccactacaccaaataatataatttaatgatatttgaccagattaatatttatataaatgccaaaaaaacaagattatttaagtttaagcctcaaacaacttagaatcgaatgtgatttcgcttatgataacaatattaaatcagtattaatattctacttaaagttaatatttcgtctaaagaatatatattaaatatatataaattaattacacaaatttatttggtttgaatcgctaacaaaatttttaaaactgtgatcgaactaaagaattttaaataacctagactaaccacaacattcaccaacagattcatttggcatggtctcgaatggtttaatttagattgattgaggtttgaaacaataaattatgaattatatacacccataatgaatatttttcatgaatattgatatccatgaatatttcatctcttatttttaacgaaaaaagatatattgtttaagaacaaatctgtattcaaacaaaactcattgttatgagttttgatgtatgtgactagggctgagcatttaacccgctgggttgactaacccggccaatccaaaccgaaaatgggccgatcaacccatataattatgagccgaagtttatttggtttgaaaaaattacaaactgtgaactatgggttaaaggcctgggcaaattacaacccaataaacccaacccgggctggccttataacataaaatatatatattaatatgggctttaaatattgggctgctactttcactcttacctttaccttaacactagcaaacatatacacctaacacaattcagtacacacacatacaaatgagaacggcatcataaactctctctctctc

SEQ ID NO: 325883 - DNA, 806 bp, Cannabis indica
aaataatttccaacattttattcgtgtgattgtcatcgtttataaatttaggcttcacaaaccattttatattataaatttagaatttgttgaagtcgagcgttttgtagcaagcatgctgcaaaaaaatttcccacgtccaaaatccttcttgttttgggctcaccattaatctctgatatgcttttctctctttgtcgttcatagcctcctatttagaacaaatgactcatgggagtttttcttttgggatagttagtctagttgggacctctccaagtagttcatgggggaggaacctcagctccctttgaatgttatgtagttaggatggctgacttcttgaattttcttcatttgtatagaaaccatgcctaaacagactcgtcgagatgaagctgactcagaggaggagattatggagtaggaaaatgctctaaaatttatcctaaatgatagtccatgggagatcaacagccaaataaacatgttcaggatctacaataatttgaggaagtacgagacccaatgcgggcttgaaagtgttctagggctgttctggaacaggctctctgttcacagggaaaggcctagcaagtgcacagaaggaggcttcagcgtctggagctaggctcatgttgagtttctacactgtttaaagaataaaaaaagaggatgtttagggtttgcggtatttaagtaggatatgagaaaagcttttgtagggtggaatggcattcactaagagttgtcatgcttaagatgggttttgctacaacttagtaaatcttattatgagatgtgcg

SEQ ID NO: 325884 - DNA, 756 bp, Cannabis indica
gttaaaagtatagtagaatatgttatttgaagagggggggcaacattgtttatggtggggcaagaatggcagagagcaagagcacgtccccgacagacagggccatccattgtgcagtattgcaattgtctatttttatatatatttattcacacaccaaaattcaccacttctatatctctctctctctctctccacgtctgccatatgtctcttttatctatgtcgactctccatgattgttgctttttgtcagcctctcttttcgcacgcctccgactatcttttctatttctattgacagcaatcgctgtatatgaaactctatattatacacaattgttcaaaagtataaccagtctttactgttttatttggtatcatattattattaatataattaagtatcaaaattttttatactttaagaaaataattgatctcatatacttaaagagaataattgttagagattttagatgtattacaattttattgtaaaattatacaaagactaaaataaaagattgattaaatatatattacaatagtacaatacatatatatacactatatattgtatatttatatatgtaatgtagaagaaaaagaattaatacatataaatagcaagagaagaatgtatatatataatattcacttacaactttaagtataaattagtggagatcactaacaaggtattacacctttgtccaaaaacttatttccccatatctctaagcattaagggaa

SEQ ID NO: 325885 - DNA, 1678 bp, Cannabis indica
tttttcttttttttacgtttttttttttaaagaaaaattacaatagtgtttagtacactattatacgttgtatttgcatggtataattaatattatatttttatataggacgtactacataatattaacttgtattagtaattctctctcaaaaaaaaaaacttgtattagtaaatattattttagatttgtgttttgtaaaagttattaattggattttttattttgttaaatgataaaatgaaccctatattttctaaaatggtacaaataggatattgagctcaattttcaacaattttattttttaacataactaattttaagacaatttctaacacgaacagatagagaaaatatcatcagttttgtcataacatctctaaatcagattattattattaagttttattttgacgaaaaatcaattcatggtcttatttgtaaaattttagaaaatatatgatctattttgtcatttaacaaaataaaaagtctaattaataatttttacaaaacacaaaatctaaaataatatttattctctaatatatacaagcataatttaatataatatgatataatacaatactatatcaaaaacaattactatgtgttatattaaaaaaattactatctaaaatcttcattacaaattgtaattaaggcaatgatgaaaaaaaaaagtcttagtcattatgtacattttcaatatattataggaagaaaagaattgtggcataagaacctaacattttgtgtttgtaaccaacataaatctaatctaatgatatttttagcggtagtataattgtaattttagtttagttttgtcaaaatagtctatgttaatattttaaacataacacaatatataaaatccaaattttaattagtcattgaatttgaataaaaaacatagtagtataaattacttataaaattttctttctaacaaatttaaagactaattttatatcgataaaaattataattttactaatatttgtatttatgatgctaaaaaaattattaaatttatgttaattataaattcaaaattttaaatatttatttggcaaatatcctgtttattacaaattagtatatgtgatactttatatttacaaatataagtaaaaaaaatgttagccattaccttaggaatattatatatgtatatgtacacgtatttatatatcaaatatatgtggttgtcctcgttgaaaacaaaactttgcaacttttttgaaggagctttcaagtgcacaaaatattttggtgatgataattcataaaaatattcagaatccttatcatccacgtacgtccggtgtgccatgtatttatctatgtggattcctttattaattttattttattaaaagcttaaaattagtactccatccatgtatataatatataggctaattaagatttttatcttttgaactttgacatgtaccaaattatgtcccgaacttttaaggtcgttaaatattgagattgttagatttaagaacttttttccaattttagttaaaatgtctaacatggatgaaaattcacaacgcatgatttagtacatgtcaaagttcgagggttacaatttggtagacatcaaagtctggggagcatagtttagtacataaataacactaaaatagtaaaattgaat

SEQ ID NO: 325886 - DNA, 613 bp, Cannabis indica
aaggagacattattccgctcccatcaatgtaagattttcttaattttatatgtgtttaattatcgttttagaaagtttatatttagggtgttaaacaacatacttgtgagtagatctaagatcctggtaaaataagttataacatttgggctgcccaaaccccaagcaagctctccacaagaaatgatagaccttaggaggaactgctagctaccacaattttttcctatacttgtcatcttgaagatgcaaccaatttcctccagtagattgaaggaatttgtatgcactttttactgtgtataaccccgaagtctccatgttctaataccaagaattcatttctatcgtactactcatttgaatgcccataatcaaactaatatctctctccacaaacatgtctttaagaatctctaaattccaagatatttcccccacaatcattgaattggagacaaacttattcacacggccttaattaactgatgtgacacatggattattagcatgtggtaggcaaggatccttgtaacgtccctgcttcaagcctccattggacccttacacccacgaaataatggctcttatacacgagtatgccactctagct

SEQ ID NO: 325887 - DNA, 696 bp, Cannabis indica
gaatggatctatcttataagactaggatgagtatttgaagtgctctaagctctttatgatctcaactaccctatcaagatattcatctattagatacctatatggatctacacttagaaaataagcatcaaagcctccttggtcgacataagccatattatcaaaacgtggagcgtaagcgagatgaaaatatttttttacttcttccaaaattactggctcccgaagtgccctcatttttgtccactacaatgaatcaatccgccagttttgcctcctcgctattgagattcagatcaactcactcctaatcatccaaccacactctgtccaacttcaccgccttttgcatttcctcagcaaccatcgcgatgtgctcttctttgacttccggaggatcgcgagagctatcatgattgatgaatggtccaatgctatatattccaataatgagcctgtatttttggaaattctttgtagtgaccattttccacctgcagaacattggcgagaatcttctgataccgcacttctttaatcaccaaggctagggttggaggcgtttgttctatattggaggcaaggttagaacctcttccataagaataatggatgtaacacataagaaaatgaatgagaagaagaaaaatgaccggagtgcttaccagagtaaaaaaagaccagggataaggttgg

SEQ ID NO: 325888 - DNA, 839 bp, Cannabis indica
tatttttagtactttttttctcaaaaagatacacttattcttagtttttattatgggagatttaaatatacatgacttgcaataacatacattcgttatgtatttattttaaattctaattgtacgtgtgaagcttgaatcatgcggtcaatactcaatgcagcctatctgatgctttctttggtgatcccaaactccttgaagaccattacaacactgaacatactcttagtaagaattttttttatcagattaagtaaactctttataaacttttttttttaattttgtaatttattttttttattttgtgacttataatttttctttttctgttaaaaaagttaacttttattgtggtgcagtatgaatttagagtttcatctttttcctcaaacattgagattctttttattaattataaactatttcttctctatttctttttttttagataaatcagaaattatattgtgttattcctaaaattcggctatttaccagaagctgacacatgtactacaaaagaaatatgaatcagctcaataattataatattaaatacatcttaaataacttgttttgattaattatagttgatagagatatttaaactccctgccatataagcatatgcgagataagaataatagctattaacagatgtaattgacgagataatatgtccatctcgggatagacaaagtatataatagaagcatacaagatgagacatcaaggaaattctatctcattgacccacatacttaggagtaaaagcttgtaactcattgacccacatatttgtacatggagaaaataactacattcatccatct

SEQ ID NO: 325889 - DNA, 751 bp, Cannabis indica
cctatggcgtcgttgtttttaaccctttagcgtcacctaaaacagcgtcggtagcgaatttcgccaataccaacgctgaaagcccttaaaaaccgcctctaaagctcaattttgtagtagtgatacttgccttaaattatataaatgaagaaattgatgataagctctataacactcacaaggtttttattttggctccttttagatttcattaagtatttggaactgagataaaatttaatatgtgatagttaattaggcctttatctacaaatttcgttatatgatttgtgtatttatctccctattttatatgtattaaaggttatatatatgtttgtggggatatgctgttatggggatgttgtatattgggggttcaaaatatggtggccccttgtgattggatatatatatctattgattattttccatagattcaagatttgctcggtcgattgtgattagatttcaattttaatttgttctttgggtttcaattgtgcaaggagctttttgtttaattaaaaatgattatgtttgagtaattattcttaatatagttagattattaagatttcttcaagtgtcatgcaaatttattaaatcaaaatcactaatgtattgtatttaagtatttatttttaatttgcaaccccactatttttattaattgaatatacataaaaataatttcaaacaataactcataatattttttcttcaattatttattgtattatttttaaat

SEQ ID NO: 325890 - DNA, 730 bp, Cannabis indica
gcctgaaattcttagtgattggtcaccctagattgactattttttaagcctaaacttctttgtgattggtcaacctggattgacttagcaaatttattgatcttaggtatggtaatctagcaacttacttttggttccttgaggctccaatttcaagcgatgctttctactcccatactgattaatgttgatccacatgttgtaatttatagagataactaatatatgctacccccaagtgatctgagagtttggactcttggtcacttaaaattgttacaatacaacaaaaaattacaagactttaaatctactttgaaacatcctctgtttttatataaatatttcctgcccaaaggcgtacatggaaaaaagtaaaggaaaaaaatgcagaaaaataaaaggatctggccacctccaattactaatactatcgacgtacgtcatctacatttcatgctcgtggaacttcagatccatcaagtcttttgagttgaaacatttcatcacacaccttatgttgtatttcatatggccctttctagatagttctaagaacccccactcccgactcctaagatgtcgaaaacactcttctcaagacaaggtcgccaactttaaacttctagcttttgacttttaagttgaagtgcagggcaatttttccttggtacattttgagttggacttgtgattgctcctggagttcttcaatcaaatctaatgattc

SEQ ID NO: 325891 - DNA, 944 bp, Cannabis indica
ttgcgtttcctcaatattaattgctagaagactgaattccaaatggcaattataaatgtctatctatacttgctcaaatttatgattattactttccaaacctagatgcacatcctcgtaagctgaaatctcatttctatcgacacactaatattcttcatagctttatgtacgtgctagtactaactaatctaactgcaaaatacaattcctttcttagaaaatacaattcccttcttaattactatatgaataaggttggtacttttcagccccatgaagtagaagttattggaataaaagaggctttgagttggattaatgtgattgttgagtctgattgtctgagagtgattaatgatttgaaaaagaataaatttatggcctctttatggtcatattatttttgattgtaaggttttgttggccgttgttagtagtgtttttttccagtttattaagcggtttacaaataaagttgcgcatgttttagcgcgatcttctcttgttgaggttgaccgtacttttagtagcgttactttatctactgtaattgcttccgtgattttggaagacttaaattaatgaagtttcttcatgattattaaaaaaaaaaggtattactaagggcaaagaaggaaagtgaaattcgaagactcaggcaggcgctactataagtacaggtgtaggagaccgccattgattcacagagagagctcatagttaaagaatgaggttttgctctcagacagaaccaactgataatgggttggatcgttttcatgaaaaatggttgcccatttctttggttctctctgaatgtttgtagaactaatgattttctcttctctcaacagcaacaaacaacaacaaaataaaataaaataaaaacataatggtgctgattgcagagtattttcctatggaaaactctctctctctct

SEQ ID NO: 325892 - DNA, 767 bp, Cannabis indica
ataaaaagaggtatgtttcaattaaatataaaattagaggtaaatttgatcaattgatatataaaagtggtatttttcaacttaccccttatgtaaatttaatttcaaagcccatatttaataagataaatcattcaaaccctactgctccacacttcaatagcttcacgcctccatcttcctaacttcattcacttgctccagcgatcggcgaccggcgaccggggactcgcacatttggcaaagtgattcgtctcacctcaaagttgatgttgttagccaccaccaccggagccgttatctcctccaaaccggcaatttacagtgttgagcatcaatagggtggaattaggtgcataatcccagcaactcttctcactttctttcaatccaaacttcacatatatcttgttagaaattagatctaaaatacatacggattttaacctatgtcaaatcattaagattactctatgaatcaataagatggaagatgtacatgatactggatatgagatgagatgataggtatatggtcttccacagactagtcttctttctatgggttctcactcaattgatgggaatggaggagaagaatggttaagattagccttagatatcaaacctttagggatcgtttggtatgcaggtttcatttcatgggaatagatttaatattgcttggagttggagagtgatgaagggaatgataaacttaggaaagcaacagtaacgtgtttggttgacattgcaatggaatgtga

SEQ ID NO: 325893 - DNA, 1621 bp, Cannabis indica
ttgacaagggtaggaatgatttcacatggagttttcttgatacaagttttacaccatagaagatagggataatgtgctaaacggaggtacatcttttttaacaaattccctcttgtcatgaaaccgtggaattcagatggtaactttaaaaaggagaatctcaatgtgatccttattttggttcagttggaaaatctggagttgaagtactgggagagaggtcattatttaaaatcaaagggcaatttggaaagccaataatggtggactcaattaccaaggagagaggtaaactaatgtattcgagaattcttattgaagtctcgatacatcaggatctacccgagcttattgattttgaagatgaacattgctacaacacttctggagtcaattatgagtagaaattagtgtgttgtgagcattgtaaaggattggggcagaaagcgattgaatgtagaaaaaagacatgtggtacataagaatgggtggtgaagaaaaggcctgaggagccaactgggacagacaagatgcagatgaattcagcagactctgatggcttccagccaattcaaaagggctggaaaccaaaggagactcgacaacctatgatgactataacagaaaactcatactagattttagaagaagatgatatggaggccatcaattagaccataaatgagaaggatacttcgggaaagaagaaaatggttaacctaggaggagggggagatccgccactatccaatggatagaattttatcgtggaacgtctagggaatcaacaaccaacaaaaacaacaaatggttagagtttattaataagaataaggtttgtttggttggtctcctcaagacgagagtcaaggctcctaaattaggagacttgtacttaaacttctttcaaggatggtgcttcacaacaaatatatcatggcacaaagggggtagaattttgattgcgtggaatccaagtagctataatgtaagtattctaaagtgttcaggtcaactaattcatgtggatgtagaaacaattgatgggaattatcaattgcactaagctttgtgtatgcttataatgataaagaggggaggaatgctttgtggaaagacttgcatgaggtggcacaacacgaaccttggttagtcatgggggacttcaatgacattctagccaaggaagaaagaatagggaacagagttaaatatcatccttcacaggattctattgattgtgtttctggctgccttttggaggatgtcaagtcttgtggcaatttctagacttggagtaataaacaacaaggagatgagagaatcttttcgaagattgatagggccatggcaaatcagagttggatggacaaatttcctaatgctgaggttaattttatgaatgaagagttaatggacatactccagctgttatgacattccataatatgcttcctagtggaaagaagccatttaggtacttcaaaatgttgaatactcatccggattatgcagcaagagtggcagcatcctggaatcaacaaactcagggacttaaaatgttccaagtggccaccaagcttaaaaggttgaaaggggtgttaaaggagttgaataagca

SEQ ID NO: 325894 - DNA, 1493 bp, Cannabis indica
tccatataattcaaccctaagccctagttgaaacactataaaaggaacatgatactctcactcatccaactaatgtcaacctgactattcaaccaaacctagatgagagagttcctcctatagagatttcacatccttcattgttcttcaccatattcgaaagccttcagtgaatgagtgccatgccacacatagaaagtcaagtactcaatcatagtgagtaagacggtggtaaccgaaccagaaggagagaaggagatccaggtttagatcttgataatgctctgctacagaaaggaatcaagggctagagatcttgaacggaaggagtcattatattttgctgcaaccaatgtaaagttttcttaaactcttatgtttttatttcattgttttagagaattcatatttaggatgctaatgaaacatacttgttagtaaatctaaatcctggtaaaatatattccaacagtttcacaccacatttgatctttaacgtgaaactattgcttgaattttagtgtgacttttgcctttcttgatagaagctaaagtctgccataaaattcaacatggttctcgcgtgcacataatttttttccgtgcgtgaaagatcatagggggttcgatacgtcttcatccctccttcccgaaaaagaaggactacttgaagtctatcacacgtcaagtggggtttcacacaacattttgtccttaacgtgaaactattgcttgaattttagtgcatcataaacctttcttcacggaagctaaagtctgcgaaaaaatttaacatggttctcacaggcacttaagtttttttccgtgcatgaaagaccactgggggttcgatatgtcttcaaccctccttcgtggaagagaaagactgcttgaagtctatgacacacccagtgggttttcacaccaccttttgtctttaacgtggaaccattgcttaaattttagtgcaactttagcctttcttcacaaaagccaaagtctgccattcaacataaccctcacgggcacataattttttttcgtgcatgaaagatcagttgattacgataattgcgcatcttacatgtttatacagcataacaatgtctacttaatgacggtgtctaggtagaactgcactattttttcttcactgcgtagttgatgtacgcattattggtatttagattctcaatgttttaggttttacattgaaattgaatgtttctttgttctattttcacttagggataactttgtagttgtggtaagtggatatttgaattgttgattttgctttcttgtaattggatagattcatggttgagagaggtagagaactgtagaatatcaaattaaaccaaaataatgggaaacatttatggctagacttttcgacctatccctcatagaaattctttctattttgatttataattaaaccatgagattaaactatgttttaaccattggcctgttgggttttatgccct

SEQ ID NO: 325895 - DNA, 1089 bp, Cannabis indica
aataataataataataataatatattggtagtgacaatatgtataggatctatgaaaaagataagactttttgtaatggtaaacgcttaagccttagcaattattattattcttattataattaaggccatacgcaacatatagaataaaaataaaacattaattttagttacttgtacaacaaataactgtttaacaattatttaatacaaggtataattaaggatattcaagggataaatatataccattaattaattaatcaattatattatttatatttttcataattatatttattcattaatttgaagaaaaatatgttatgtgcaaaccataactaattaattaaattttaaagttccttgctttgaattttttttttttttttgtaggatgaggggtcgggtcctcatgtatatgattttaattttaattttctatttattcttattttattagaacgttcataatatttgttacttgttagattttgttaacatgatgaaataactatatataaatatcatatactaatatatataacttaaaatttagtatcatgggaaacgactacaattaagcatatgtactatgcttttttggtcaattaattaaattagaagggaaaatattaaagtgatgaacatggacacactctcaatatctatttttgaatcagctgatatctgatcattaatttgaccgattatttctatagattgtgatatacacatacatataaacatgtttatatatcattaatcctgctattcttggataagcagtcatactatatcatcatttatatatatcatcatgtaaggatgattcccatgatatttttatagtacattttcaaaaattaataaatgtacccatacactattataatgaataattataattttgtttacatatataaataatttagaatataaagagtagaattcaaaaagtatattttatatccatataaaataaaagagattgttattaatgagtttcactgttatttgtttatggagtgcatgcatctagtagttgctgatcagaagccttagagcatgtttggtattgttttttgtt

SEQ ID NO: 325896 - DNA, 526 bp, Cannabis indica
catcttatttttcggtagtccatcacgaatgaactccacagttaagcgtgcttgacctggagtaatttcaggatgggtgaaaggatgagtgatctcctgagaaattttctcaaaaagtgtgcgagtgaggacaaagcacgctggaaacactcgtgttattttgtagggtcagtcgtcattccatgaaacagccaaagtgacatattcgtgtataagagccatcattctatgggtggaagggtccaataaaagcttgaagcagagacgttacagtttgtagaaaagagatggtgtcccaaagtttttatatttattcgtggtagggtttctatttctaaatttttcaattttttttcttatttgtatatatttttaatttaattaattgaattgtacattatatattgaaaaacttagcttgatttgaaaattttgctcctatttaaatttttattaacactagtgggaggcacacgtgcggagcacgtgtattcaacatgattttttattttgaggggactcattt

SEQ ID NO: 325897 - DNA, 680 bp, Cannabis indica
atacatatataaatatataaatacagagaaagtgaagaaaaagatgagtacccttttagaggctgatgataaagcctcgaacttcgtagagagatgaagaattagtacatgaaaaattaaagctttgatgattttatgaaccggcaaactccgcttttaaatctctgacagactcttgctaatcctcgtaatttacacgaaaatatgagcagagcaattatctcatacatcgcgccctattgtattaaatgcactctagtcactcctactacgaccatgaccatgtgtgatgatgaagccattattacttcatagttcatattcttttaaaacaaaaattgttatgaaatgattattatttttattaacattattttttttcatcactctacgatttaaatgagttttcattttttttcgaaaggtaaatgtaaaattttattaaggagaaattgtggcataaatacctaaatgttttcgattttatatacttaaatacttaatgtttattttttgaggaaaaaatacctaatgttacaattttcttacactgttactaccacttctgttattaactcataaatatggacacgtggagggcccaaatgcattacatttatttattttattttaaaatttaatattcttaaatataaaaactaaatattacttattttttt

SEQ ID NO: 325898 - DNA, 1365 bp, Cannabis indica
agagagagagagagtttaaagctaagtttgggtgtaccaacttttatccaagaaaacattgtagctttttctctctttatctagtttattttggaactaaaaaaaatagcaagagagtttggagctaaagttagttgattattattggttgcgaatacattttttcttgggtgagtgcttgagagaaagagaaaaagtccttgatgaattgaggttgttaggttacaatccataaaaatgttaccttttatcctacccgaacctaagcctcacattacaagcctagtaaagtccttttgatataggatgtaaagctagactacattagtggagagggttgcactaattcaacttatggaaggaaacattttaaactttaggaccaagggtagttgttataggaattcaaagtgttggtgggaagcaattgcacactctagtgattgagttactcttgataagtattatagacataaataacatgcaaaactcgattgaaacacacaggttcaaggcgtattcactactattatttcacttccattccatttaactctgagagcattttttttgctaaaccaagtttgaatgagtagtattctctctgttactagtgatttattatggttgttttgtatgtttttattgttctttttatttttgtttttcattactcgaggacgaacaatactctaagttttgagtgtgataactctatggtatagagttatttttattggtgttatccaaaaaaaaaaattcacctaacgtggcatgtccacgtaagtaaagaaagagtacatgtggaatatatacttaccaattgcaagacaaggtctccttacaaggcatgggaaatccatcaagcagcacgcgaaaggagttaaacgagccgtcaaggagctgtaccaccatgtctggccgaccaaggggagtctataagctggtcgggatgagcttgtatggctggccagggtttgagcataaactggctggtcaaaaggtgactttcaaaccaagggagcttctgttcgaccaaggaagcctgacctctaaaaggaaaaagtgtacaaaggctagactccatctcaaaaggctggcctccacctctaaaggttggcctcctcttgccaaagctggcaggaacttgacctgccagatcctggcaagaacttggcctaccatatcctggtaggaacatgactttctagatcatggcaggaacatgacctgcaagatcttagtaggagcatggccggtcagcttttcccttgcaggacattcatgtgtagccttcatccgtggaaatcaagccaaggtacgtgtaaagcccgcttagttaatttggaaattagcagttgttta

SEQ ID NO: 325899 - DNA, 1058 bp, Cannabis indica
aaatacacatgatttttttttgttatgtaattatactttgattcattatcaagttatttttttattttcttctaaaaaaaaaaaaaaaaaaaaaattaatttttgatttagaattctatatacgactctgaatttgaatttctatgttatatatcaaaatattttttatcagtatgcatttaaatatgaatttatacttggtaagttggcggcattattttttaagttttaatcaaataattgcttgtaattacttagatatatactatacagttatgttgtataatttaatttaatatggagttacttagatatatgttatttggttttagaattctttgatggtggatttcaacattgatatttagatttagaatattttgataattacgtatctaattatgaatttagatatcccatgatttttatatattttttaggaatccatgatttatattttggtaaggttacttgtagccagttataggtgctccatatatgttttagccagctatattattattttttttataaaaaaaatgataaggttactttgtagccagtgataggtatactccatatatgtcttagaaaattatttttgaagaaaattgatgaaagaaaaaagtaaggccaaccacacttttttttttttttttttttcttgaaacgagtaagacctccactttaacggcacagatggaaattgggcggttaatgtacggggaatgcaatttctgccctcatccccgctacttatttatacttccatccccgtctaataaccaacagattcggagtaggaggatactcatcggttatggagaacccatcgggtatccattaaagtaaaataaaaaaaaaaaaattattggaaaaaaataaattaaaccaatattctcacaaatatttattatgcattcataattcatagaagataaaagataaaccaaccttaaaaaagcataacctagtagaaaataaaaactaaatatgtctcaaagtttgaaaaaaaaaataaaaaaaatcataacctaagtataggatcatagtctcat

SEQ ID NO: 325900 - DNA, 677 bp, Cannabis indica
aatagaggttctactgtatattattcaaaatcaattattactaaatatctataatatatgtatatatacttggagagagaggggagagaagagttgttggatggaatagcgcactaagacctatttagatctctgaacagagatggctttaaggcgctgatcatagaatgcagttcaatcttgataaagattcatcttttatttttgagttattgatacattgttagggacatgttgattaattgtatgtgttattttgttggacatatgtaagatttttaattttatttatcgattatgggaatgctaatttcaattctttggtctgattatgtttttgtgatttcactgattgaatttctcttgttcaaagagctgcatttttgtgttcttttgttgaaaatcaaaatgtgtgatttcgagctgggttgaagggatgtgtgacttctttttggaatctgtttataatagtttttatgtttgagtaatttattaattgattgtttaacttgtttacagtggttttggaatctgaaataaattccttttgctgtatttaaccgaacatattgatcactctacttgagtgatgcgtgttattacatgaaataggtcctttggaggccaatttaatgttaaagatggaaatgatgggtttgatacacgagagaatgaaa

SEQ ID NO: 325901 - DNA, 1357 bp, Cannabis indica
tttctttcttatttttgaatcttcatttctccctatcaaacgttcccttaaagtttttcattcctgtagggtttgctgtatatatttaatgcaacattttatcacattattctctttcccgttcaaaacaaatggttccttgtagcctagggtatattcatagctatttctaatcaaatattttgatcacttgcagaaaagatgcaccgaagaaagtgcactgtgttccctttccacccgtgggatcccaaagaacttagaagaccaggaattgtgttatgggtcccaaactctattgaacagcttattaacacagcagcagatcaactggaaatttcgagtgctgcttgtattttatcagaagatggaggtaaaatacttgaagaggacatgatcaatgatggtcaaaagctgtacttagttggtgatacatattctgcatagatgtgagttgttataagcacaagttaatttgaacaatcatcttcctaagcattatattataattattgtactttttcgtgtcaattctccaccatcatcatcatattagtattatggacaaaactaattttatattaaatagatagaaaaagtacaataattattaaagagacccgctttaaacacttgttttctaccaaagtgtaaacttagttgatctgagacactgctttatatacaagtgataaataaggtaaacaatagtaaatctgaaattgcttgacaactgattgagcatccctataacggagtacggatccttaagtgcatcacatctttttgtttgttcgcaacttcaacatccctttatacttgaaaattgaaaaacaaaatgacaattaagaaactgatctgagtgtagaagccagccatgttttttcgatgaaaagtaaccacccattatctttgcaaggaagtttaaaaaaataggctccaagaaatatgatgaacaacatttgtaaattgtgttgggaaaaacgataaatttcaagtgcagcgaaataacaaagaaacgaagcaaaacaatttattcagtttggtaaaattaccaaactcacaaagagatatatttcacatatcacttcaaaattacatatactatctatttcaatctcaatacaacctttgcttcttcctcactctcaccccataataaaattcacacacttctcttttcacaactcactatttttttcacacacacctctcacacaaaacacatatttataaagttacaaaacttgggcatcaagacaacttagggaccaagacattccaaatattccttaagaatactcattaaaacttggtcaccaagatttttcttttttccacaattaataattacccaaaa

SEQ ID NO: 325902 - DNA, 515 bp, Cannabis indica
gaaactaagaaaaaagaatattgattacaattaatgataataaataaaaaatttggacaaccaagagaatttttttttaataaaggcgtctatcgtttggtctagaagaaagattcattataggcaaaacattcatagtaaaagttcacattatagactatcaaattatataatcttaaattcctcaaaaaaaaaaaacttatataatcttaagaaaaataaaaaattacaactccaaaaataattaaagagatttttacattaagtttacctatatttataaattcttcaactgaaataaattattttcccaatatcttaataactatgccacaatcaccctcaaccatcaatttcgtaatttcatatatgtattatataatattgggtgtttacacatttggtactctgtattttatctaaatacaagtttggtaccctgtatttttcataatgcttattttgttagaaaattaataatatacccaagatctatttgtatataacatagaaca

SEQ ID NO: 325903 - DNA, 738 bp, Cannabis indica
gtactctattatagtcatttgaactagcctcaagtagttgagctttgtagctctagatattttgtaattggcatttatgtccaagtatactttggctctgaaatatttgagctgagttttacacaaattgccttttttccaaacctaacaatatatattttttaaaataaaattaaaaattatgaatattattagtgatgacccatgcatatatcatggtgaccaacaggagtgaccaaactaacaaaactctaaagtacgtatttgcatggctttgatgagtcatcaatataaaattaggtggtgctacaaaattatagtgacacatggtattatatgatacacatatatatttttggacttatcgtataaaattaaattaacttccacaaaatattccttttaactgataacttccatatggggaatcatcataatgattcttctaccctaagaaaatagagccatcaaaaacttgatcacatcttatattacacgtttccaatttatagatatgttttcggctcatagatatttttttttcttctttaggatcaatatacacgtataataataataataataataataataataatgtctgcacactaacatgctgatcaatatatataaactaataataatatatatagtgtctgcacaccatgatgatcaatatacacgtacatatatacaagctaataataataataatataatagttatatatttaattaa

SEQ ID NO: 325904 - DNA, 1088 bp, Cannabis indica
caaaaaaattgaattacaccactgattttattttatttcactaagataaaatatgaaaaaggaactgttgactttcacataaaatatggaaaagagattgattttttttgttccaatcattaagttttgtttatttatatatatttaattctatagctaatgttatggttgcatttgagtgaactctttaattttggttataacttattaaataataagacaaaaaattgaactactcactaggataaaaacataaagaaagaattattgactttcacataaaaataaaacatggaaaagagattgaaggatgcaatgactaaggttggcataagtagtcaaaaaagaggacataggaaaagaaaagaagaatgtataggagagcttcttttaaccaaaaaaaaaaagaaagtataggcagagcttcctaaggtacttggaagaattccttttacatatattttaacatagttgtgaaatctgttgaaaaggaaggaaatcaataattaatatgattttttttaattataggtaactcaaaactcttagggcttttttcataaatgtacaacaaaaataaaataattacaaaaaatgtgcaaaaaaaaattattttaaaaacttatacattttgaaaacttattacatgaaaccatacattttaatcattaaataataaaatatgtttattaaaactcaaaataaacaatttaaacagttttataaaaataaacaaattaaatattttttttattaaaagataaatgtttattatttattttagtatgaattattataatttaataatttttttttaataaaatacaatatcaaaattataaacactaatgtatataaatataaatcaatacttaaaattactaaaaataaacatgacacatagagtgatataataaacatatgtgaatattattattttgtttattaaattagtatgtttaatagatagaaaacaaaataaacatatatatacaaagtattttatagtattagtatgtttattattattgtaaacataaaaatagacatagtcaatttatactatattaaaataagtatattttttt

SEQ ID NO: 325905 - DNA, 1273 bp, Cannabis indica
aaaaacgtgaaaaaataaaaaaaataattctttcaggactcggaactcagtggtcacgaccatggtgttcttgggtcgtgaccctttttggtagtcgcgaccctagtcgcgacctgggaaataacagaaccatcagaatttttttagtcccagtacttgcgaccagcatttaagctggtcgcgaccctttttcatggtcgcaactgcggcagtttccaaaaacccatgaaaatttgaattcaagctagtcgcgaccagcccatgggctcgtcccgactaactggcaaaattctataaaaaaaaaccctattttcgcccccattcaactctaaacaaattcaaaaaccactcagccgcccaagcccttcgaaaatttgaaatttcatcaccattcttcaaatcttttcatccttttaccaatttctcaatcccaattcatcccaaaacccaattttactcatcaatcttcactttccatcaaaaatcaccccaaaaattatcaatttcaccccaaatccgaaaataccattgtttttcatcttcaacctcaagctttcaaggatattcaacaatggaggtggagtaaaagcttcttcgggtttgtaagtatcattctctattacatttgagaaattgataaagatttttaggaattttttgtgaaaatagtgattattattggttgatagtgggattattgggtttttgttgtgattttggactgtgtatatttttatctggattgttctggtgtattttgattttcaagaaaatagaaatttaagggaaggtgctgcccaattttaattagaattattttgaaaaaaaaaacttgttattctaatattatggggccgaaaagaacaaggcacattgaagaagggggttcatcgtcaaacccgccatgtacgggtttcgatcggacccagtttgtaagttaagcagcgcacattcggtgtatgaggctcaaagttaggccttacattgatgatcggggtattgaattccctgaaaatcctttgcgtcgtcaaccaaggttcgaaacaattcgtgcccaaatagaaagaatgaagtggggcagttttgtggatgctagtggccgggccaacgttaccaaggcatgtgaatttctcgccaattggcatgagcgcaggaatggggaggtaagggtgcggggtaagaaggttcccgctacagctgatgctttcaacgctatgtttgctttctcggattactcaagggaagaacagcgcctccgaattattgaggagga

SEQ ID NO: 325906 - DNA, 1315 bp, Cannabis indica
aaaatctagtatttttgtaaaatacctagattaaattggcttagtggcaatgcatttgtacatatatattgtattagctgcatgttattgttagaggttcgaaccaaggtgttcaacgaacaagtgtatttctacctaagtgcttaccaccacaccaaagctattatataataatttattagtgttgttaacattttatatatgatatgaaatgagtaatttttttggcctggttgggtgggaaccctaggtagaggcctaccccatcttcctttaaactggtcctgatcttgataacaagatttatagaaatatcgtcgaccggaccaccaagattcaaagtagcagcatcatcattgatcggaccaccaacttcatttgcaatcatcggagcatcatcttgaataattatgcgttgatcaacatggtcacaaagattctattgaattgtttcatgcttgttagtcagagtctgtggaggagactctgcacttatgattccatcttcatttacttgaatgttggaaaaagtatcttaggatggaagagaaaatgaattgattgataataccgaatagtgctgtaaatacagggcgagctttttgacacggcatgaaattaatacgagttcaagtggcacgatcacgaccaaacacgaaaaaatatggacttaaacatgacacggcacgatgtgactcattggcacgacacgacacgaaaattatgtggttaagaacgacacaatacgataagcacgaatgacacgacacataagcacgaatatattaacctaaaaggcacgacacaagataaacctgaaaatcacgacatgatacatttaaaactctataatttaataataataacaataagtaaatatatatttgtcaatttaaaatgaggtaagataataataaaattaaatacaacacaaaattttataaatttataattagaattattagaaaatataaaataaaaactacatattatttataaaactacaaaacgaagtgaagtttgcatgtttatcgggaattttaaagagactagggtgggactattttataatcacaagggtgataaagtgtttatttctacaaatgccacatttcttgaagatgactatattaaaaaattcaagtcacaaagaaaagtagtatttgaggaaatactttcagaattaactctaacaaatgttccatcaccttctacttaaataaaagaagatcccactccctcatttgaaccaatgcaagttgacacaaacgaggaaaataccactaatgttcccgttcagaagatcacgactcct

SEQ ID NO: 325907 - DNA, 1039 bp, Cannabis indica
ctctctattgttcttgctcatgtattgacaactcaataagaacaaggttacacactttatcttaatagcccacactagtcattgtgtgtggtagatggatttgaaaaatattggtttgagtccaaattgcatattccccatcaatcaaattaaggaatacaacttacgagaagtttcaatgataacctgataggctttgagatgtatagtctaaacttgtattattttattgttttaatttaatgtgaacccatatagagatcatgtggctattgtacaatgataataagatactacaaaattcttttggagtgtacctcatttagtaccattaaactaacaattgttatcaagagcagttccataaatatacaataaatattgtgtgagttttacgcatttatatatatgtgatatggatggttatttattatcaatgtatgagaggtgatgaattattaattatatgatataattggctgtaggttttgttaatattatttttaaaaaataatataagccaataaagggtataggagttcttatgtaatttatttattttttctaaattaaattttatgtaaaatttattggttgtaatgttcattgcacgtgagctcaatttctaatcttgaaaccttgccatgcgcattgaaaatatcatatgcatgtgagctcaggttcatggtggaaccccaacaacgcaccacgttggaaacaacccctagggcttggagcaccgtgcccatgcatgcccatgtatgcaacagaacgtacaacattcatggagataagggattcggtctgatcatcctcaacagagaagaaagggtccatacatcaattgccaacatctccagttgttagaccacccttccgagggccataagaggctcgcacctcctccacgaatgaaatgacccagacgggtcatttgacccatggctgccgctcacgtggctgctcctccctttcgacatcgtgttagatatattttaccaggatctagatttactaacaagtatgtttcattaacatc

SEQ ID NO: 325908 - DNA, 701 bp, Cannabis indica
gattatgtagtgtgacgtctcggaaaatcggagcgttacaaaaatattcttatagtttaattatgtttatctctccttttcactattgtgatttttgatataagtgtttgatattatgagttaattattttaagatatatatttatttttatggatttgttaaatttatctctaattgagtatgaatattttaatctttattcgttataatgtttgataacatttttcttttctattttgattaggaactatatggtgagtttcttataaaattattttgattaagaattacatgatgggttttttgccagtacacaccaccattgacgaaagtgtttatcatgccaaattttttctacataaaaatgtatgtatcaaagctttctgcttttggttatataagtctctcttatctttcgaactttttttatttgatttagtattcatggttattgtgaatttaatcttcttgcttttcattttaatcattgctatttatttattttactttgccaaaacataactgattaggggtatttgcctcaaaatactttgatttaatttgagtttatggttgttgtgatttttttttctattactagagaattaaactgcggtgttatttaaattttgtaatctttttatatatgtactcttaatgggtattaaccatgaaggggtaaaattagaaaattttgagt

SEQ ID NO: 325909 - DNA, 503 bp, Cannabis indica
tattattgtatcacaattaagatcaaagaaatagacagagtatcaagtcaaggggtccagaataaaaatgtacattgtaatagaaaaatattaaacaaaatttttacttaaaaaatgaagaaaataaattcaatgcaatttaaagaaaatgccaaatttcccctttgttatagcttgaaagtctctaaggccttcaccatctccataatatacatataagaagcacattgagccaaataataaaaagaattaataaattagaccaaaattttaaaaagattacaaaaatacgttactgtggagaaattttttatttatacagtttaaacttttaaatttacaaaaatacaaacttcaataaattcttcgatatttttgtttggttgttttatattttatttataattgatttatactaatagtaatgtggtggattttcttgttattttttattattttatagttgatttataattattttaaaattgatttctcgttgtttt

SEQ ID NO: 325910 - DNA, 745 bp, Cannabis indica
cagaaccaacacttctccaacctcatctttttatcaagttaaaatatgagagccaactgaaaggaaatgaaagagttagggataagaatatgagaaaaccctaacaaccgaagcatatgagaacacctcttgaatacaccacaccggcctaaccacaccatatcaacaacaacatcttcaataagttcaaaacaaacattacaagtccgaaaaaagagataataacaaaaggaacaggagctttacttaaaataattccatgaaaagagagaaaaaaattactaaacagcaaaatctctaaaaaaacgaaaacccaaatagccttaaaagatttatggtgtgaaaattagttatgtaccgtgagtgaggaggaggatggtgaagatcccggcgaggaaaggtggcaaggagtgaggacgacagagaaatttggctgagagctgagaaatttcagcctttctctgtgttagagtgaggaagatgggagatatgaagaaaccctagtttcttattgggctgcccgtttgggcctatgtttgggctgaaaactatggtatttttctaaactataaaaatatttatataattaagtaaatacttgtattttaaatggggaaattatattttataatttagggtgtgattggtttaggatttgaaaactattttatgtttttgaaaattaaaatggtgggggtccacataagaattcttgattggttgagtgtttttaaaaacaaaattt

SEQ ID NO: 325911 - DNA, 815 bp, Cannabis indica
ttaatgttaaatttattttttttagtattattttgatactatattttaatttgactattggagttgcccttatattaattgtgtatatattcgaataaaatcttcactgtcaccataatatgaattgacctttaaagaggtacgattgagacaataatcaatctcaaagatcatgaggttttttaaagaagtaaaaaaaaacaatgaattaacctttgtgttttctttttaaatgggttgtgattctcgaatatttaatatcaattcaaatattaatgtgatttgttttattattattttattatatataaataatattttattaaataaaaataaaatttttcataaaccaagaatttcagttatataggcacactttatatagaatagatattatatatataaaaactacgcactatcattaaacgtgttttatagcatcaaatctatgtgatgtcgagattttttattaattattattatttttttcccttcttaattatatgtttatatattttacaatctatagcaaaataattaatttttgttaaaaaaatgatccttaatttcaaaaacaattctgatagaacaatataacacgtatgttaaacaaacgagcagccaataaataaaaagactgtgatttgttttattattatattatcttaaaaattaaaaggctatcacttccgtatatttctaactttgattgttttttcttatctcagttgtaataaataattttttaaattttatttttagtacgataaattatttataatattctaaaatttataaataattttaaataatta

SEQ ID NO: 325912 - DNA, 1630 bp, Cannabis indica
atatagtgtagttgtgtccttttttaggtgttttctaacaagtgggtacggtatagtcacaattgggaatttcaagctgaatcgggtttggggctgaaattcatttttgggattatttattggcattttatagatgtgtgattaatctgaaaattaattggatggtgtgttatgtgattatgaaataattgcccttcaatgcctaaatgagtgttatatggccctaggggcattattgtaatttagcttatttggattatttgtagcaaaatagaattttgagtaaaaaggatataaattttctggctgtttctcgtacccaaaaccgacccctctctctctctctttgttcatcttttcattttgttgaattcatcgaggaattactttgttgagcttggatttgggagggaactgaagcttgatttcatttggaagtttgaggtagctttctacagctttaattataactttatatggcttgaattcttgtataaaataatgtttttgtgttgtttggttctcgagatgcatgtgtgtagaagaaggaatgattttgttgaattgtgcttagctgtgttgactttagcatgcttttcatgggattctaaagttgagtttatgtgtgagattctgattattggatttatttttcagtgatgtttaagcatgaggttttgattttggaattcatgcatttcttaggaactttgttgaatactagctcaatgtttggagcttcgcattattgctgtaaatctgaattttgaagcatgcttatggtggattaaaagcttaaaatatgtgtgttagctttctgttatgttgataagtattgtgggattaattctggtattttgcatgcttttgactgaattttggtgtgtttgtgcataattttcgaagctaaaaagtgggtgatctgggtttttaaacacagtggtcgcgattatcgtaggtctagtcgcgaccatgacaatggtagtttattatttattttgggtttttttttcgccataactttggactcggaacttcatgtaggacgttctttatatcctcagaaagcccgttccgagctttatattcttatgtggattttgaatgccaattttataattatgtgaagatgaatttaggaattaaccctattcgtgaatctcgaaaattatgactaagattaccggcacatggggatttagaatctccacatacttgggacaataggtaagacagtagttttcacgtagagttaagcgcagtggcgctcatgattttaaattatggttgtgattatttgcgaactataattagggttattaccctaaaatgagcggttatatggtgtagggttattaccctagtaattaaatgatttttcgtgtatgcacggtaaatatgtcagagtaaataaatatctgcctaaggcataattaatttagactcgttaaattagtaccttgagtttgataataatgcggtttatgcttactaccctagaatttatgtgaaggtaagaaagtaatgatgtacctaatattgctaatcaagtgaaggcaagaaatagggttattattctctataggtgttattttgagcatgctataatatgttatttgagtaattattt

SEQ ID NO: 325913 - DNA, 597 bp, Cannabis indica
atacttgtgagtagatctaaaatcctggtaaaataaatttccaacaatggattggatatccattcatcaattgctagaagtatttgatcactcttggtaacaaaggccagagaccagtttactttcacaagagttaagatagtcttatgaacttctttaatctcatacttaaagactaaccagctaaagaaggtaagcattgttggccaatgtggtgcaccaagcagtgaagacacaactaacaatgaaaaatatgcacatagtttgtgagttccaaaaggactttctaaatctggggataccctcagacattgatgtggagttcataatcaagttagctccaagagtgcttcaattttgaaggctccatacaaaatggcaatttatgaggtggaaaaactcaaagtatagctataggagctcttagacaaaagagatcattagaccaagtttctcaccttggggtgctaaagtactcctcgtcaagaagaaagatggaagcatgaggatgtgcatagactaccgtgagctcagcaaggtgaccatcaagaataagtagcctttaccaaggatagatgatctctttgatcaattgca

SEQ ID NO: 325914 - DNA, 1135 bp, Cannabis indica
tgccaggttattatctacgtgtcactatgtgattagtccagatcatttttatttttattttttatttgtaaatcaaattaaaatgttaaaaataaaacaaaaaatagtttaaaattaaaataaaataataaatatttaatatttatattttcattaaattaaaataaaataaattattaattaaaacccaaaaactaaaacatatcttcctcatcctcctcttcttcttccttctcttcttgctgaaaactattcatgaaccctaatcagagaccctcgcgttcttcactctctctccatctctttctcgacttctatcttctcagaaccaaatggaggttcgcaacccttgaaaacctagatctggatctgcttcaatggtgaggaggaagaaggcgtcgatgaggaggagggttctcaaagaatccaatcgcccagtttttagaaacaaccggagaagaagaagagacattgaaattggtgagcgaaacggagtcgactgatattttagggaggcggggacggagtacgagtcagatgatgaagattatagaggcagaaacgataaagaaggctaacatcaaagcaaagatacgacagatgaaggtagtgcgtgttggatcgtaacagtagggatacgcattagggttattaggcggtggttgttggtgatggtaaggcggtggataaggataaccattggggttagcagcgttgggttgaggctagtggaagcagggtaacccgttatgggtcttgaggtatctaccatggaagaaaagcttggatttagagtgtgtgatgctagtgatgagagaaggctaattaaaaaggaaagaaaaggagaaagagaaagataggttgtaaaatatgctaaggtctgctatgtggatcaacctgtcaacgcagaagagagaagaacatgattttagggattagggattttatgttctcagattttttaagttttgaatttaattttgtatttaatttaattttaagttttatgtttaacaaaaccaatcctcttttgttggattctttttattaacataggattaaaatttaagtttatgtgtttgataattttgtaattttttatgttaaaaataatttttatttaatttttaaatat

SEQ ID NO: 325915 - DNA, 533 bp, Cannabis indica
tttctttattagtgcctcatgagtgcctagatctgccatctaatgtaacaataatgttatcatgacagaaatgtaaattttgtattttataatgtaaaaaacaatctgcaattttgtacctggtttaattacttcataattaactctccaaggggttactataaaagctagctagactaagttagctatgtctctcataattaatacgttaattcgtaaattttgtttaggtctcaaggtttttcattatcgaaattttatacactctatagtaatagtttaactataccgtacgtgccaaattagtaagacaaagataatgttatgttacaatatataatttttcgaaaaaaaaataatcatccttaattagcaagtaagcagtccaaacagtacctttatattaattagctaagactctaaatatttacataataaaagaactccaagtgagagcattctcaaccgtttctttactttatttttaaaatacattactaaaatttcaatttttttttattttacagcacact

SEQ ID NO: 325916 - DNA, 842 bp, Cannabis indica
aattaattttgagataaaatcaatcctacatacaattcttttaggcgcaacaaattttacaaaaattgatgcaccactctccaaaccacctccactcaaggtaggtatggatatgaatacacaacacccttttccctatcaattttccttattatcttttgaaagcatttttggctattattcatttaatatagttaaatttttagaaaattttgtagtacacttcaaagtaatattttggtatacatctccatttgtttttcatccagaatatcttattagaataattttttttagtataatttttttttatttacgatcacatatattgtagatattattatgattatctgtaaaaattttaaaaattctaaatagtttacaataccgaaaataaaatttatacaattattcatttatcacgtgtataataaaatatagtacgtgtacaataaaatatttaaatcttattttcaactttaaatcttattttacattttttttttattagaatccagtccaataagatttgatcttaaacattgaataaatctaatacaatccaaaaaaaaaataattggatttgaaatattaaataaatctaaaccaatcttataaatatatataaaataagagaattactacgtataatgtttttttatttttttttttaaaatttacagtttgagtttctaaagcaattacagctctagttacaataggggtttctatatgattttttgttgcaattaaggttgcagcgctagttgcaataggagtttctatgtaaaatttcgtaaaaatgcaacaaaaaaaaaccatattttgaagtataaaaataa

SEQ ID NO: 325917 - DNA, 777 bp, Cannabis indica
agaagctaataaactatttgaacattgatttctatattataaattattttaaacttttcaaaattttgaaggatgacttaaataattactataacgtatacgattataaaaaaaaattagactaaaaaattctcttgaataccgaaacatatcaagggtgtatcggtgtaccctttttatgaagtgcattgtaaaagcaccctataattataaggactacatttctttggttaagtctatagcacatccacataaggggtggtttgatagactatttatctgtttcgacaactataagagcgttttaatctaagtttttctatgattgtgtatgctatagttaaataggattaccaataaatttttataaattttgagtagtgtacaatgccgaaaataatatttaaatattttgttgtacacgcgactgttttttcttatacgtgtggtaagtaactatttgaaccttataatttttggtacgttaaactatttaaaatcttttgaaaaaaaaaatgatcctatatagctataatacacccaattatgattaaaaaatgaactaaaaaacttttgtagattcctaaagacggtctactaaaatacctctttagatggtatactacagaaatttcccattttttttattattgaataatattgttaagtaattagtttggataaatagcggcataagtatccaaagttttaagtttgtaagtgacataaactcaatgtttatttttagcggcataagtatccaatgtttgtaaaact

SEQ ID NO: 325918 - DNA, 1460 bp, Cannabis indica
gggaagagacttactgaagaaagaccttgtttggaaagtaaaaaaggcaggtccatctctttgcttgaccacaactgggttccaagtttgtaatcccttactttttggcataactttaatcctagtgatcatcatgtttcctttttcattggcaatgataataattggaatatagctagacttcaacactatctgcccatatatcaggttaatgcaatacttcaggttcccattgactcctccttgcatgaaaacctcatctgggggcaccatcactttggtatcttcattgtcaattcagcctatcaccttgccaatttcaactccagttcaacctttccctcctcttccaacccttactattttaaacactggtggaaaaaagtctagaacaccaaaactcccccaaaaatcaaacacttcacttggaaagcctttaaccatgtcctcccttgtgccctgaacttgtttaacaaaaaaaccttagcaatcctttttgttcctattgcaagtgcaaagttgagatggttacccatgctcttttagattgtcctaggactaagtctatttggaggaaatcttcactccaccaattcaacactaacaatcataagtgtgacatcaaaacatattatttaagaggtattgaccatcttaacaaagagaattttaccttgcttatcaatttgtcttggcagatttggaactagagaaataatgctcttttcaatcgcaattctaacaacctcattgatgtggaggactatgttcttagtttgtcacaggattaccaggtggctcaaaatctcaatccaaagtctagcatgttagagggcaacaactcagaccagatccattttccagtcaattctcccttaacccatgccctctaacatggcaactacaagttaagtgtagatgcaacccttgatttaaagaagctccgaacagatttgggtgcagctatcaagaactagcaaaactagattaacgtaggcttttctacacctctctttgccgaagctcaagccctcctagaagccttgagatggtgctctgcaatcaaccttccactcaacctcattgaatctaattgctctcagttggtctcaaaagttaagaataattggaagaacaatttagctctttccagtcttgttgagtcaattcgagaatctctattccaattcccaaatgcatctctttaccatatctctaggaatataaattatgaagctcatcaaaatgcaagagatgcattacggcttgataaagatttgatttggagagtctagttctctccactcggttgtgtagctgaaactttggacgtttcttcccttttcagttagttacagttacttcaaaaaaaaactgagatataattttttcattttttttagggataattgcggcaaaagtcccaaaacttgaagttgatgccgattagtcctcaacct

SEQ ID NO: 325919 - DNA, 997 bp, Cannabis indica
aacatcatgaaaataaatacactaaacaattaagtgttacaaattcaacataaaaaaaaaatctaataaaaatataataaatatttattatattttttaatattttttattatatataaatgtaattggattggatcggtttttaattggattttgagattgacatccaataaccgatccaatccaagtagaatcaaatgtttagcatccaatccaatccaattgtaattggatatccaactttttgtaattggattggattggatcgattcggttcaattggattagattggataatgcccaaccctatttatattagtgaccaaaccaaatgatacatataatgcaaatcaaccctatacatatatttttttattctcaaaaaaaaaccctatacatattttaattttattttatattaaataaaatatatgaaaactccacatgtcacataaagacaagacaaccctaattaacaatatcacaatcacgagtgtcatcatagtatgagtatccaaagaaagctcttcataagatttttttgttttggttgaaacgtgagtgtcttattaaattgaaaactaaaccattccaaaagatttggtaagttacaaatgtagatcacttattatacaacttattatttggctaaaaatacaaataacttattggcatttcacatgtcaattacttatttacatgtacaaatatgtgttgtcattatcaaatttcaaaaccttataaaccttttcggagaaaaattcaatttattactgcactgcaaaaattttaaaccgaatagtttagtaaaattatgtatatgtaatggttagcgtttaagagaggttaggtatggggtaagttgaaaaataccacttttattattcaattaatcaaatttatctttattttcatatttatttgaaacatacatctttttatgtgtattgtacccaaaatacccttaagagagtcacatggagagtatcttgaagtg

SEQ ID NO: 325920 - DNA, 955 bp, Cannabis indica
aaaatctccggaattgagaaattataactttagtgcccacttctaataatgagacccacaaataaataatttcatgaataattataaaaatatcaataactaatgctaattgtctctactaatccatattctaatatccagtcattacacttcatctctctctcacacgcctctaaggcaatctcactctcttattagagatctgcctactgatttatgatttgtatccttatagagaggtatatcgaattccacatatagtgatctgaatagtattatctctaggtatcaatacaacaaaaaggagagcaggttattatcagctattataagggggccaaacctctataataaatctttgtgtttattgctttttcattctgtttgtgtaacacatggaaagcatcagatttatacgacccagctgtcaattgatcattttttgaggtcaacatgctaaaaagaaatagaaacagaaagaaagaaagaaagaaaaaactccagcatcactatctattatattagtgagaataataaattattgctctcaaattttatcacttatatgatcgtgtctcttgtaatatttatattgttaaaaaaatcacttaattttatccgttagtaaaaattaagatttttattaaaaaattaatattattttgtctttaaactttatcacttatataattttgctcattgtaaaattagtattagtaaaaatccccgttaattttattaattattataaattaagacttcaattaaatttttcataaattggctcacaagatataacatggtggacataattgcttatgtgagtaaaaaaaattaaattaaatttgaaaaggaaacttaatgaaaaatgtagaaactaatttcaaactacattgtaatgaaaatatcattttaatgtaaaaatttatatgtaaattatttttttttaaaaaaa

SEQ ID NO: 325921 - DNA, 1005 bp, Cannabis indica
ggtgatctctgctttgacttttacttttgaagtgtccaagttccctttgatttggtcttcctttactgaagtttacttctccattagaacctccatgtttctcattcttgatctttaagtcctttgacttcaaggctgaaattacttcttctagagtaatctctgtcctaccatatttaatggcattcttcacttctttgtaggattcaggtagtaagtttaagatgatgatggcttggttctcatcacttaatgcctcattttcaccaaaattagccaattcaatatgtaaccttagaaattcatctaggttttcatcaagagtcttgttagtggtcatcttgttaccaaagattctttctttaagaaagatctttctaatcaaagatttctttagaaactgatcttcaagctttttccatatttttgcttgagtattgattaatagtgaaaaatatacatttaagtaagcttaaattataagataaattaaaaataaattaatattttcatgaaattaataagatatatttttatgttgaaaatatttaatttagatttaatttattaattttttattgtaggaattaaaattattggagttttgaagagaattgaagaattgaagaaaggaataattttcaaaaagaaatcagaattcggaccttggagaggcccactcacgcgcagccaaaagcctagccatgagccgtccgattgctgatcgaatggcccagacgggcgcttgaagatcaccgccagacaagggcgcatgagcccgtgccttctcctgctcagcctgccagcgttagacgcgtggggtcccacttggacccacctgtccccacgctagcagcatccttctttccgccagccattacatgagcaacacttctccgctcctccttcaatccgagttccagcagcaaatacatgcgcgccaagtgttgtctcctccttcaatccgccatttttcaaactgttttgaaatgaaatttcaaaata

SEQ ID NO: 325922 - DNA, 1657 bp, Cannabis indica
tcggatgtcccaattagttcccatatccaaaaagctcacactcatcaaacctgcgtactttggaaaacccccagtttaactaaaggtccagggatcgggtaggggcgctccccatgcttatcactttgagaaagagtattgttaagatctcaaagaatacaccaacggcaaagtagattccccagcaagttgacagattttcctccatgtattctgttcgcaagcttctttgagtctctccatagaaaccggttaggcaaaattccggatgaccatcgaggttgaacaccatgtcaatgtgattggagctaaaactaaaaaggtttcctttcgtcttggggttttccaaatcatagctaatccgccactgtgaccaaccgcatcaaccacaaaacttgcttcataccccaaacgacttttaacaaactcaactttttattttttactaatagtttcacacaagaatatgacattaggcttcttttggaacacaatttcctttagaaattgaattacccaggggttcccaagcccttgccaattcctacttaagagactcataatccttggcggccccaaacgttggtacccgccaataactcatttttttttttataaaaatgccatcttccacaattgcctcatgattatttttattattacccaaattcacttcagcttcatcttcaataaggcgcatttcttttccttcatcaggcgtcttccctccactctcaccaacaacctcatcactaacaattattttgggctcggcccataacttgttctttttcctagcccatatttgagtttccttctacccgtctccttttagggtcaataaaactgaacccctcattttcaaatcgactgtcttttcgcacttccccaaccaaatctgtttgtatacccatcgaagccttaactccaccattatctcttcccatgatcccctgaatctccccatcaatcactcctttatttatccccataaatctctctatcctccacattaatatcctaattattaggagcattaactacccctgaactgctagctgccaccgaaaaaacattgtcagaacattgttgcaaaggccttgccatattatctctaagccacctcgccccaattcttttgtgtacgacgatctggtgccttcttaaacaaaccataaggtttaacaattttctcagtcggttcatcaaacaacttgggacaaaacttctcagtgtgacccaatattccgcaaaacgtgggcactctttcgcacttgaaatttgcccagaaaaagtcttctttggtgtaataaatcttcattcttctcttcaggggtttatcgatattgatcagaaaatggaccctcaaatactccctccaaataccagtatagttcttaagacatgaagaaacgaacttaccgatatatgtaccacaagctttaagcactcgatccgacataaagccaactcttagattataaacttgcacccaaatttccatggtgttcaagggaaccatccttggattttctcccaccttcagtctttgaataatcaatgggactttattaaaggtccatggtgtaccttctagcactcgactaatatccagttcatgaaaaaattggaacaaaaatcggttgaactccatttc

SEQ ID NO: 325923 - DNA, 708 bp, Cannabis indica
accaatatattgccttggtgtcatttgaaaggaaaatgaaaaacaatttttaagtttttactttttaattttatttatttattttattttattatttataaattattttatagtatttaaactatcaaaatgatgtggactaataaaaatttattatgtgtatacaagtatatttgtcaacaatatatattggcacttaattgaatagagttgtaaataatataacagaagtgagatttacaggttttaccaacaaaaaaaaaatctatttgtggagttaagtgttacaaattgtatgattcaagtaattttgctccaatacaataaactttatcacatttactatttaatcgcagggccggctagagggtggggcagccggggcctcggctccaggccccacaattttggaggtcccaaaaaataaattaaaataaataaatatacatataaaaacatataatatataaatatttaactttacaaattacatgaaaaatgtgtagaacatatgataagtggagcttttattggccttgaggttcaaagtttgatcctttccttaatcaccttttataataaataaatatttaactctacaaattacatgaaaattgtgtagaacatatggtaagtggagcttttattagccttgaggttcaaggttttatatatatatataaaaatatattaaagtacttttaattt

SEQ ID NO: 325924 - DNA, 928 bp, Cannabis indica
cattaactatagcactgcacgggtcgatacacacaacacctagtatccattatttatggctaggactagtggtgtatctaatcccattcactcccatagctttcatgcctcactgtttgtgttagcctagcagagtgctttcgatgttggtgttctttccaatctctatgcatttcactgctccactggaaattccttctaccactgtcgtaatctctatgcacaatcattttggataaggcttgcatcctctatattatcgcagctgctggcacagagttagccaatgctttttcccgatataccatcatttcttcttctctgagaaaagaagttcatgactcgtaggccttttacctccatgcgggattgctccgtttggctttttcctattgcagaaaattccccactgctgcctcgcgtaggaatctgggtcatgtcttagtccctttgtggctaatcatcctctcagaccagttactgatcattgccttggtaagttattgcctcaccaactagctaatcagatgcgagcccctccttagatggattcctcctttttttcctcaacttacggggtattagtagccgtttcctactattgttcccctcccaagggcaggttcttatgtgttactcatccatctgccactagaaacataacttcctttccgacttgcatttgtcaatcatgccgctagtgttcatcctgagccaggattgaactctccatgagattcatagttgcattacgtatagcttccttgttcgtagataaagtgaattcagagttgtctttcattccaaggaataacttatatccatgcacttcatattctcttgcagttcgctctagcctacgagtcatgaacttcttttctcgaagaagaagcaatgacaatatctggggaataagcatcgactaact

SEQ ID NO: 325925 - DNA, 941 bp, Cannabis indica
aaccatcctcatgcattaagtccctataaatagtgatctaacctcaccatgagggggattgaaaaaaattgcttcagagagagaatagtgatcgaagagagttactgagagatcaattgtaagagcattcaaagaggaagaacactttgttccttctcttaagttaatataatacaatgggagtaggctattaccacactcacagggtcgaacctctttaaaattttgtattcttttttaacttatcatttttgttctcttttaattatattgttaatcacttattaattgacttcttgtggttggctacaagagaggtcaacaaagcccaaattgttacttagcttgctgtctcagatgaaggctgcgcaccaagtgcctgctaggtgcaggctggggtctggccgaccatgtgcatgtagggtctagtcggccgtgttcttgccatggtttggcagaccatgttcctgctagggtctagccgaccatgtccctgctaggatctggcaggtcatgtcctgttcttgccagggtttggtaggtcatgttcctgccagctttggcaagtgttggccatccttagtaggtgttggccagcctttgtacatcattccttgtaaaggtgagcctttcattgtcgaacggaccttttttgtatgacaataacattttggccgaccagtctgtgcttcaacattgtctagccgtacaagcgtctcctggctggcttatgtactccccttggccagcaagacatggttgtacaacttcttgacgaatttcttagctcctccgtcttgtttcttgacggttctgccacgtcttgtaaggagaatttttcctgctattgacaaggatgtattccacgtgtcctccatcttggcttacgtggactgttgggttttgtgccctaaataaaactatttcaatataatcagatt

SEQ ID NO: 325926 - DNA, 3222 bp, Cannabis indica
attgtaatttttgtgactatacatttagccacggaccttttcgtcacaatataggaatgataattataattaatcactactttttactttagtcacaattttgtgtgactaaagtaagtagtttttgtagtggtctttcggattcattttatattttgaaaaagtaattaagtcaatatccatttgattataaggagtagttaagagatttttagttagaaaattaatgtaaaacacgaagcatacatagatcgtgatgaagtgtgaaattaatcaaacatatatgtatttatgaaccaaaagatcaaaatacctctaggtattgattttttttttagcttcaatcacacactagctttggatctgtaaaagaaaagaaaactgattagtgtggacaatcaggcttccaatctctctatactctctttagttttactttgcccgcagccgaatattgattgaattcatcccaagacatagtattaacatctcgagtttgtcccacaatgtcccaccaaacgtgggcatgctcttggaacataaatgtagcacaattaacccgtgcagttcctattactcccatattgtctagaatgcgaataacaatgctcatccactattctgccttgatgatgtcagtacctcccaagaacgtcagaggttgtagcttaacaaaatgctcgaagatcgagtcacgatatggcaatataaatccagggttacccaccactagaataggggctagtggtaacacttgctcagctagagctgcctgagttggttgcccaaactgacgcaactcatcttcctaacagggtataatggttcgcttcaagaaacatctactgccagtcggcaggtggattagcattgttaaccttcgcgttattccctgaattttatggaggcacaagcaatgtcagtggattagtttggttattatcaggctctatagggtcgattttctctcaaatagcccaaaaatcaacaaccccgacgagtcagacacctaatccccatacttacacttattgccttaaccctaactcatacatattcatataattaataatcatgcttttcttatagcatcatatcttctacatgctcatatgctgcctataatcgaaaagtagtaaatatttaatcacagaagcagttaagcatttactcgcaatacttactgcagcacgagtcgagcttgtctttggcgatgattgtacatgttcaaccagactacaggaagtttaaaaatcttggtgctctcataccaaattgtaatgtcctatcaaaaggaacgtcacacactacgactaaacatacactaatcccgctaatccgggatatactagagccaagagcaaaaattaaactttaaaatacaaaataaacataccatataagaatatagtgcataaatacaatataccgtaaaattacgattctcacccttcttatgtcaaaattacgaaaatgcccccgacacacaaatggggtcttaaaatgcaataaatcacaataattctacatattaaatcatataataatataatttctcatttatacttaattaacttagtttagagttgcttttttttttgaataaagagttactaatttgatttttaaactttaaggtattacactaacacacgagacaaacccatgattctttacgatctggtgtcagaggcatgccacatcggattgaacccgaagagttaacctcgtgacaccccttggactactcgtttgagatacccatggggcatccgtttatgccttcccaaatgcttgataatttggatgtgttaaccttttggattcgtcggtccaactttgcccataatcgaatattgattgaatctagacctcccgtctgaatttgttcttgggcggggtcgttgttctttttgggctttgtggatgggtctgtaagttaatttgggacactagagcatacatgtcacttgttcagaaatacgaatagttgcatgtgcaacaaaaggggcatgttttcaacatattattatcgatgaggggataatttggtcacacaaaaagttcaaaaaagagaaatacacataaattatagattaacgggaggaaaaaaacttatttaatgtagcacatttactaaattataattagaatcggagtaattaatggaagaaatgaatcaatataaaatattcagaaataatattttattatattatttactaaattggccgaaaaagaaattataatcattttattttgcttacatgaataaaaaagataatcgagaatgatttaatttgactattttttatttatagattgtttaatagtatatttgtctaatatttttaattaatataaactaagtaagttaaggaaagcgaaaagtattcctaatcaaaatcaagggataacattttttttatatttttttcttaatttgtgttgaccctactaattatttctcccattctaaaatttagtaaacaaactaataagaatcataccatctccaatgcatatgataaaagatgtgctaaatttgacattaaaaagttattaaatgctatatttggtatacattttataattgtgctccaatatagaatagaaattaaaatacaaattaacataaaaaagtaattatcataattaatagggcattttacataaatgtatacattttttaaaataattacaaaaaatgtgcaaaaaaacacaattttaaaaatgtacacatttgaaaacatatttacaaaaattcatacatatttttaattaaattataatagatatattaatgattcaactttctatatttagatttgtataactattttttatgactaattgatatggtattaatgaataagcctactaattaacaaaatttgtatattaataattaaaaaacataataagattctaattataaacaataatatttgttgttatcatacaactcacgtgaaaaacataaatgttatatttttaaaattcaaaacatatataatcataattttaagggaaatgaaaaataattatgatattaatttaataatctgattatgttatatgattattaaaaagcttagctatacgtatattatcataatctaatcataattatcagattctaattatgttatatgattattaaaaagcttagctatacgtatattatcagattttattggaaaaatattgaaaattgatatt

SEQ ID NO: 325927 - DNA, 674 bp, Cannabis indica
aacttgttgaggtgacataatggaagatttcattttatattgcatttaattcaagatttttttttggccataaggaatggtgattccacccaattaaaataaactctctttttcatatttccaatgtaaagtttaaaaatattgtaattcatatttaattggttctaataatttttttaattgtttttaaaataaaaatttgttttatttaatactctataataacccaaattattattttaaatattacatgtaattatgtctacttacatagatgaataagaaaaatatcataccaccaccattgttgaaacacaaaacccaaggttaaaattttgaagaaaaaaaaattgaccaacaaagataagatttgaggactcgaatggggaagaaaatcgcactcggcatataagaatgtgaaaaagacgattcgaagtagagaatgagagatgggtgttgtggggagaagaaaataaaaggaatacaaaatagagaacatccattcataatatatcattatatatgtataaatgcataattacccatcatagtatttaatttatgtaattatagagatggctctgttacgaaaactatgaacactacgcaagtatacgaagtcaagtagtaagctcacgcaagtgaggtcgaaccacaaggaattggattaatta

SEQ ID NO: 325928 - DNA, 508 bp, Cannabis indica
ctaaacctcttccaccagccaaaatttggcttttaaccaccaactgcaccaaatacacattaccattgttccagttatttcataagtttatttgctaagaaatagatggaaaaataaaataaaaatatgaacttaaatacctcattgtcgttaggaaacaccttccgaatagtctctttcaattcatccaaagaagcgattgcagcacctttaggcacgttgactccatatttccccatcaactcagctccctgatttcaaaataaaagactctcagcaagtaagatcacgcaaatcattcttcacagatagaaaataagcaattgtaacaataagatctttcgcgcaaaaacaatacaatttcgatttcaaatagaaacagtattcgtggaaacaacaagacctgatattcgtggatgttgagacggcgaagctgttgttgttgccatttgccggcgacggagagagagcgagaaacaagcttgttgaaaagtcctctcaccatatc

SEQ ID NO: 325929 - DNA, 1365 bp, Cannabis indica
ggctcttgatggccaacaagccataagggaggagtattttaacttgtcctctgagctcactttatgagttcaagctgcgcaaccccagagctaatctgtcatacatcgatagtgaggctttcgtggagtgtacattggcatgaggaagagtgctttttgagagtcgattgaaagcgaactagcccactgcctatcgagagggttcttcatcaggaaaccatgatagagggttggttggcacaactgcagagggggtggccaactaggaaattgaccaccaggccggccaacatgttgatgttgaggccagtccagactctcgctatctcgattttgttacttcagacaccactccatctagccttgaacacacacagataatatttttcataagtattatttagcattatttttgtataacatagacaatactttcatgttttgtatggcttgtggcctttttagaacactacttattttcagcccaagggccttcatgtcgtatctttggcctataggtcctttcttgaacattaatattgtttgaccttgttgcttttttatcatgtgtcatcccaaatttttttaacctgacgtggcatgtccacgtaagccagacactgagtataagtggaatacaacattgccagtagcaagacagggtctccatgcaaggtatggcaaaattttcaagtagcaacccaaagaagtgaagcgagccctcaaagagttgtaccaacatctcttgccaaccaagtgaagcctataagccaactagagtgagcctataagccgaccacgatctgggcacaagctggacgaccaaaaagtgacttccaaaccaagggagcttccgtttgaccaagggaacctgacctctacaaggaaacagtgtacaaatctgtcatccacttgtaaaaggatagcctcctcttggtaaagctatagtgacatgcaagatcttggcacatacatgacctgccaggtcctggtaggagcatggctggccagaccttaacctacacgccttggccggccatacttcccttgtaggtatatgggcggctaggattaacctggcaggactctatgtatagcctaaaacgtggacaataagctacctgtgaatttagcccttaacaccccaacaaactgatggaaagtatctactttcaaggggcaatttagtcatttgtatttaattaatttaatatgtaaatatctaaggcattcattgtaaattagggtcttaggcttcctatataaagccttaactttaacctagaaaacctaagtcattaagcctacttctagcctccaaacaattctatgtctgaaaccctaatctcttctctctctctctct

SEQ ID NO: 325930 - DNA, 946 bp, Cannabis indica
aaaaacaaaatatattttaaagtgtaaaaatgaaaaagccccaattaataaattgatatttttgagagtaaatatcatttcaaacctatgtttgtaaaaattaataatcatactctctattttgttaaatataaccaacctaaaatgaacagataaatatatatgaatatagcaatatgattataacacctacacgtaattgtttatcgaaatttttgaaaaaccaattataaaaaattagaactcaaaaaataaatatttcaaagagagaaacagaacaacacttagagtttttacgcggctgaggtgttagcgagccttaatcaacgagttaatgttattatgtattgtagccagaaaagtctatggaaatacaataagtatatgttctctgtttttacctgaacagatattgcaagagagttcaacccctaatccgaagaattagttgggtatttatagtgtttatatgcattatacttagtttccctttccctctaatggggagtttatatgaaaaatacacaagttagggctgtattcgtgaagcacaacccatgatatgataggtctgctaactaggcaggttggacacgatcacattgtcattaccatatccaatatttgtgggtaattaattgtaaatttattactcaatattcattttaagtagattttccttttaacttgatatgatcttcttgccgaaattcgtggaacgtaatgttaggttttatgccctaaataaaactcatttcaatataatcagatttacttattaataaagatcataaataacattttatgttcaatggttcacatgatttatttcatgattatacacatataatgtatgaattctatttaagtcctgaacatatgaatttgttaatgattatagtgttgtcggcacagtggaatataatcttgattatatgttcgaaag

SEQ ID NO: 325931 - DNA, 608 bp, Cannabis indica
agtggaatccacctcttttttgatagaatatatttttcctcgaaagaaaaaaaaatatatataatcacgtgtgtaacatagaggctatttatgtatgtagaacttacatataaccgtatgtaaggctatctcaggagctgggtatgttggaggtcttgggtttaaacgttatgcattgtaatatataaatgcttaattcaaaaaaaaaaaatataaaacttacatacgatttcattacaaaaggcaaaaatgttgttgtaacatgataaggcatgttgttcgatattcgagtcttaaattatatatagttgtaatatataaacgcttaaataaaaagaatatatgataaaggattcccataataaatagttggacttcattataatgcatgactacatatttgggtgtgtattcaaataaaatgaaagttgttaataattcaatttttgtttttgtaaacaactacagatttataaatagtttttacaaatttataaacatttgttatatgtttctacattaggaggcgtttggtaggatgaataaaaatataggaatgggaatgagaataagaataagaatatgaatggaatgaaataaaatttaaa

SEQ ID NO: 325932 - DNA, 1617 bp, Cannabis indica
attgctgcaatccttgctgcagaacagatcattgaacctacctcttacagccaagcaataaaatataaagtctggaacaatgccatgggaactgaaattaaagccttggaagataacaaaacatggatcattgtccctctcccacctggtcaacacacaataagcaacaaatgggtctatcgaatcaaatacaacccagatggctctgttgaaagatgcaaagctagattagttgctaaaggatacacacaacaacctgggatagattactttgatacctatgcccccgttgccaaatttaacacactaaaactcctattttctctagctgccatgaacaattggcacttacatcacatggatgtaaataatgcctttctccatggagatttacatgaggatgtgtacatgacactacctcaaggatacactccacaaggtgtaaatcccaaaaaatgcagtatgcaaaattaaaaaaaagcctatatggtttaaaacaagcataaagacaatggtaatgcaaaactaaagcaaccattaataaaacaaggttttcatcactcacaatctgatcattctctcttcattcaacacaaatcagacactttccttgctctccttgtctacgttgatgacataatagttgccaccaacaacttaaatgaactatctaggttcaaaacctctcttgatgcccacttcaaattaaaagacctagacagtcttcgattttttttaggtttggaaatagctaggtgtgaaaagggtatctctgtttctcaaagacctttcacacttcaactactccaagaaactggtcaattaggcaccaaacctgcctcaacacctatggagcccaacctaaaactcagcaaagacacaggtactctccccacaaacccaacccaatatcgaagtctaataggcaaactcatttacctcacaatcacaagaccagatattaattacgctgtcaacaaacttagccaatacatacaacaaccaagacagccacaccttgatgcagcctgcagaattctgcagtacctcaaaacctcccctggtcaaggattattctaccatgctacagctccatccaaactcacacttcaagcatttgctgatgccgattggggtgcctgcccagatactagaagatcaatctctggctactgtgtgttcttaggccactctcttatttcatggaaatcaaaaaaacagcaaactgtttctcgttcttctgcagaggcagaatatcgggccatggcaaatgcaacatgtgagttaacttggctcatagcacttctaaaagattttcagatacctgtctcacttcctgcgtttttatactgcgacaacagtgctgctctgcatatctctgaaaaccccgtgtttcatgaacgcacaaaacacgtggaaatcgactgccacattgttcgagagaagctcaccaccggcatcctcaagctcaaccatgtaccctccaagatgaacctggctgacatcttcaccaaaccaacttttcccactgtctttcatgatcttgtatccaagttaggtgtaaaaaatttatacactccaacttgaagggggctgttagaattagttagtttgtta

SEQ ID NO: 325933 - DNA, 577 bp, Cannabis indica
ttttgtttttaaaaaactcgattcgataaaagttgagaaagatatgaattttggaagtttcgggttgaaagggtgtcgagggaggtgctcatgcgcaccaaaccctcagacaaggaggcccagtgcgcgcctgtgctcagacaacttcctgtctgaatgcgcccaggacgatgcacgactcgctccaggatgctgcacctgaccgaggtttctcggtcagggatgctgcatctgccgagaatcctcggctttcacctctcctccgcgcgcgtgataggctgcgtgcagcctgttgcacgcctactcgtgggcagcaacgattttgcacccaaaacaccaattttgagggattttttcccaaaatctgattttttcaattttcaaacctcaaatttaaaataaaatattatttttaaatatatttaaacttaaatatcatattttaaattaataatatttatttttcaatagattattattcatttttatattttgaggtttaaatttaaaaactgattattttatttttcaaattatggtcagatttaaaatttgttaatttctttaatatttatat

SEQ ID NO: 325934 - DNA, 569 bp, Cannabis indica
tttttttgcttaaaatgcggatttacatgtgcatgtataaatatacattatatgactccctcaaaaacattccaaattaaattttatttattattaattattaataatgatttcttagacttaagactatatattaatctaggagtaataacaagacaaagggtttttaaattctaatttctaccaaccattcattgcttctagttataattttacaaaaacaaaacttgactttgttttttcaacacttggatatttgtaattatatataatttggatcaggttaatccaaattagtaagtagtaattttgcacgtgatgtgatcatattaagactcaaaaaacttatataaacaaactttaacaaatcccaatagcttacattggcatgatgtaatacttagctcattaataacattataattattaagctataccaaattataacttatcaataatgtaatatattattaattagcattagtagtattatttacagaaaataatatacataaatagataaagatttatgtgggcatgtattggaatttgaaacttggggggaaaaa

SEQ ID NO: 325935 - DNA, 1286 bp, Cannabis indica
ataaatgaatatcttgtaacatttatggcaatataactatgcaaacagatcaaaggagggttttgtctccaaaattttagattgtagagttaattgtatcaatatgtgtgaagatataattttacagcaaatcacttattaataatattaacttaggaagcaatttaactattacattgatcatgtatactacttaaatttattttctacctttaaaataaaaatatctacgggggctatttacatgaataatccacttaatttagggttcttttgatcgatacactattgttttgtgttatataattatatatatatagtactgtgttggttttaatacaatatattatgcttcatattgatttatattaataaattgtataaaattatactgcttatattaataaattgtataaaattatactatttttatcataaatccgactgcacactttctcagactctaccctggatgtgaaccctaacctcagactcccccaatcccgaccttagacctcgaatcctgcctaggacctagactcagactcaaaccccaaccttcaatgggccgggaccctaaccccgcacccaacccttgccaggtccctgaccccaaaccccatggcctcaaatcctcgccccaaacactaatcttgaccttggttttgtatcctcccatgacttcatataccttcgcactataaatttttttatttttagtcacaataaaatttgtgagtaattataaatcatcatttttacgttgtgactaaaaagtttgtgactaaagatattagtcacaaaaattataatttgttgtgactaaaatacatttagtcacaaatatttattgtgactaaaactaaattagtgataacgtacttgtaactaaaaactatgttttaggtccttcaaaaaaaaaaatactatgttttagttacaagtaacattttgttgtgactaaaaattacatttagtcacaaaaaaaattatgttaagactaaaaaattgttactaaaaatagtaattttttgtagtgtggccaaacccttgaagacatttttcagtgcaataatgaatttgaaatacagtcaaacctaatgctattatgcctactttatttttaaagttgaccaaattgtcaaaagagaaaaagaaaactgacaattatttaggcacgcatgcacttatttatgattgttttattgacttggaattaatttaagatatttttttaggggtaagatattattattactttaattaattatagagtagaattcaac

SEQ ID NO: 325936 - DNA, 958 bp, Cannabis indica
catgcaacataaaatgttaattctgatctatattaactaagtaaatctgattatattgaaatgagttttatttagggcacaaaacccaacacatatctatattgtcccgctataactaaaatactaaaccataagaaaatgtgattctatcggccaaacgtcacgttccaatgttgttgggcataaaatataaaaaacatgaaatttcatatataacgtaaataacacacctagaattcaaatatatctccataaatttataaatcataattagaaatataatttcataattaagccctaattatctgctaatttatcatattaaaaattaaaattaatcagtctttacaattattccatgtttaaaggattttgtcctcaaaatctaaccttaacaactctggatattgggccctcatgtcggactccaactcccaggtagcttccaccaccttaccgtttttccaaagcactttgaccaatgctatggtcttatttcgaaggactttatcttttctgtctaaaatctgaactggttgctcttcgtatgataagttcagctaaagttctagggtttcataactctgtgcacatgagtgggatttgaaatgtatttccattatatagaaacatgaaatacattatggactgcagaaagtgctagaggcaaggctagacgatatgctactagtccaaccttctcaagaatctcgaaaggccctgtaaacccaaggcataacttgcccttttcaccaaaacgtttagtccccttcatcaaagatactcgaaggaatacatgatctactacctaaaattctatgtttttgcgtttcagatctgcataactctttcacctgctctgggaggcaagcattctggccttgatcttttctatagcctcgttggtccgttgtattgattcgggacctaaatatttcctttctccagtttcattcta

SEQ ID NO: 325937 - DNA, 612 bp, Cannabis indica
atgaatataagattagtgataatccaataataatactaagaattatatatacaaatatttgcatatagttatgatagtcttaccttcgacttcgaccatggataaattatttgttatccattataacaaaactctttcttattcttccttccctttactttattctctattctttactcttactcttactctcattattataatgacattaattagtatgtgttaaaattagacctcactgtaacctttattattacagttttacagatgaagtgaaaattacaaataaaagcaaacagaatacaacagaaatcagatcctaggtggctttgcctctagtggatcaagaactagttgttagttacaaccgaagttgtaactaactcctagttctgtgatcaaccctagaactacaactataaaaggaacagaagagaagaaatgaagatataccagatgcaaaaatccctaggttaccagatctgagagattgtcagctccagatgttgttttcaagttcatgcaaaagaaacaaagaaagttagtgtgagaaatcagaaaaataagagagagaaataaacacagaaacacaaaagagagaatactttagaa

SEQ ID NO: 325938 - DNA, 695 bp, Cannabis indica
ttgaggagcatgatttggtagatgtcaaagtctggggagcatgatttagtatataaacaatcactgaaacagtaaaattgaatgaaattaaacaaaagtccttaaatctaacaatctcaatagttcaaggaaaatttttaacgaccaaaaaagttcagggggcatgatttggtatatgtcaaagttcgggagaaaaattactaattagccttttagaaaacaggacttgcgatgtgcttcctagagtgctgacgtcatgttgcgcgtgacaattttaaatgctgctaattatttccctcattttttatgaagacgattcgatttttttatttgattttgatgtccttattaattgcagaatctcaaattggtgcttaagtattgtaactgtccttttaggtttgttcatctaacaattgttccccagttgttggattatggatttttcaatatcaaattgggaccgtcagatggttaacgatctgtgtcaccttggttgatctataaaaccccttattcttcttcttcaatatttttattctcatatttctcagaaccctaagccagccaaaattccagacagcttagattttcttctactttttctccaacattgccaagctcagttttaccgacttcttgccactacaaaaaaaaggatattcagctacaaaaaatttggtagcaaataatgc

SEQ ID NO: 325939 - DNA, 1408 bp, Cannabis indica
tttattcatatttgtgcttattacgtgtgtttgattggccaccttatgcatgatctatgatcttaatacaaaatctgaaaagtgagtaatgctctaaatgaatagacatatattttgatatgaaacgagagtattcacatagcttatatgacttttaatttttttgctttgggcttgatgtggctgttagaagattgtggtggataggaatacggataaatcccactttttggctcttacaaagtaggattccttttatttgtcctgtgagtagggggtttaggcttgaaaaaatattttgatatattaatttggctttgattgcaaaattgggttggaccttggcttcgaggagtaatgctttgcggtgtcaagtttttaagagtaagtacttctctataggtgtcccattttggtccttggtgttgctaggtttagccttcaaggttgcaaatggaatcatgggatcttgagatctcatgcatagttaatgttgtgtgatcctaggatttgtcaactctattgacctttggaatacccctggattccttggatctcttgggatgagtattaggcaggattcaattcaagattggtggaaaaatgtaggatgttcaaccccgaccctggtcatagttgatggtgattggattaacaatgtagtgtttaggatcccaatttattttttaaatacaaaaaagtgtcccaacgactaacaaactaagcccacgtcatctcgaagatttgaacactctaggtccaactatttagatatgtataatcctcattgagctccaaactcaccgttattcaggttttatcttgcctttactatacatgaatcacatatttgtgagtcgacagactcagttgaaaatcataaatcatataatctgacttgtaacttaggcgttcatacatctaatcacaaatttaaccaacatctaatgtgtatgtgtctcaaatgttctagacgatcaacaactataccacatgcacttatattagtacctaaaagtattagtgttggtagtgttgattgcgcaaccaatcactatactatatgcacttagtatcctagaaatactagtgttggtaggattggtagcacgactaacaattgtaccacatgcactcagtatcctaaaaatactagtgttggttgcattagtaacttgactaatcgttgtaccacatgcactcagtatcccgaaagtactagtgttggtaggattagtagcatgagccatcggtataccacatgcactcaataccctgaaagtactagtattggctaggactaaacattttgagcatgttcgacccaaactcgagcaattcttccgaacccgatccggtgaactcgcaattttttttaaaaaaaaatagttcggcgggtcgggttcga

SEQ ID NO: 325940 - DNA, 566 bp, Cannabis indica
ataaaataaaaaaaaatctcacatgcaacaaactctttgaaccctaatttcgtcatgttatgtaaatgaataaagaattttctcaaataccgaaataaatagaggatgcatctatagacctcttttagggatgtattgtagaaacactctaaaatattaaccattttattatacgaaaattgctaagtggtgactgacatcacctaaaggtgtcatatcgctctcgaattcctttaaaaattgaaagtaagaacgaattcttctgtttttcaatcaaaagctttttgatttgttagaaagttttattgtagtttctgattcataatgagattaattaacgatattgggagtcatcagcctattatcccagcacctttaatctgttgagcgagagccctttcacacaggattcctggatcactatggctgacttttgacgtctctgttcgaccagtcagtctcacagtcagacatgcttataccattatgctcatgagcagaatcttagcttgagtctatgttaggttattttttagtattaattttagattaagtttaatatattt

SEQ ID NO: 325941 - DNA, 1342 bp, Cannabis indica
agtagtgagatttgggtgatgaaaataataaaaggaacaattttagggcaaggtattagctagcttaggagcttaaaaaaaaaagtttgaaaaatgaaaactattatgatgcatttgatgtctcacggggtatttatatatagaatgtaaaaataattcaatattccaattttatataatttaaatttaaaattttaattaaattgatatttatgtgaactctatagattaggattaggattcggtgttggattagaaataggtgatattattataataatatatattaaggaatttaatttttaataatataaaataaattttctaagtaactaatatctattatatatattgtacttagaataaattattttattatatataaagccaaataaaaacattacgtatatataatcattttccgattcttttaaaatttaaataaaagaaagtaagtaaaactaacgttttaaaaatatgtacaagtttttattgcagaaaacgtgtgagattgtgtgatattcacgaaaaaaaattaattttaaaaaaaataaatattattttagactctaaatttctgttttgtgaaatgataaaatagagtctgtattttctaaaatagtataaatagaagtctgatttttttcaaaataaaatttaataataatgtaacctaaatgtgttataaaaaaaactggttaaattttctacatatgttcgtgaaaaaaaattatcgaaaattgagttcaagatcctatttgtactattttaaaaaaaaaatacaaggtctattttattatttaacataatagagaatccaatctataactttacaaaacacaaagtctaaaatgatatttactcttgaaaaaataaaactgtttgatattcaggaaaatgtaaaaataaagaaaaaaaataaactttttaaaaataattataatcttcaattgaaactttaaacttcatgagcagcctaaacattgttaatgttattggatgattaaatctttaatgtgacttatatgtataagtgtgtattgctatttgaagtttgatctaaataaagtgatcattttagtaattgtgggtcatatgtattagggtcagtttggtacagctgtgctgtgggaaaaaaacagttgtaactgtactgtgagaaaaagcaactgcagcataactgtaaaaaaaattaagctgagtgtttggtaaattataaatttcaaagtactgtgagttgctaagatctattatataatgataatagtaatgttataatctaatttattataatcatgaatatgtaaaagcttattttatataactatttttatttttttta

SEQ ID NO: 325942 - DNA, 1435 bp, Cannabis indica
tgatcaaaagtaagattttttttttttatatagtgattagtcagctctaaaagttaactttgtcaccaataactaagtagacccacaccaattcttcctagtgagacattttttttttgaagaagtgttctttattaatgattcgagcaagacatcaagtccaaaggaacactgttaatggaaaacatacgttcagctaaagagacagagtgccgggcaacatagtacgcagcacaattcgcagaacgcttaacaaaaactaaagaaacattacttaaactatgtaaaagagtcttgtaatcttctaccacaatgccgaaagctgaagcaaaaacctcagcactacggacagcttcagcacaaaccacgctattggttttaacaattgcgtgggaatgggcatgatttttcagccaactcagggcctttctaacgcccataatctcagccagctcgggtgacactcgcccaaactttaaccgagcaaaggcagcaactaactcacccactgtgttcctcacaacatagccgaacccgtgctttgaagaatgctcaaaaatggccgcatcgacattaagcttgatacctgaaaccggtttgacccaaagctccgaaccatctccatctttgagaggagacaacaaagggatattaccctttccttgagctttcaaccattgaacaagacttgatgtagcaaatgaaaccacatccttcacagtacgaacccgatgcttccaaatgagatcgtttctagcagcccaaatagcccaacaaagcataaccacgctacgcgtggcctccatagaaaccagttgaaacatgtcgaataaccatagctgaagtgaggttgtgtctctactggtagcagccaaaccagcataattccaacaagcccaagcaaaattacaagacacaaagagatggctttcagtctcagcaaagataccacaaaatggacaaagattttcgattagcaccttcttgatacacagatttgacttagtagcaagacaatttgaagtcgccctccaaacaagatctttagctttgggaggcactttgagagaccacagaatcttccataggccattcgaaggagaaaaatctggtgtgaacttcattctttgcaacatgttataagcactacgaacagaataaaagccattcttttcagcaacccaataccacgaatcatcattagccgagggattaagcggtataccaagaataagagctgcgtcttcaggtgagaaaaaatctcgcgcaacatcggcatcccagcttcgataattaacttggaaaaggctgctaacggtgaagttttccaacccctgaacaatcaggtttggtgttggtctgtcaagaacagggagccacgggtcagaggtaatttgcaccgttaaacccgagccaatccttttcctcaaaccag

SEQ ID NO: 325943 - DNA, 764 bp, Cannabis indica
ttttgaataatttacaatgccaaaaaagagtttttaatattttaatttaccacgcgtattcaaaaaatttcaaacatattttcagcactgtaaactattcaacaaatttacagaaataatgttgtaagcataacgaacaccactataaaaaaaaaaaaaatattctagtatatattttcaaacataaaaattaattaaaaaattataatagaaagttcacaatatcactcctctttcattcatgtacaaaaaatattacatatagtatggtgaaaaattcttttaattattcacatagatatggctagttgttttaaaaagcattgtgatcaccactatataattttttattttgcaaatatatcattaaatcatatttataggttgatcccctctagcttttttttttttttgggggaaaggggatcccctctatcttttaatatccccttctaaaaattttgtgtataaaactaaaggtacaatattaaatcatttatcctatttattattgataaaatcaactgaatctaactaatattcctgagcaaagcatctaaaatatgacacccaacaaattttatttcttttgttaattattcaaccaaatctaatcatttgttaatttgtacgtattaacctttcattcccttacatgatttatgaccaaaaatataaccatttataattaatataataaaaactcataccttttttgcattacaaattaaacaaataagaaaaaaaagggaaaaaacaaaaaa

SEQ ID NO: 325944 - DNA, 1043 bp, Cannabis indica
gcattgacaaaaaagtaaaaaaaggataagacaccaagtgtaaaaatctcattacattatttgaacagattgaaaacaagaaaaccttgtaaaacacctaaaaatgattctttccaataataataaaaaaaaaagcctaaaaatgaaattataataatagagattcttttaaaatatttaaaagatcatgaaaaattatctttgtaaatgtgtattatataaaaaaaatatattatttaaatgatatggaaaagataaaaatagaaaaagtaatgtatggtatattttttaagtaagagtcaaaattttttttatgactcactaatgtattatacaaaataaagtaaaaataatattgagagttctctttactatgcatataatttgatatgatataatatattgtttgatttcaatttagaagaaaaaaatgaaaaagaaattttacaaatatataagtgaaaataaagaggagttgttgatcaacaaaataaataaataaataaagaagaggacacatttgggaatttaagtattgtttgttctaaaagaggtcatcctcaattagagatggaaatttataccgcggggatgggtaaccgcggggacccgcccctaatggggtggggattccccatcttagtggttaatggggcggtggtgggggacaatttcaatacccgaagcggggatggggcgggggcggggataatactatccgcaccatatccgaccccgatatagatatatataattttttttgtttttttttttcaaactttgacacatatttagtttttattttctattaggttatgctttttttaagtaggtttattttttatcttctatgaattatgaatgcataataaatatttgtgagaatattagtttaacttatttttttcaattattttaaattaatttgttttttcattttaccttaatggatacccgatgttccccataaccgatgggtattcccctaccccgaatccgttggttattagacggggatggggcggggatgggggtataaatag

SEQ ID NO: 325945 - DNA, 740 bp, Cannabis indica
tttaattaaatagaaaattaagttggaaattttaatttcagaacaacttaaatttgaataattttcaaaatatattttatttttattttattaatcattttattaaatagaaaattattttaagttggaatttttttttattaattaaatggactaggttgcctttttttctctctttgagttgtgtcttcctcgaggcaatttaattttttccttcactaaatctaactatcatatcagaagccaacccaaagatccttttctcttcttaaaactggcggcgagtcgaaacgatggtgatgatggagcttaggagaatgaaatcgtcatgatacctatagattctagagcaggagctatggtcaaaagcaaaccaatagacatccttcaaagtcttgtattttttctttataaagctcgattaagatttcattttcatgcacctatttatctatgttcttccttatttgctcagtttgatatttgctatagttttgaaatggaagatctaggttttcactcccctcaacccatgatcttaacctctaatgaaaatacagtatatactctcaatgatatacctaaagaaactcctaatgacattaatcttcttctaaaactttttactgtcaaacattttagtcattcctctttgatcaaaaatcactctcaaatttggacctcccattgtcattttcttgtgattgtttctgaacactctgtgttggaattattttacc

SEQ ID NO: 325946 - DNA, 610 bp, Cannabis indica
taaaatattcccaacatatataggcatagatggttcaattctgttgtgctagttaggagtcgggtttgttattttcttcccaatttgttgtaactgtaattcttttgtttgttgtaataagtactggtaattgattgggtcaaagtcgttttcttcttgtaatcgttctacgcctaaattaataatttaagagagaatttatccaacaaataaaaatgaatgataaggggtattataagtaagtgaatagtaacaaataaatatagaaaaattaaaataatatgttgtgtaaaatatgtattttagagtagccccaatacttgttattaatttctctattgttcatgtttttcttttaaattattattaatttctctactttctccttaaagctttttttcttattttttttttttattatttattatttttgaaccttcttcaattatttcataatgaccacttgtaaactattgaaaaattatgaatattttataaaatcaaatataaaattcaaatatatttttcacatattagcatttttttcttaaaagtatattagacaactacttaaattttattttttggtacctataaattatttaatata

SEQ ID NO: 325947 - DNA, 506 bp, Cannabis indica
aacattaaatgttatttctgatctatattaataagtaaatttgattatattgaaatgagttttatttagggcataaaacccaaaaaattcaactccaaactctcaaaaaacctccagaatacctgcttatactccaacaaacacaactgaagcaatagaacacaataaataactcaatatttaaaaacaccattagagaaccagcttaagttctctaagctcaatcttgaacaattctcactacaagcaactagctcagcttaaatcaactaaaataaacccatcctaaccctagaattcaaacccaaacaagctgcacaactacaacacctcaaatcataaaaatcaagcaataaacctaacttaagctaaaagaaccatagaaaagaagggtaagcattataccttgaattggatctcctatttctggttgaaaactctttaattgcagcaagaaatcttttccccttgctggttttaggtggcacgagagagagagagagaga

SEQ ID NO: 325948 - DNA, 1207 bp, Cannabis indica
gcattacatgaagaagacatgcacccgaaaagacaaataacaaggacctaatagatctaacaatacaatcccattgggaaacacattctaaagaagagttgactgaattgacaatgatttcagcatcactctctacaaaagaaacgaaaaagcctaattccaaaaaccattttaaagcataagaaatagccaatgcttcagcttctttaggagagaaaaaaccagtcaaagatttagcaaaacatcccaacggaaagccatcagaatcacgaaccaaggctcctaacccaatagtactgttttcaccatcagtagcagcatccacatttaactttaacgaacaagctggaggtgcaacccaaagaaaaacacgtgggcggagagaaaacttagctgtatacttatgtgatttctgagcctaaaaccaactatcataatattgaagtgcccaactcaaaattgcgggagcattcttaattggggtaccatgtttttccttgttacgttcagtctaaatgccccaagctagagtaatgaagacacaaaactgatgtggggaaaatactcacatgagataattaagaatgtcgatgatcttccaagagagactaggtttgacgaaattctaaaaatctgaaagcttccaaacttgaattgagagagggcaaaggaaaatatttttatatattattaatgtatacattttataatttttttcaaaaataatgtttagaaaattttttatttaatttgttgtattaaaaatattaataactgattgtaagttatttttagtaagtttattcttttcatatttaaaattcataatcaatacatttcttattttttgatttattcgagattttctttcttttattttttacttttcaaacttttaagggttgtttcacttcataatttaaaagttgtttgcagctttgaaaattaataggggttgtttggaaaaattatttaaaaataattttttttttgtactaacatattatattttacatttttgctcacatactcggatcttagacccggaactaaactcgaacccgaatcccagggtcggccctgagcataggcgggctaggcctgtgcccctaagcacaggggctcaaaaaaaattatctccttttaaaattacacattttttttttatcaattttaaaaaataccacattttttctaaatgaggatc

SEQ ID NO: 325949 - DNA, 1834 bp, Cannabis indica
agagtattcaaggatttccttgataactgcatcatagtgtttatcgatgacatcctcgtatactctttgttgacctcgcttttggccaaatatagtgagtcttaattgtaagcgataaatagtatgatagaggtataatataatgaaataaacaaagacaaaagagttttcatagaggttcggacacgagcagttctataataacctactcctcttgatttgtattgactgaagaacaaaggatgtgatgattccttttcttagagctcttacaataatatctctgaatatgtattcttagataagttttcgaacctttgcccagtgagagtagatcactatttatatggctataagcttcgagggaagagttttccttatgtttacaatagatataatttgcaagattgcatattaaatacacaatacactgatcaagggatttggacagctttccatatctatgtgatatgatcccaaaattatagagattgatttcgttattcacgatgcgagagttgaaactgctaagtgttggcgttctgttcggattgcttactgctcggttaagaaggctttttccgtgcaaatatatgcggtgctctgctcagcatatcccttgcgagtagatatgtgaagttgattccacgtgtcaccatcgggtgataccatgtcagagtgcaaaatttgggataacatttgcccccaagtctgtacgagacttccaaagttgcgtgtagactttatctgagctgcccttgcatttgaatgggtgacacgtgttatgtgcgtctgttcgcgacttgatgtgaggctgccagacgtctcttcaatttttggctaattaatgctcatgcttaattagtgcctcgaaactcggttttctctcatcacgtttgacggttacacttgattacatatgatttcccaattatttgcttttggaagtgaaccgatgggtctaaaggcattttgaaatgattgcctttttcccactttgcctataaataaggttgagttttcttcacaaatttacttttaccgatttctccactaaacaaactcagagcgaaaagggtttttacttcaagtctgtcgagagatttccacccaaagcatccgagcagcttcgtctggactgaacttagtcgtcaaacagtgagtaagttttcaatttccttcttttttgactttgcatgtttaatttctatgtttcatacacgcgttcttgacttattgtagaaagtagatagaaaatctaggtttgaaactttgtgattttctctgtaataatttttatagctcacggtttatgacgtttgcctttgcacacaccttgttcatctttcaccttgctcattcgaagtttcgtgaactttaactctaaacccaaaaatttctaacttctaagttttgacttattttttaacatttttcattctttcaatctattaagtactcttggtcagcatattttcctgtttcttgttcgatatcctgaccaaacactcatctcgtgtgttgtcttttgtggatgaaccctaatgagttttggggaagcaaacaccgaattgaccaggacttgcttcaacttttgtacgaggatcaacctcgtctttgtgccagtctgtactcttcgagtgacggaatttccaattcgagctttgaagattgggaggtgagtagtgaatgttctcctactctagaacccgtagtgtaacaccactattatctgccgtccaactagacatacattgtccagccaggtgttgccgacactcttcctattggtcgtccaagttcggagaactttggcattccaattgttgttcct

SEQ ID NO: 325950 - DNA, 643 bp, Cannabis indica
ataataactttcatcatcctaaatttgtgagatgttccaagagagtaaatatattatactatcaagatttttacaaaaaaaggatacatttttgtttttttaaagcggtgacatgacgttgtaattattctatcctattttttttttttccttttcacatttttaattaatattaaatattaattaatctaaaaaaaattataaaatttaaataacagataactagttttttttctaaatttgtgagatatttcaagagaataaatgttaatttttttagaaaacaaaataataacttccatctttctaaatttgtgtgaaattccaagagaacaaatatatcacactatcataattttttagaaaaatgactttgtttgcttttctttaaagcaaaaaaaaaaaaaaaaatagaataacttaagatcactcatcacttataaaaaaaaatatcacggttttttttcttttcaaaataaaaaaaaaatagaacaacataagaaaacaaaataataaaaaaattcaaccagatatttatatctgataatttatttggggctcgttggaacgccgtataggtcgtattgtattgtattgtattatattgaattggattatacatcatatttttatataatactat

SEQ ID NO: 325951 - DNA, 662 bp, Cannabis indica
tttggtagtcattacagttaggcgtcaactgatgtggtatcctcataaagataaagtttttgatgttctaataaacttataaacggttaccttttgtagttgttgactctatctttaacattgtgttgcctttttctcattgggcataaccttgtgtaggtatcctaatacacctgaagaggacattgctgagtcatgtcctgtatgcagggaaaattgcaactgcaaatcctgcttgcgcttagatgtacccctgaaggtcagttccccattttttgcagtccgcacatctagtaaatgctaaagtagttgattttacgagtgaattttcacaacatttggttgtgttgctgcagaaattgacgaagaaggaagttaatgttagcaaagatgataaaattgagtattctaggtatttgcttcatcaacttcttccgtttatgaggagactaaatgctgaacaagtaattgaaagagagctagaggctaaaagacaaggtatatcaacttgattctttttctcccattcttttctattagcggacattgtatcaagtccgtttcaggtcatgtgtgtagctctttgaaaatgtcaagagagaaacaagtgcacaattgttgtttcacttaagatggaattgaatatgttggttctttgtttt

SEQ ID NO: 325952 - DNA, 1510 bp, Cannabis indica
gagtttctcttaagtacctacatagtaactcaaatggtcaaacatgtagttttgtgttatgaaattcgcgtcgagtttctcttaagtacctacatagtaactcaaatggtcaaacatgtagttttgtgttatgaaattcgagtcgagtttctcttaagtacctacatagtaactcaaatggtcaaacatgtagttttgtgttatgaaattcgagtagagtttctcttaagtacctacatatcaattaactcaagccttcaaatattataaaaacattacccgagtgaacggtaactcaaatggtcaaacatgtggttttgtgttataaaattagaattcttttcgagtacctacagagttagatggggatcctagtttttacattacaacttctaaagtgcatcaacatctcaaatcagttataacatatttgttatatatgcagaaatatcattcatgggagtgatggaccagagactgcaaaagatgaaatcaatctatggttcaaaccagaagagttggtgagttacacaagcaattcagagaagtgggtctatggaaacaactgatgaataattcatttttcttccaattaataatgattattactacacattttcggctatgctaagctaagtccacatgaagagtagcaaaataagttttcactacattgttacaattataataatgataaattaacattgttgctttatgttttcttattgaattgagttgagccaataatgtttagaattggccaagtagaatctctcattcaataatttcatatggttacctctttattcattacataatctcatttcactttctttttatttatatttatattatctaaataaaataatttatattgttgtaattctaatttatatgttgtaagatgataataataatgaataaattaatacctctaaaaaggggggggtaaaggaaaagattttttagtacaacaaggaaaagaaaataattagacaaaatagttatatgttttgaaaaaaagataaaatgattggtaaattttaactctctaatttttattatcatgttcatcattgataagtttcatgaataataaacataaatttgacgaataatttgtttagttttagattattgaatttacatttttactttagatttcaaatgtttttctttttctataaagaattcaagtgataaaaaaaattgttcgggtcaacttagccaacctgaacccgcaaacccaaaattatttcacgagttgagttcaagtacaattttttgaatctcaaacataatcaacctgctcaatattctgtcgtaactctaattaatagttaatctttttcagtagagcattgttatgaggtacttatagtatctaacaccacgatgaagtatcactctataattagttaataattttctataatatctattaaactaaaataagtaagacttaatatttattttttttgacgtggtgaacagagtcacacatgattaa

SEQ ID NO: 325953 - DNA, 1004 bp, Cannabis indica
ttgaaaattaataatttttagccaaatttctaaaaagaaatatattaattgcttaaaatatatcgataatcacaaactaaagtgtccaccgtaacacattatttttgcatcaaacaatcaaattttacaattttacaacaacaaataatataaagatgttaaaaagtaagaatatgagtggagactacatagtcaagattaatcaaaataagagagtggctatgttaagttgaacgagaagaagccacaaattttttctatgatttatagattttgaaaaatcatcaaaaattatttttaataattttttaactgcttaattgtcattaaattaataataattattaaacggtgtcaaaaaattaattaaaaatgataaaaattagaaattaaattataatcatgctaatcgtcaaaaaatgacatcggacggcagcgcacgcgccccaccatgtcgttgtcgagagtggacgttgctgggagagaaggttgttttctaaccttgtaatcaggtttgtaagcgggccgacgcaacccaactccgtgcgcaagctagtcagagctgttttctaaccactcgaaatggacagaaagaatggggttttggtatcgggagttctgatttctaagaaatcgccaatgttaatttcgagtaaaatgtgtaaacagacactagatcaaattaaaacccgtccaagaactaagaacacggttgaactttgattttggtatattattctcatacaattcgaaaaataaattatgtaaaaacattttaaacttgtgggtaatgagatttgcacaattaattttaatcaatagtcaataaaatcaaaaaaaccccaaaattaatttcataatataattatataaactctaaaattttaatcttaaaattctttcaatttactcaacaattttatgcaaataatatatcaaaagcaagagaatttcataaggaataaaacccctaaacttttaagattaaaaataaaaatttaaca

SEQ ID NO: 325954 - DNA, 1165 bp, Cannabis indica
tgacgacactataatcataaaaatatatatatttacatatatactggacttaatagaatttatacattaaacataatcataaaataaatcatgtgaaccatgcaacatagaatgatttctgatcttatattaattagtaaatctgattatattaaaatgagttttatttagggcacaaaatccaacacctaagataagcggcaatatcacgaaagtataaatgaaaaggtagtacggctccttgatcgatgtggtactctgaccaagccatccaattgagagccaacctatgcgctagttggtctagaggaggtatcttacaatggataccgcccactagcccattagcttgcattctctcaaaattgtcttttgagagagattaaacaggggaattccacatgtctccttgtgaacttgcattgagaattttaggctgaagggattggtccaagccgagtaccgaaggctcaccgagcctgttcaacatattaccatcgctatcataatgacgtaaaggacaattggaaaggatgacacaaggcatgcgtctcttcctcttaactggtacaactttctcacgattgaactcagccacgagtctctcattctcttggttagttttggagctaacgtcaacatgaggcaaggttaccccttcgacaatcttgatatgaccctgtacaaccaatctggtcgtatgatggttatccggggtcactctaccattactctattttgtatcaaccataactacaaggtaaataagagacctacgcatttgtcagctccccaatttaacactcggcactacctgcatggagggaataaggggaggtaagcaacctgacaaagctacaaatatattcaagtcaatgacacccaagggaatcttctaggtaaaataaagtgtagaaggtcgacaatcgaccaagtactatcttagatacaatcactaagacatgcagtgagtcctaagttgtacaattgactaaaattgtaacaccctggaattaagaaatggattagcaaaaccctaattaaataattatgaataatagaggaattatattattatatagttcaatatatatgaattaatatgaattttaatatgttaagaccccgttggtgagctaggggcattttggtaattatgacccga

SEQ ID NO: 325955 - DNA, 578 bp, Cannabis indica
tgaattagtcatcctagtcattcgagtgactagagcttggaaacgattactctcagccactacatcggtggcaatcacgcatggattcagaaattcatagactcgattcggcccacccatgtccaacaaactttctttcaggtttttagagtttatcaaacatttagggtttaaaagcaagtttttggcttagacgcaacataggtttttagcctaaggttaaggccttgatataggaggcgtcaaaccctgtgtttacaattcaaatcccttatattattcatagtttttagatatttacaaaagtccaaagttccattgattatagatattattcagtattctattggggttttagggcctaattccctacctatagcctgttgtccatgtgtagaagtgtctaggaaagtgtgtcatgcacctctaggccgaccaggcccttttggagtgttgggttctgtgccttaagtaaaatccatttcaatataattagatttactaattaataagatcagaaatcgcagtttatgttgcatggttcacatgatttatttcatgattatgtttaatgtata

SEQ ID NO: 325956 - DNA, 1656 bp, Cannabis indica
cgttgtttcttggacttccaagatatgagagattgaccaaggaagacacaatagccagatatggatcgtcttatgtcttggaaacctccccagacagcatcaacaaagaaagataattgaacattgtctgtagatagactggtttttgtataggctgacagggttggggaggagctggcagggaagaacaatccttgacctggagttcttttgaggtatttgaggatacgaaatgcagcttgttgatgtggtacccatggactggtgagaaattgactgaggtgattaattgcataagatatgtcaggtcgtgtgatagtcaaataaatgagctttccagttaagcttctatcttctgtgggatctgagatgaaagcccatttgtctttgcttagttttggatttggctccataggtgtggaggctggtttggctcctatgtagccagtatctcggagcagttgaagtgtaaaaggtctttgagatatagagatgccctgttttgttctggttatttcaagaccaagaaagaacttaagggaaccgatgtctttgagtttgaatttgttgtttaagaattgtttgaagtgaattattgctgaatcatttctactggtgacaatgatgtcatcggcatagattaaaatagctacaaaaaaagtgtgagttcttttaatgaataatgagtggtctgatgacgattggttcaagccttcactaaggagggtggtgctcagtttagcataccgctgtcatgaggcttgttttaggcaatagatgcttttttgtagcttgcaaaaaaaattgggtggtactttataacctgggggaattttcatatagacttcttcatataggtccccatgaagaaatgcatattgatgtcgagtcggtgaacatgccagttgttcattgtagtaactgcaagtagaatttttaaggtattgaacttagctacaagagtataagtttgtaggtaatcaataccatgttgttgattgtaacctttagctactagtcgggctttgaatctttctactttccctttttcattgtatttaaccttgtatgcccatttacagccaatagctttatgcctggggataatttggtgatgatccaagttttatttttcactagggcctctatttcattgtccatggcttccaaccaatgtctgaattgaaaagctttagcataggactgaggttctagatgagaaaatgcagcaagaacaactacttaaaactgaggactgagcttggagtaggatatgaatttctatataggatgtatggtggaagctatatgacaaacatagttgtctaagtgggaaggtttgtgagatgtacgaccagttttagttctcgtgataacacttttattatgtttgttaattgttgcaacattgttgtcgtttgtagtgctggtttcagccttttgatcttttattgcagtaatgttatcacttgtagtgctggtgtcagcattttgatcaatttcattgctggtgacaacagtagtatcaactttggtgctgattgtaatgtcattgttggaatatcttttaccaagatctagattactaacaagtatgtttttatatcctaaatatgaatttctaaaatgatgaaaataaaccttacattggttgca

SEQ ID NO: 325957 - DNA, 1140 bp, Cannabis indica
taatcccttttttattatatactaatttaatttaaataaatattttattttattaaattatttcaagagtttaaattcttactagtaattatgatataattttttacaattatttaataaattagcaattttggataattaatattattatataaaatgcaagatcttttaagtaaaatatatttatttggtagaatatttagtgtaaatcattggagttgttgtactaactgcaactccaataaaatactaaaatgtcaagtttaatgagattttacactaaatttatcccaaccacactttaaaacttaccgtatttataacattatctatagtgttccactattattagtgtgacactatagattacacaaaatattttttttattagtttttaatatttaaatattatatttatacttaaacttttttgtatatttattatttgtatttatttataatttaataaaataatataataagaaaaatatgattttagtgtaacttttagtgttgtgattggaatggaaaatatttagtgttaaaattttattatttttttattgatttaacactaaatttaatatttattattggagttgccctaaaaattaaatttttttatactaaattgatgtagatttatcatcaaattggtataaccattaaacatgatctaagtatatacaaatcaaataaatcatattatattacgtaataatattagtcgaaaaaaaaaaacttcttgaattaacattaatcgctagtataagtcactaaggttagtttagtggtgagagaggaaagggaaaaagagagaggtgatgtatttgaacccaacacctataaactattagttaccttcaatataagtttattgttcaaaaaagaaaaattattttttcaaacaattaaaatactattatctaatgtgaaaaatttcaaaaaacaaaaaaaaaatactattatcttattaaaaaaacatatatcaatttttttgagttttgagaagatttagtacatgcatcacgttagtaaaattgaatttagaaaaaaactatttgaattcaaaatttttaggagaattactctatatactgttttttaattttttttttcaaatttacggtttaggtttct

SEQ ID NO: 325958 - DNA, 533 bp, Cannabis indica
ttttacaatatatatttatatatagttgacacttttgaaaacaatgtcgtttcctaagtctttaaacattttaaattgtgtgacatatatatatttatatacatcgatctgaaataatcagtatttggatattaggtcatcacttttttggtctttaggagcaaactactgacattattgctgactctaaaagttgcccagatgcacattctgatcatatatatataatgtatgttagtggtttacacatagacaatcaatccataaataataagttgtttgtttcaaataaagtgaattaacaataacatgaataatgtattaagttgttattgagcagtgagttcatcattcaggtaaatatatatctttttattttttatttttaaaattaagtctaaataaagatttgagttatataaatatatttatagaaagtgacatccgtattggatatatgcataaggatatcatcacatataggactgggataagttgaaaaatatcttctttttcttttatctattaatcta

SEQ ID NO: 325959 - DNA, 2489 bp, Cannabis indica
tgtgtgatttcctgacaaaaaagattcaattttaaactttgttgtgattcttaactctttaagtcacaaagaacatgtttgattttttgaaaaacatatattttgatccataacacaccctggctggccataggggtcttattcaagacatggcttgccatgggcttttctcatgggagattcaccctaaagtctggctggtccatatctgggcatgggatccctcgccaactcttggctaggtcatggaaccctattcgaccctctcttagcttgggaaccctggccggccaaggcctaggttccaagcggacgaccaattttttgtcctcttttgacattagcaagagtttcattaaggccttgtagtcatgtacaaccttagtctcatatgtagtttccttaaaaactctggatgatacttaataatgagtttattatagtcgaaagtacaacttaagactcgccatttgtctaagtcattatacttgagatggtactttgctgatacccagtcttgtacgatgcaattcatttctatcacagggtgtaatcaagaatagaacctcgaatctccttcaggatgtgaaagactacagttttccacactaccttgagtgttgccttgacatgtgtgggcatgttctcaaaattatggctcacgaaaactagagaacaagaacaaaggaaaactgtttgtatatactataatattataactctcaaaacctcacttatctatctagaattatatgatcactctaagttgtatacactatatatataagagtatatatgtatgtagactagagagaaaagaaagaggaattcaaaaattcctatagccaagtgaagagcagtgaatgtgataatgagaggtatgtatgaatgagagctattgaggaatatttatagtattttcttagggttagaattagaattaaatggaattaaaaagaaataaaatgaccttttattactccatagcccaattctatatagtagaagcccatggatttcaaaattgtcattttagttaaacttatcttttttctcaataatactatttttctattctaaccatttaaatgttaatttttgtctatttaataattataaataattatcaaataaaattaccatctatcttatttattaattggacttaccaaagtctcttaattaacaaataaactctttatttcctttttcttctcaaatttgtctttgcttagtgaaaatcataaataagacatagtctcatttagaattctaattgattaactaaaacgaattaattgagtctacaagggaatactctcttaggtagtgtcgggaccatgtgcatatataatcaaactcccaataagtagttctagaatttactaagtaaatttattatcttattaattcctacggactccactatagattcagaattgctctcttgattacatagaacactctattctccaagaatacatacgctattagttgcccattattttaatctaaatactcaattatcctctataaatgatctacattgaatagggactaaattatcgttttacccttcaatgtattttatccttaaaatacttagctacttgttcatgatattttaaaaattaatataattaccaaatgagacctcaatcatttaaacgcgtttagccaagctctaaggaaaccacatcatttcactactatgtacttaaagaagttatagattctatatctatgactagcactcccactcaattgtactatcctgctcctaagatgtaagtattgagccaaacctacaagtaggcttcgaacaaacaaatcaaagaacaagaataacacagttaagtcagaacttaatcatctcaagattaaatcattgatctaagatcaactattatagatttacctagaaaagatattatattaagtttacgatatctcttccactgtaaatatcggtccagtccgatgtatggccaatacatccaatgctaatttactttactaatttcttggaaaagatattccacttatccaagagtaagtaaaccctatcgctgactatcacgtcagtgtaaatctagtacactaataagtcatgggactaaataaattgaagcatacaatcacaattatttttcactgtgataacatcactataattgtggataactatatgtttgggatttaataaaatttttattaaacctataatcatgcatcaaccatgtgaacaaagattatgactgagtcatgatatgatttatgatctttattgaaagtaaataagattacaataaaattgaatttcatttatggcacaaaatcccaacatagtcccacttgcaccattataaaactaaagtgcattttaatttaatcttttatacttgatattttgatcatatgtagtgtttggcataaactgtgtaataggatatgataggttgtatttgttggatttattttactaggat

SEQ ID NO: 325960 - DNA, 817 bp, Cannabis indica
tggtaaaataattccaacatcacatactaagcttaaacaaggacatcttcaccaaacaacaaaagaggaggtcactggatgaggtcagatttgcagccttgaaagaggaagtgagccttttggctattaatttcattcgtgaagccttctatcccatatgagtaacaaaccctgttttggtttcgaaaccaaacaaaaatgtgcggacatgtattgacttcactgaattaaacaagacatgtccccaggattacttcccgcttcctcgcattgatcaactagtagatgctactgctagccatgagcttatgcctttcatgggtgcatattctggatataaccagatacccatgaacgtggcagacctggagcacacaagcttcactactgacatggagctctattgttacaacatgatgccctttggattgaagaatgctggtgctacctgctggaaacttattttattaggatctaaatttacatagacttcataggttaaccaaaggcggtccatcaaaaaatatcaccttgggtgaattacgtatttttgaatcttgcctagaaggaaaatgactaagcgttctttctctacgaagggagagggtgctaaagaactctagggttagtacattcgaatgtctgcagacctaaatgtaaaaggcagaggaggttatgagtactttatcatttttattgacgattgctctagctatagttttctttacctgatgcaaaacaaatctaaaacatttgagaagtttcaagaatttcatgctttgccttaaaaccaattaggtaaaacattaaagatctt

SEQ ID NO: 325961 - DNA, 1149 bp, Cannabis indica
agacccgtgctgtgttccaaaacttgcaaacttgactgaagaaatgaacctagttagcagatggccaatcgcttttacatgatagtaatcaaggaatatgagtactcatagaatcaagaattaagtatagaagtaccaatgagagatacatttggtattttatttacatatcttatgtagctaggccaggattaagctagcactaattataatttaattgaatattggagccaaccaatctgaatcactaattaggttaaacaaaaaccacacatcataaggccatagtgttgccaaccaaaaagctcaacattgctaaagataaaattcaaaaggtacaacgtagttagtccattctacttgggaataagaaattgcaatctcaaattttgtcatgtgaatctcagatgttctaaattgtttcaatgaaatacccagcagttaataagggtcatcatttaacttataatacatacataatagtaaatttatatggcctaacaattcaaaatccaagccttattcacaactgcagcaaattagatatgactataatcaacataaatatactaatccaagcattaaatacataattaaaactagtataccactaaccttctcaagatttggcttagttcaggaaaaacccttccaaaactattgatacaatgtagttcaaagctaccaattgttgaccaacctcactcaatgcctcaaaacatactctatattacattcaactgcatattcaaagctcaaaaatctttgtctacttcttctttctacttcctcaactatttcctaatctccaactcaatatctcattgaaacattttatcaaacactttccctgcattgaaaccatcaatttttagagagaaaagcacacacacactttaagatatgtataaagaaagatcataacttttcttattctaattcctctttgttcctttctacacaaacaaagcaccaatcaccaaaagcattgtgataatttcagatgagaacaatttgccaacaaaatttcgagtcaacagatttagttaagcattgtgattttagtttttgtttaacctttgatatattctcataaaccccaagtcaaaagatttagcctttgaatttgatatatacatatatatatat

SEQ ID NO: 325962 - DNA, 962 bp, Cannabis indica
ctaggtatataatactgaggagatgaaaatggtgaaataataaatatgtttttttaagagaaaaaaaataaatatggttaaacgtacaagttggattcttttaattttaatattattattatatatgatattgtatttataattatgaagcataataataaatgtaaagagtggtagctaggtttcaaattcaaattttaaaatcaatccattatatatgctttattaattagtgtctctattattttcttaactttgatgtaggtaggatcatttttttaatttaattatttattcaaaatgtaacaactaataagaattattaatggtattaattatttgttttcttgtttttaatttgtatttgaaaatagttaattgtattaaaataaaacttgttcaaaattaatttatgcaaggtcatcaatcattcatataatccatttagtagaatttgatattttaatataaaaataaaataaaaaagaataaatgaattaagtgtgggaatggagtggagggtgttgagggctaaaagaagtcattaaaggctgtgtttactgtttagtacagttgggttgggtgccattgtctagcttttataaggggcacctaacatttctctatctatttatgattacaagtaaataatctcttacatattaattttattgtccctacttaatttattgaactaaagattaatgaccaaaataactccctctactttatggatttttttcttttttttttggggttgaatattcatttgaaattttgtgttttattattttttgtaaaaaagaaaatttgtgttttattaaaatataaatttagtacttatgtttttaataatgctcctttagtatgatgtgtgtttgtctaaatacttacagctcatttggtttggtgtaattaactttggaatggaatgaaagtttccattccaatatttagtttat

SEQ ID NO: 325963 - DNA, 941 bp, Cannabis indica
cttcaatcaaataactcataagccgccaactatgaagcatcaaaataatatgaagagtactaaatataataaatataataagttactatagatgtaacacaatattgaaatgtttgacaaaataaaagaattaagatcatgttaaaaattagtgtcacataatgtattaaaccaattttagtgtgacaatttaactaactaaatttatattattaaaaacttacttttctactctattaaccatctaaacaactttttttacttaaatagcttagattaattaatgtgtcataattaaattaaatttgtatacactaagagacacatatattaattcaaaacaaacaaagatagtataatattattcatatttcattatttcacatggttatggttaactcaaaatttggtcaactaacaacggagccttatttacgactgacaatcaccaagtataaattataaaagcaaataataaagttgacacaatgattcatagaggttcaccccccttgtttagcgggtaatgttatactcatcttttagttgtatttatttttgagaaaataccatgcaaatcacaagttaaaaccttgtgatttctagctatggctttctttagtattacaattgtgagaacaatgtattttagatgaagaattgataagattctatgaagaatttatgaaggaagagaggtttaaagtctaggaagccttgatggcatacgagacttaaagggatagaggtttcacacgtgtgggaggcttcatggagcatgagagaagacttgtgcttgtggaatgacttagcctcctagagagtgatctaatatcctttatatagagtaaggcttacaaagatcttaaaccaaataggtaaagatatcccttcaaaatagggattttaacatctttttatctattatttaaattacaaaa

SEQ ID NO: 325964 - DNA, 1477 bp, Cannabis indica
aatgtctggtcatactatagacatatgctttcgaatcattggatacctacccggtcacaaattacatggaaaatttccaaatagaaatgccaaaggacctctaatgaagtctgcatctactaatatcataggggggaggaatagagatctgagaatacgaatggtgaaaaagacttggtggcaggattgtcaagttcacagtgtcaaaaactaatggccatacttgctcaaaaggttgctaacaatgctgctgcaccagaaacttcacaagatcagcctgtcgtatcacatttttttggcatggaatctgtaatccctaattccaattggattatatatactggagctacacatcttgtatgttctaatctttctttattttagaatattcatactaatcccaatcttaaatctgtccttttacctactggtatgcatgccgaagtagattgcataagaacaattatgttgggacctgatttggtccttaaaaatgtgctttatgttcctactttcagatgcaatctattatctgttaacttattaacagccactactacgtgcacattctctttttctcatgaaaatgtgtaattcaggacactatgaagagcaaggtgattggcatgggcaaaaagtgtggtgacctttattttcttaattgcaatttgtcaaataatgagcaatctagtttctatttatgattctaccatttccaatgaaattgtatggcactacaggttaggccatccatcatgtgtaaaaatccatccgttgaataaagtcttgaattttcattctcattctaattctctctttcattgctctatctgtcactatgctaaacaaaagaagttgccttttgcatctaatcataatattgctgagaattgctttgaacttatcaatattgacatatgggggccttttaatactatgaatactttcaagtattatattactattgtagatgattgttcaagatacacttggatacatctcattagatagaaattcgaagcccaaattgtcattcctcaattcattaggctgggtcaaaataaatttaacaaaactgttaagggggtaagatctgataatgcaaaagagctacaattcaaaaccttgtttggtgagcttgggattaggcattgtcattcttatgttcaaagacctcaacaaaattctgttgttcaaagaaaacaccagcatttactcaatgtggctagaacacttctttttcaatcctatgttcctttagtttattgaggagagtgtgtgtcaactgcagtctatcttattaataggaaaccaacacccaatctaaagaacaagtctccttttcatactctctattccaagcacctgtatatgaacatttaaaggcctttggttgtttagcttatgcctcaaccttaagtcaactaggtctaagtttactcctagatcagtgttgggtattgtgccctaaataaaa

SEQ ID NO: 325965 - DNA, 1352 bp, Cannabis indica
acaatctaatctcatatatcaaccattgtaacaacccttacagcaacccaatctaataaatcaagcatcttagcaacccaatttcatacaataactatgttaacaacccttgcaacaacctaatttatacaaaaatcactttagcaatcattacagcaacttctcataaatcaatcatgttagcaattcaatctacatataaaaactatgatagcaacctttacagcaattcaatctcattacaacaatcatgttatagtaacccattcaatcttattacaacaatcatgttatagtaacccttacaacaattcaatctcatataaaaactgtgatagcaaccttacataaataagacatatgtataattattgagtatatataacaatacaattttgtatatttatttatataaataagatgtgtataattattgagtatatatgtaacaatcacatggaatatagatgactatatataaatataatattaaaatactcatgcataaattaaaaaggattagataataaataattttatagtatattgcactgctagctttcttttaatacaatacatgagtataatgaaggctaaaaaatgatagtattattctcaaactttcatcattgtaacattaaacattgccagttttctttgcttgaccatttttagccttttcagctactgcttcagtgtcctcattctctcaaaaagaaaaccctaaaaattaatcacaaaactaaaacagtagtcatcaaatactgtaaaattcaaatttcatgtaaatagatgattcttgaaaaacactttaggtactcaaatacaagcagttaatgtttatgagatgaggctcaaataatgaaatcacagtgaatgataaaagtgataaactaacctgaaatgtaaaattcaagaacaacagtaaacattgaagatgcccaaagctccttgaggttgtggtgttcgagagcagatgtggtccaaagaacttggtccaagcaaaggtcgtcaaagcagagcatcatccaaaacaatagcagaaagtggttcaagagagcagatttcgatttggctggtgaagcttttagtgtgtggaagaagaaaagatggaaaaggagaaagtagaaaacctaaaatggaatataaaattttatgaattagtatttttgcaaaataaattttataaaaatgcaaaccatataagagaaacgtaaaaaatagagaagaagttataaaagaccgtatcgtggataatttcccgagattttttctattatagaccaaaaatagatgaaatttacatttatggccctaaaaaaggaaataaacaaaagtggaaactaaaaagt

SEQ ID NO: 325966 - DNA, 1488 bp, Cannabis indica
caactcattatataagtaggaattgcttggataatggctttgagtagaacttcccttcccgcttgtgagaaaaggctggctctccaaccttgaagcttggttctaatctttgttctaatgtcctcaaaaacttcctttttccgcttaccaatagttgccggcatccccaagtacttggtgtggcaatctactagtttaactccgagcaccgccgctagttgctccccttcttccttcttaatcttgcagccgatacaaacttcagatttggtgaagttaattttttgacccgaaagcatggagtactcatccaagacagctctcaatcttttaccctccgtctgatttgcatccacaaatatgaaactgtcgtcagcgaaaaataaatgggataacttgataccttcttttccaaacttaagtccatggatcatgtcggctctctccgcttcttgaatgaggcaagatagaccttccgcacaaagtaagaataagtaaggagaaagagggtctccttggcggatcccacaatttggttgaattcggccgcacacttccccattgatgagtattgagaaatgaaaccgaaagtgatacagttcatgattttgtttacccattgttgttcgtatccaaggcatatcatcattgcttcaatgaaccgccaactcactctatcataggcttttgacatatccagtttgagggccatctctttccattcccaaatctccttcttcatcaatggttgatgtagctacagtcggtgtgattgttgagtatattcagacacagccgtgtaacgtccttccccacaacatcccaatggtgttaataaaagaggcttggcattccatccattccaggtgctttcattgcattgatttgggacaatgcattcagaatatccgcttccttaaactcggagagaaggaattcgttttgaatcctactcactttacagggaacaaatctttggagatgagccaccatatcaccctcataatctttggccgagaatatctcttgaaaatggtcacagatgttcttttcaatctcttcctttgagctgatccacttcaaattgttgtcaaataatccccgaattctatttttttccgtcttgaagaagctttttggtggaaatacttggtattcctatcgccatggtgtagccaaattgctctgcttctttgtttccaaaaaagttcttccttagccaaatgaccattaagatttctttcaacctccttaaggcaagagaagccatgatttgtttggtcatgggagaacttttcgagatcttttttcaatgcttttattttggcttggttgtcccttctctggttttgattccattgatttaaccaaattgccacaaatctgaattttttccccaaattctgtagccgatccactgaacagccttctgccaactgtcttaatgatcttttgcactcatctacatcagcccatgcttttcgtaat

SEQ ID NO: 325967 - DNA, 2189 bp, Cannabis indica
ccaagattgcttcattttgttcatactgcaaggctcaagcatacttttccctagctttgcccgagtctccagcaagatgtggacccccaataataacctgaaaaatgcatgtccactggtggaggcattaattggttttgattattgtatgcctgagcggccctttgatctagatcagccttgccattttttgtaggtgcgagttattctttctaaataaaaactcaatttcccgctacaaattattacattcgtttgtgttgtggtcgtagtccgcatgaaagtggcaaaacttgattgtatctctctttcttacatcctttttcatgagagattgttccttgtacgacaccatagactgagttgttgcataaattttctctatgtcgtctgttacgactgagagagtagtaaatttagaggcattttctccggggtgctactcagcattgcaagtaaattttcctttctttccattgccctatcttttgccgttgctagagctcttcccatttgaatttggactgctaggatattgtggaatttggacagacatccctatcgtcatggcgcgttattgatttttcttttgcccgacagtatccccgcgccgtatagcttcttcaaacttaataaatcattctattcaatctagaaattcagccattgatcccacagttagccttttaatatccttccataactcttcgagaggctcaatgccacccagtattgcagctagtcttccttcttcagtcagccccttaacctttgtagcttcagtcatgaatcgctaatataagctttgaggggttcttttggcattttctttacttctaccaggtcttccaagtgtgagggaagctgacgagaggaagaaaattgtgcatggaactatgatgagaaggcattccatgagttaaatcttcgtggaggaaattagaaatatcattgctgggcggcctctactagtgtggcatgaacgattatgcaccgtacatcaccccttaccccttacagatctatcttcatctcaaaatattttagtcgagataaaggatcttcttttcctgtatacattttccaagtttgcattttgaaatttaggggtagttcaagaactttaattttaggcaagaaaggtgatccaattgcccagtcgagtcgagattagtgagttttgggctggtaaggccttgtaccatatctttaggttgatctatttttacttgcacgagtggatgaacttgttcagcttactgaccggcctgtgtcacattgggatctctttgaattagatcttgggtacggatacatggttggacagttggtggaacattttgtctgcctaggccccttctgcgatttaggtcagttctgaggttatgtgaggtacccaacctatcaaacactgccaggtggcctcggttgtggacttatttggccgataggttggcttgagacttcagtaatggtgaacttgttgggatgtgtaattcctcttaaaggatggtctggcaagatttggtcatctaccctttggcccacagtttcgaaatgtggccttggattggatggctcgccattgtgactttgtgcagtatgcccaactgcatacccttctgatccgttcaagggaatactagctgcagtagctggttgttgattggtgacttggtaggcccttcttatcagtacggtggcatgtctagtacaatcattaatggctgcctgctgtgccctcataatttccatctctcggtccctccattctatgaatcgacgtctttgttcatagaattcaaggtttatggctgctcaaaggtcctcccgatcatgatgcagagtattattatggccttgcatgtgtccaagagcttctcgcagattttagagttcaatatcgtctcctgctggcctttgagaattggtagtggacaggacctcagtgatgtgagtggtttgatcggttgcagaactggtatttccagtctcttgtatgtttggtgtgattccaacgaaaagggaagtcactccatggcctacagtaggagtttgtgtattaacctgcttggggtttttccctggtggtcttctcgtatttccatgagtttgcacgttgggatatatcaccattgggtcgacctgatcggcaaggtctcccctacgagtttgtacaaccatcctgt

SEQ ID NO: 325968 - DNA, 2082 bp, Cannabis indica
gttacacctaattaaacttgatattgactactaacattttaattgtttggtgcatatgcccttataatatcacattattattttcatataaagtaattaaaataatggatactaaaataagaaactgatcaacaggaaaaagcaaaaataatgaagtcattaatttaaaattaaaaataaaataaataaaaaacgttgtacgtataccaaattaacattttatcaatatgtatattatatatgacaaataattagttatacaataattaaattagtgagaatttgtatttaatttatttttttaataataattaactatttcacacgattacaactgtatctatacaaatactatttttttagtaataaataactcttttttatgattaataaagtaatatttagtaataaatattatgtttaatgtgattttataaaaaaaaaattaacatttaattataaaaaaattatattacatactaaaaggatattatatatattataaaaagtagtttttttagtgtatatatacgtacaattttgttttaacaattttttttttttctttacaattgatataaataaataaataaatttatcatattaacaataatagatcacatatattactatactattacttaccaatacatttagagacattaaagggtgcatgacaatccgaagggagtctcaaggcaagagtggtattgatcttgagtccaaggttagggttatccttattccttatgagaacacacatgcattttgagtacttatttattacatccttgaaccctacacaacaatccggtgtcgggtttttcgattcaccaccaacgaacgggagacacgtcgctaaccctaccaatttgtcaccacattccgccttgtcttgctcgaaatccgagcttccaaaccctaccaaacacaaaactactaccactacatataaaaatatgtagttgtaataatttggactcatttttataatataatgagtatgagaaagaaagaataattgaaagagaaaaaaaaatagtatatatatagctaggtttacttgttgtagagggtagaagttgtttatatagatttttttggttgatgagatagaattgagagtgatatgtataaataatattatatgtgtgaaaatatgattaattcattatatcatgatgattagttgtcaatttatttattgaaaataaataaatattaatgatatatagtatagtaatgaaataaagcatatatatctttaatgttgatgaattattataagatgatgatggaatatgtgaaattggttataatcaattcggtggtattcaatagtgagttgggatatttggttgtgatataatcaatttagtgggacacaaaagtagttggaaggtatacccatttattattgggtcactttaaaataatttatattttaaccaaacacagtgtacatcatggatggagactacctagcttataatactaaaacaaacaacatcgtattacatcgctgttagtataattaattattggatcccatataatttaatataacaacatttgaaaaaaatatcgctaaaaattctgaaagtagtacctcataatagtagtgcctaataacaacgtaaatatatatataaaaaaaaattaattaaaaaatgcaaaaatttaataaaagaaagataaaaaaaatattgtaccctgaaagcagtacccgatcttgagccacgtggcttaaccgatgttataggactacaaagttcgagaagttcctcgtgagggctggtatcagtatttataaggtaaaatgctataaggatattgttaggaccgtcgaatatcatctatctccacattgttatgatattgtctactttagacctaaatcctcacgaatttatttttggacatatttccaaaaggtctcattccaatagagatagtatttatctttatatacccaagatctttctcatttctaactaatgtgaatttttaattatacacccaacacatattattaattttattgatgttgagaatcatggagttccatctcaaaaccaattg

SEQ ID NO: 325969 - DNA, 1023 bp, Cannabis indica
acgcatgtacgccatgagccattaggctttggcacgagtactgggttagctaaccagtcggggtaaaatgactcccgtataaagccgcaggcaaggaggcggtcaacttcttctttcagcgcttggtacctcgcggggtccattttgcggcgcttttgtcggacacctcgcacttcggggtcaatgttcaagcgatgacacatgacctgtggagatatcccgaccatatctgaatgtttccaggcaaaaatatcaagattttgttttagaaaagtcgttaattgttctcgcaactgtatgtttaatctagaaccaatttttaaaaccttgttattatctataggatctataggtacctcgattgtatcttccgcggcttgggctgcggcggtgtgatcaaggattcttggatccaagtctggtttgtccatgtgcggtacctcctcgatcctgaggatctcctggcgaggtggtggtgcatccagctttccacttgttcagtcaagttgttcaaatcgatcctaagactagactaagaaaatctaaaacctagctgaacaactaagttctcacataaaacactctcctcacaaataagaacatatgcaaaaagtgaaaactagaagagatgatccgattggctgttctgtaggttctatttataaattatggtaaccttaaaaacagttacaaaacaaacttttcttaaaaaatcttgtttgcggcatcagaatcgagtttctatagcagcaaatcagactagaaaggaaacttgccaaaaatgtgtccgactatgaacatggacttcataccttccaaaaatagtgtgctggatatgatcttatcaaatacctatagagttccagagctataacttaggtattattgtcgccaaaaattaaatttaagtacttatttacagcatagagttaaacttaagtatttatgacctaaattactttatattataaatatatatattaaataaataaatttttttactttatgataaaataataataa

SEQ ID NO: 325970 - DNA, 1760 bp, Cannabis indica
ttttgagcttgttaatagtgttttaggtgctcttgaatttgtggttgcatgttgttgtaatttaggtaaattgtgatggttttggtaatgttatcctattgtgttcttggttgaatcatctagattgttttgggaggctttggagtgaattattgatgttgaatttctgggtaccaaagtttgaagattattgttctatgttgattcctttataacatgctttgtgtatttgtaaatttgttgttttgagcttttgtggagctcaattgatcacccatgataggttggttttgtgaagagcaaattttggattaagtttggtttttggttgaattttggtatgaatttaaggtaatatcgaaggtttgaaaagttagggatttttgggactatcgcagcggccacagcagggctcgccgcgacgagggcctgaggttgccgctacaagggtccctgttttcccgatttttgcattttttttttctatttttgccataattttttattccaaactccgttttggacgttcttgatatcgttggaaaattcattttgggctctatgtgttaatctatatttggagttaaaattatgttcatgtgtgaaaataaaattgggatcaaccctatttgtgaaatcataggaatgtgtgactaggattaccgacgcttgcttaggaacacccggagatttggaatctccacatacttagattaccagataagacagtaaactagcacgtggatattaatgcattggcgctcatgtatattattttgtatatgctatgcgggaaatcgagtttagggttattacctaaattttaacgactatgtgatctaggattatactctagaatttaagtgaatatgactgcagttatgtgttgtatatgctgatattaagaattatgtgcttaaggcataattaggttagactcggtgatcaaaattgagataaacaaatctaaggccttattgtaaatagacgtgtgagcgtaacacataaatctatgtcaaatagataatagatgcagtggctgttgggttttatgccctaaataaaacctatttaaatataatcaaatttactaattaataagagatcagaaattattttatgttgcagtgtttaaataatttatttcatgattatatgtttaatgtataaattttattaaatccagaatatatagttatttatgattatagtgttgtcaatacagtggaatataatcatggttatatgtgtcaaagtttttaagactcatgatttgtcagtacactgagtttagactgatatgataatcaacgatagagtatacttacaccttgaataagtgttatgccctttccaggacattggcaaagtatgctagtatcggatgtatggagtatacaacggatttgaccgatattgaacttggataagatatcataaacttattgttatatttatctaagtcaatatcagttagttgatcttaggtcaataaatcttaatcctgatatagttaggttctgcttatatgtattatctatgttcttagagttgttcgttaaagtttggtcggtcgaatacttacatcttgggaatatgataatataattaagtgggagcgctaaatataaatatggaatttataacttttataagtgaaataatatttttcttcgagcttgacttaatcaaaataaatgattgagatcatttcaataattatattagtttactaatataaaaatgacacgtgaataatc

SEQ ID NO: 325971 - DNA, 1031 bp, Cannabis indica
gagaaccttgaaccgatccaacataaacaaatggattttcaccctccaattggaacgttaccattctctgcttgcagtcaatgctagctgaatacttggacaaaaaatctatcccaactataatatcaaactctattaaattcaattccactaggtcaacactcaactccctatccttaattctcaatggcataaacctaatccacgttttagagataacaaattctccgttacgtagtagggttccaaaccctaattctatgaaatcataaggcctaccaaattttgaaattacttccaatgccacatatgaatgtttatccccagagtcaaacagtattgaaaagtaggagttgttgatgagaatctaacctattaccacaaaaggactagctgcagcatgtgcttgtgtgatagcaaacatccgagcaggtgtgggttttgcctctagtttctactcttcctttttcatttgaggacaatctttcttgggattcccaactatgccacactaaaagcatgtccttcgagtacattctccatgatggtgtttctcgcatttgggcacttaggataggaataaccttgacatccacctctaccttggtttccctggaaccttttactctgacttgaaccacctgacattgggaaaacattcttcttttgatcggtattggaatcaccaccatcccaaccataaccagaagtaggaagggtggtgatccactagcacttggagtctctcggagctccagaagaaattttactgcagccttgactcatagagccttgtcaaccatctcagggtaactagttgtatcatcggtcttaatcaccaaattaggcctaatcttggcatttagacccgccaactatttttctttcttgttgaagtctgtaggcacaattctcgaagccaacttagcaagtcaatcaaactttattgtatattctgttactgacatggcctctccctgaacaaattttgtaaactcttttcgcttagcactgtggactgcttcattgta

SEQ ID NO: 325972 - DNA, 1091 bp, Cannabis indica
gtttttgccttttttcagagcacagatctcattactcatggcattgtgccatttagatcggctaaggctgcttcaaggcttggttcagaggtaataagactcaggtaaggatgtttagtagctagtgttaggatttggggtttggagatgccagtttttgtagtcttgtgcgcagtaggatgggttcgggtaggggcaggcagggctacaggtgggtttacactttgtgcttctgtaggaggaatggtaatatctggtggttgaggagagatgttttgttgtataaagatggttcagtttggtagaggggtattgttatttctggtattgacagggacaagtgcaagatcagtagctgtattcgaggtaggaggtacaactgttgcaggggttggttgagtggttgggaaagcagcaggtacatgacacgcagggtcaatattagaagcatggtgaggagtgttatagggggtactagtacagggtgtattattagaaactgagaactgagcaaaaggaaaagcatggtctgaagttacctgtactggttggtgctttatagatgcaggaaacaatttttcattgaaaaccacatgtcgtgcaatgaatagccttccttcaggattttcacaaagatatcctttgtgtgaagaagaatatccaaggaaaacacattgttgagttcgaaactccattttatacctgttgtatggcctgagatgtggataacaggcacatccaaaaggtttgatgaaggtatagtcaggtttttgtcccagtaaagtctccattggattgctgtagttaaggacaggtgttggcaacctgtttatgagaaatacagcagtgtggaatgcatgccaccagtagctgaattctaaaccagattgagcaagaatagttaaccccatttctgtaatatgcctgtgtttacgctctgcacgcccattttgctcactggttttgggacatggatgttgaaagtggattccttggtcactcaagaaccgcgagaaaggtctgtattctcctccccagtcagcctgaactttcttgataggtaaattgaactgtttctctaccattgcttg

SEQ ID NO: 325973 - DNA, 839 bp, Cannabis indica
aaaaaaaaaaaaaatatattggagtgtaaatataagtttcttatgctaatatttggttgatttaccaaaaataccctcgatatttgaacttttccctctcactctaactctgattctctctttctctccattttctctttgtaaccttgaacgacgaaaaaccctgagaccaccgtgtgacccccgagactaccacccttctcgacctagtctcgtgtcgacccagacccctctcgacccaaatcccattcgacccagaccacatttgactcaaaccccagttggcacagaacaattgacccacacgccctcgacccataccgttaagaccattgaaggacaaaattcaagagacactaaacgtcgaagcaccaccaaattcctgcaaacttgggttgaccctcaaagattagattttgtagttttttttttcaaaaaaaattatttggttaagaatatttttagtggattaagtttgattaatcattgtttatagcctaatacaccgtgttttttggatttgtgtgagagatgctggtagttatggtattttccagctaaatttaattatcgataggttgttgatattttatcaatagattctcaatagtttctttttttatcgttatttttgtcaactttggcaattattgattattatcgacacattattaatgatttatcgacaaattgctttgcttggtctaactatcaaaatttgataagtatttagtatttattgataggacatcaattcagaaggaatttgagcataatttagtaaatccacaaaaatttaattacccttaatttaatggaaaattatctcatatactatt

SEQ ID NO: 325974 - DNA, 550 bp, Cannabis indica
agacatgcatatgcaatgagcattgttagcaggttcattgcagaccctggagagaagcactgggatgctcttaagtggattatgagatacatcaaaggcattcttgatctaggcctacaacaaaagctatgaaatagaagtggatgtattgggctatgttgactcagagtatgcaggttgcatagacacaagaagattcattacatgttatgtattcacaatgcaaggaggatattggaaggcaaatttacagaaggtagtagctctatcctcaacaaaaattgagtacatggtagctactgaggcaatcaaagaggttgtatggttgaaaggtctagcaaaggagatgggattcaagacagaaaatatcacaatgttttgtgataactagagtcacttcacctaatgaagaatcctatgtttcataagagatccaagcatatagacatcaagatgcacttcattagagatgtaatctcaagcaaggaagtccaagttcagaatattcatactaatcacaatcctattgatatgttcaccaaggcagtga

SEQ ID NO: 325975 - DNA, 796 bp, Cannabis indica
atacttaattacactaatagtagtataacactgaagaaagtattaaacaccagtaatactttttaacaattttcctctaataattatctatataaataataattattatataaaagtattttataataacattttaatataagaaatactaaaaagtataacactcttgtaatttgtaataatattttaatataacaaatattattagtgtaatttaatatcaattatatatttcatttttataataattataaaaaattaattataaaatactattttataatggtactaaataatgtcccataataattcttttgattaatggagatctttgaggaaatatataattttgttttattatagatttatgtgacaatactatttcaagcttatcacctttttttttgaggttataaaataattaggtctttcttggcagtcggttcataaaaaatattatccttttaaaataaaattcaataaataagatattttgttttttttattattcttttgtcaaaataaattaaatacttttcctactctcccaataagttagtgcttgtgtttgatttttgtttgttctatattgattgactaggattgatagtgagtgagattgaatcttttatagtgattttttttcttattataataatattaattaataataaaataagagttaaaaaaataggactcttaataatgattacacgtgttataatatttttatatatatataataaaattttataatgctttttaaatgaatgtaccgatacatctctatctattt

SEQ ID NO: 325976 - DNA, 1637 bp, Cannabis indica
tgactaagtatgttaaatcacttaggcataaaaaaaaaatacaagtatgggacatttttttacttatccaacgtccaggttgatgtcaggatgtcaacgcgttagatgtcaacttgggcactgggtgctgaacaactttcagtaaaacgataataactccctcgttattgatctgattgacttgattcaacttgaatttagaagctattataaggatctatcaagtcatgtatgacacccatatcaaatttgaagatttcaagtccaaaattcgtacctaagacagttgcaattatttccatagattacctaaaaaacgattcgatggacgagattcaaacttcgaaaattgatgattttcatcaagaattaattttcaccgttatatcatcatcaatggccaagatcatatatttttttgtattattttattaatattttaatcagacctccttccctataataggtaagctcctctagttcatttttcacattcttctaaatcttcataaggttagagcacatctatctcgactttctctctctaaaaatcagagttcttgcattaaccaattttcttgtaaatctcgtgagaaataaaaactcaaagtagacataactttattgctgtcgtaacacgaggagtgaatgggtataaattttttgtgtctctctatttgcttacttaaacatatttctcctcttgtctatttagtgagcgagtgttggccaaatttatgcatcaacacttgcattttggagttgttccatatccgcatcacattaatttaatgttacatccataagttatttagaaaaataaacagaatgtaactaaataggctttagaagattttttgagtatagataaataagagataaattctaccagagtcataattggggagaaaaaaaatagtatttatgctaaattaaataatttgataaatttttgaaggggttaaaagtagggctaacaatttgtgttattgtatcgacacatttatgatacgatatgtttatggtgaacataaacacgatacaattattatttgtgtcaagactacaaatacgaacacgacactatttctgagcatgtcatacgacacgacgcgataacactttaataaccgtgttatgacacaaatatgagattgacgcatttaacacgagattaaacatgttatgacatgacacgaaattaacataattaatataattatagatataaacacaaatattacttataaaattcatagttttattttattattatttttttattacaaaaatttgaataaaagtgttttatgagattttttaatatatttttattttattttacatgatataaaaaaataaaaatacttatatacgttataatcgtgtcattttcaagttaagcgtattgacctaaaaatgacatgtttcataaacgtgttaaacgtgtcgacccaaattcaacacagaagttaaatgtgtcactcaaacttatttatttcttattatttttgagttatatcggtatactgtgttacaaatgctatccctgtgtaaaagtaaatatttgtgaggaaaaaaggaaacaacatcaattaagtaataagtaaaaggggttttttttcatttttacactt

SEQ ID NO: 325977 - DNA, 567 bp, Cannabis indica
aaatactgtctggcagtattttttgtaaaaaaataggaaaagttagtataccatgtaaatttccaaaaaaaaaaaacccaccaatatatatataaaagaaaggataaaacaattgaggccctggacaggcctaactagcccttatttgggctgcctgtaacttgtgttagattttttttttttttttgagataattctaaaaacatacaaaaataataaaaaattacaaaaaagagtttttcaatattttacaatcttgttgtttttttatagaatactttaacaatatattaaaaagaactttaaaggtaaaaatataatttttttcataaatattagtgtttcatgtaattatgaaagtgtaagaatactttgaattaaagtttgtttgtgtcacttgagaacttttgtgaatacgaagctccataaagatgttgagtgtatggtagtgtaatcaatggtggattcagaatataagatgttaagtgatttgtttttttttttttgttttattattgtataatatgttaaaaattgatacaaatttatattttagtattaaatgta

SEQ ID NO: 325978 - DNA, 500 bp, Cannabis indica
cttttaatatataaagattattaaattaaattatgtgtcatgtgaaatttaattacactaataataatataatcatttaattagtcttaggtactattagcaccatttaatatttttctatgtatatacatattttttttagagaaaaatattaatttcaattaatagacaaataaaataaaaaatagtccattatatgatgataaatcgctcaaagagcaaaatcaataaaataagcaaactatgtcgtttacattaataagaaagaaaaaactttatagcctttaactaaaagactaataagccgccaacattgaagaatgaaagaagtgcgaagaatattagatcttcaattcaaataaatacgtgacaaatcacacctatcaatgaagccacgtggcattctgaagttcaccatacactctaggggtgttcgcggtgcggatggtacggtttttgactatttttcaaatcaacccgcacatgtagtttttctaatt

SEQ ID NO: 325979 - DNA, 662 bp, Cannabis indica
aaaaaaaaattatatatttataaaaatgacaatttaattcgacatatcaataataaatagtggtaatttttgtatttagcatctaaaataaacaaaaataaccactatcttatacggggccggccctgaaatttagtgggtcataaggaaaaaattatttttgggtccttatttagaaaaataaaaagtggtattaaaattagcaaaaaaattatgtaattttaaaaggggaagatttttttttgggtccctgaactaggtgggtcctagacacaggcctagcctgcttatgcccagggccggccctgatcttatacgatgttaaagagtcttctgtttaaaatagataaagtaatttgtagtcaaaattcttgcattttgagatttggtacgatcaaccctagtacagaaaaaattaggattgaactctccaatcttgataatcgttttgctctgactctttccgtctatttagtctgttaagtgccaaagtaaatttgtatacaagtatacacgtggagaaatttcattggtccacctaatattaataattaaaaaaaaatatttaaaaatttcaaaataaaaaaagaaaataatttaaaaaataataattatttttttttttcactttttctattttttttctttctttcctttttctt

SEQ ID NO: 325980 - DNA, 1288 bp, Cannabis indica
actgagtctgttgactaatcagtttgctaccttgtgaaggtaaggaaaagctaaagcggaggaacagtgagatggagctctgcagtgattgtacatatcgcggcagtgcaacctggagggtttcggtctttcaatattttgagataatttagtttcctgttgtttgtaaaatatatatatatatactagtaaactttgtattagtaaaatactttaaactgtattttgaaattcgggatcccaacccatatgtttataaagttattatattataaaaattaacttttgagtttagtaaattttaaatgcgggcgttacaatatattagattagctcccccttaatatatgcaagggttataagttaaaattttaccttgcatgattttgtaaactctccttccatttattacttataattcaacggaggtccaaaaattaagttgttgccaaaaaagtaatcattatggaaatttttcccttttaattcattaaaaataaaaaggtggcaagggaattcacaaaataattggcaaataattaaaaaaaaaatgtaccatgcatagaaccataaaacatacataatcaagttccaacaaacataccatccaagcataaaaagaaaatgcaaataaccaaaaaatcacacactaacacaacgaaaggtgagcatactaaccataaataaacataaacatgaagagtgatactaaaacatggtacaagtgatctaaattggtggaggtccaatgcggtccatatatgctcttcattgtaccatctcatctggaaaattagcacacacacggaccatgtcactcctcatggtggttatgtcagtgtggaggttagtgaattgagagttcatgtcatttctcaagtttttaaattaagtaccaactgaagtgtgaagatgagaaaatacatctttgctgttgaaatgagaaacttgaggcattggaggttcttcttcttcttatccttcttcactagcactaggaactacttaggcttctccatgagcatgtagatcttgtttggagtaaacctatttttcttcctcttcatcatacttgtaagacatacccttaaatgtgattgcacataaaacgtcgaaatccttaaattctaggacctcgatttcatctttagtggggatgcctagagagaaataagtagctaagagtggcaccatagggtaaggtttttctttgtttaggcttctagaattcattaatggctctaatgattagatagcctaagttaatgctcttgctttgcataatgat

SEQ ID NO: 325981 - DNA, 800 bp, Cannabis indica
tcaagatggaaaagacagtcgtacccttctcgtcacttatggtcaacacacttctcttgacaatttatattcaatattcaatcaaaaagtcaattttttttactctttcatattgtgttaattatctttttatataacctaatctttttgatcttttaactaatttgatattgcattattttactgttaatttttcaaattttgaatggataattaataattcttagatacatataatttttcaataatcaagccaatcttagattctatttccaatggatataaaaagtttgtgtacacaaaatattaattaattttttgatcacttttgttagtgtagcctatttttcttaactatacccaataactttaatatttaatttctaccaaaatattacaataaaataaacatatttctacggattatggtagcaataaaaaagttagtgggcataaatttataacatttgttggtcaaataaacaaaaaaaaaaaaaaacaacttgttaccaaatttgttggcaaaaataatttgctaccagaaaaaatcttatttgctgccaaatttttaggagctaataaaacttatttataacaatacgacactgtagatatattcattgtgaatcattccataaattatttttttttattattttcacagtttgagttgctctggtagttactccgataattgttatatgggttgctcggtaactgctccagtagttattatatgggttgctatacagggacggagggactttagccaatatataggctaaagccctcactcaaat

SEQ ID NO: 325982 - DNA, 549 bp, Cannabis indica
aacaacatcaaccttagattaattaaagtaattaaatataattaattaccttttctgcatcggcaacgagaagctgattgttgaaatggtcaagaacgattccaagcggccgaccacccgtgttgacccacttctccaccaccgactcattcactctcactcggctcacccacccatcctcgcaccccgtgtaaatcacacccgcctttccgtcataagccaagtcttccggtgccaaaacatctccctccccgactctctccgacccacccagcgcctgtccgttacgcgccgctgcggttgctgtgggcccaaataactcgtggatgggcagagcagccgcctcgaacgaagactcgactactctgtacagaaccaccgctaaacccaccggaaaaacgatcagaaaaattattacaagacgaggccatccatgactaatattgtctgccattttcaattccctcaaaaaatcaaagtagatatttcatatgtagtacatatatagattagagacgtgtatattatatatattatattaatattttt

SEQ ID NO: 325983 - DNA, 998 bp, Cannabis indica
gcacccacattcatatggaaccttggccaggaacctacaacaagagttctgagagccaataggaccttcagatcgtggctttcaggacaacagtttcaggaagatagtagtcgtctaagattaattgtgcttggtatttagtaagagtggtaaagataagaggtcttagcttgaaatcctatcttttgggtcatcacttttaatgacagatttaagaaatttagtttccattagcttctcaccacacgccttgtctaagtttttaaacttagacacagtcaacttagctctaatgaactacgccacatggggatcatattcatcagaaaattttctacttctcttcatcctagccatgatgactccaaaatgttagttgcttacaactcaagaaaagtcttatcaatttttgagttttatgaagttaaggtaattctaaaggaggtaattctcaattcacaagaaacgtgttttggaattttggaggtcttgtaaaaaataattcaagggttttgggagttttagaatccttgaagcaagcttaacaaaggaggagaagaagaaaatttttcaaaaagaaaaaaaacaacatcgccaatttaaaaaaaaaaaaaaaaacgaagaagaaaaatatttttctaccttgaaggatgaagagcgcatggagaactgatgaagaaaattttcaaaggctattctaaaggcttgggcatggagagcctaaatggaaagtgtgagaaatttaattgaaagccctcttatttatagatgaattcaatctcctaatcctagagcaatgagagtcttttaaattaaaagccttaaaggaaaaggtaaataataagaaaaagatagaaatatatattttctcttcttctttggcattaaatttgaaattcctaaggaataggaataggatttttgaatttaagaggtaaaatccattcctaatgctactaagattacagaaaaattagagatttaaaaaaaaaaaaaag

SEQ ID NO: 325984 - DNA, 501 bp, Cannabis indica
ccttcccctacttcgagcctgaaggaggagtggcatccccccctctcaggattggattaagctgaattgtgatgttaaagtagggttagaaagtatgtgtattgcagttgtgaccaggaaccatctgggtaaggtgatttgggttcaaacatctcggttggagttttctaatgcgttatgcgaagaagcgacgacttgctgtctggctttatcggttgctagggatattgggtcgtttgattttgtcattgtggagagcgactcgagggtggtcatcaatgctcttaatgggaaggagtcccactgggcaattgataactacgtctctttttgtaatagttactctcccttatttaacagttatatttattctaatattagtagagcttgtaactttatttcctataacgtggctaagtgggcattttcccaccagaggtttggtgttattctgatatataccattcctattaacattttatgtaatgaccgcgaggtcta

SEQ ID NO: 325985 - DNA, 671 bp, Cannabis indica
agaaaaaaaaatttaattagctattttttaatgacgaaaacttgatatactagaagcatcttcaattttagaaaaaaaaaaatataaatgtcaaagctttcttattttgtcctcttgtggcttaatttttttttttagtttttttttttaactcaatttttttagcttgatagactaaaactttcttctattttgaaaataattataaatgtcaaagcttttttacttcatatttccatagtacaaaagagtatcaattttattgttaatatatttatttacttcatagtaccatttctcaatagaaaaaaaatcaatttgacattatttcaacttttaataaaagaatatgtatagttttagttattttagaaaaatttgtttcaattttaaatttaatatttgttttttgaaataaaaataatttaatatttttttaatatatttttttccaacaataaaaacgcatttaaaatttaaatgaagacatccttcttgtattaataatctcattgttagtgagagatgaattaatttaaatggatttaccctatatattttttttaactttttttttaaatttacggtttgggtcactaaagtggttgcagcgctagttgcaataggggtttctatacgattttttgttgcgatttaggttgcagcgctag

SEQ ID NO: 325986 - DNA, 1641 bp, Cannabis indica
cattggtatgtgactaatcttggtccagtactcctcatttccactctcctcagggtcatacttcttcttcaccagaggacatccttgtataattaaagaggtgagggaggttggaatctcttcttctgacaatgtctccaactcagggcaccaactgatatcaagtctttgcaaggaggtgagttgtgtaagcccatttttgtccagccctctaagtttcccaaaatgacatatactaagataggtaatagtggtaggcagtagcccttcctctggaaatgattttataccttctttattaccagaaatagaaatatcagtaagataggataatgtttggaaattccatttcatcctaaaaaatacatcacaggatatatcaagcttacacaaactaacaggcagaccaccttcacctttaccttcaaggaaaggctctatcaacggacaatctctgattaccaaatacttcaaagctgagagataagtcatcttctctggcaaccactttaatttggggcaatttttaatgataaggctactcagcttgggagcaataagtccaccatttgggaaagatacaaaactaccacaattcgagacagataaagatgttagttcctcaagagatttcccatcggacattgagacagcttgaaaatagtggctggaataaataaaaagagttttgagattgggaaataaatccatatggagggttctaaaggatgatccacaagagtacaagtctaggtattgaagaggagggtaatggtagagtggagtgagagtggtaggcaaacatccactgaaagtagcagtgcaacaagaatcattccttggctttactgcctcgtacaataactctgaattctccaagtgttgaataatcatagttgtgacacatggtagtattgggagacttaataatggaaatcgcgtacctcctctatatatttgaatatttgttaatgaaggaaggaagcgaggcaaatctcccacaagcttaggacaataaataatctcaagtgttttgagcttctcatatgatgttgcatcttcagtttgcattgaatgccattgctcccatgatgacatgtggctgaagcttaatgtttccaatgatgaaaatggctttctcccacaactatttccataaaactcagaacccactgtcactactgagttgaattctgaaatgtaaagatcttttagcgaaggaagttgcccaaagggtggtaaattggaacaatgctcacaaccatgaagccttactttagagatgtttgtaaacgaatcattcccaacccaatttgggaatatttttcctggatagttaataatattgagctccttcaaagttatgttaggtgaaagcatttcaagcacaacctctctatgttttggatcaacaacaacatcatcgacactccattccaaactcaatttctcaagttgattcttatccagtacatgcaattgatctgactcttttgtaatattaatcacattttctaacttgccaatggaaagctcgccatgtagactttgaagttctgccagctcttctatttttagcgcactatccttccccacacaaaagttgtcaacatttgaagattcctcaatttacttatttga

SEQ ID NO: 325987 - DNA, 702 bp, Cannabis indica
aaaaaaaataatactataaagaaatataaattacttggtagtgaaagatattttcttgaacatcaactatccaccaattcacttctcccttaacaaggggtccctaaaaattcttattgataatattatataagaagatattaaaccaaaaataatattttaaaaagaatgaaaatgataataagaaataaatatcaattataaaatatgcaaaacgaaatacaatattataaattaacaaaatacctgatggctgatttgatattggtatttgaaagatgtatttgatcttgagaatcaagctatcaactaccaatttttcttctaatattaagaaaaataattttaaatcttaacttttctaaaattaacgtagtactgagtgatttgtaatgaagcatttatataagttgtgttagtgaatagtgagttgagatttgaaagttttttttcttctttccatttgttattgaaataaaaaaatcttttctactctattatgtgcgttgtgtgtatagtgttcttttagtgtaccaataaaaaatagggcttttttctataatgtacaacaaaaacaaaataattacaaaaaatgtgcaaaaaaaaaattattttaaaaatttatacattttgaaaacttattacatgaaaccatacatttgtaatatgtttattaaacctcaaaataaacaatttcgtaaa

SEQ ID NO: 325988 - DNA, 872 bp, Cannabis indica
atatatatagataacattgttaggcacctcttgcgattagttagcgatattctctaaaagctattatattaaattatatgggacatgatacttagttgaaccaataacgatattaacacgtaggaaggtgttaagcaccaatagtgccttttaacatttctcatatttatatattgtgttccttacaaagaatatatatattgtgtttaattattttgtaggggtctatttcttgcatcaaatagaaatattaacgcgcgtttctcaaaaaaaaatatatatatattaacgtctcatacgtttgggaaaggaatttaataattaatcattttattttgtatataattatagtttttcttataaaatctgtacataatatatcagttacatgctgtcacatttattaaattagtgagcttctagtgactacgaatttataaacaacattatttgtaagataaagtgttatttatagtaatgagtggtcttgttttgttgagtaggtctatttcatttatatatataagtagaaagtccttgaaatataattaatatattcatcaataaatatatatgattcttatcacactgacgtaaaacaattatttatataataaaaattagaaaacatataaataagatattgaaaataaagagggagaaaaggacaagaaaacataatctcaataatggaaattttccattaagaaaatactaacagctagatctttttcttcccgatacagtaaggcttacgaagattaaaaaagaaaaaaacaattaattattagtaaattttacacgcatcaataccaccaccaaacccaagaccctaaacattttgaaaaatagaaaattaaattaaaaaaaaa

SEQ ID NO: 325989 - DNA, 699 bp, Cannabis indica
ctccaactccttccacgtctactcctagcttcacatcccaagttttggctccagtcttaactcttcttaaaacttagttttccccaactatctatggacctactaccttcggtcttgttattttaatttgtactcacctgacgtggcccttccacgtggcaaaaagtagaagacatattgaagacaggcaatcactaatcggctaggttagtaccgtgcatcattccatcctgcaagataccatggctgcataattcacacaaccaggttcatcttgacatcatgccaccagcaaatcctggccagacctatagctgtccggctagggtggacatacctcatgcattgggcagtctttcaataaggttggttggccaagcatacaggcttgccccaacacttgtgtttttctaacaagtcatccaaatcgtcctcaacactcttacaacttcggaacaactcaaactatccacaaaaatagggattcttcatcaacaaataacaaccctattctttacggattattaattatttgtgttgcatttcaaatatacaatgtaacttccctattttaaaggaatattttcctgtttgtgatacgtagcagcttgtaaccctaatactatataaggggtcttaaccctgcatgaaaaacgacctcaagttgaattattcatgcaagtacgctcagaagcacta

SEQ ID NO: 325990 - DNA, 757 bp, Cannabis indica
cttttgtttttgtttttaaaatagaaaaacaaaagtggttacaaaacgcatttttacttttcaaaaacaaaaattttactttcattttgtgattaaaaaattagaaaataacattattaccaaacgacaccaaaattatttaaccataaaaatattaaaaattataaaaaatatatatacgtatacttatactcatgagtcccattatttgttctctttatttctttcatattataacaataatcatttgaagaagaaaaaggttatcattctacttttttattttaagtttgaaaagaatcaaaaggtgagtagatagagagtaaaacaaggagagaagacataagtagtgtacttgaattgaagatcaatctccactctttcaaatttgtacttagaaagaatagatgcttgaaccaatagttattcgacaaagaaagaggaattgttttttattaacatttagtaactagtacacttttatatatactttatataacaatatatgttagtaattagataaactttactttgtgtgattaattcaactacaaattttattggtttttatgtgcaaaaatatggcttctttcaaaaatattattttatagaaaattgaaaaaaaaaaattaaaaaaatatgaaaaaattaggtaagagtaactctgtactcttatggtaatcagaggagtaacgagttaccataagaaggataactaagtattttatgctattttttttatattgttttaatttct

SEQ ID NO: 325991 - DNA, 1485 bp, Cannabis indica
atataataaaataaaataaataatgtcaaattccacaacaaataattaattaaaatgatagctatagctaggataaattaaacaataaattaagccaatccaacaaaggaaaacatgcatatatatattatatatatatatatagtgagatatataattaataatgatagagagtaaaaatgagtaatgtactataattgtagatgaaaatcaaataatcaaaattttatatttttcttattaattaccagatgaacaaaataaataaatattcatatatggggtgataattatttgatagaatattatatatatatgtatatatatatagagagaatagaagagccatcactttgatatggccaattcaatactcccactgtttcaattgtactgatcttttctttggtttggctgcctctttttggagtgggatattgaacatcaataatattatcttttcttttgtattttatattttctttttagttatatctaaatttatatatatatatatatgattacatataatttgcagtgttattagaatctcaactctcttttgtatccttgaagcttctgactcctcccaccaccgagtgtgccccgcgtgcatgatcattcatgatcatatataaacatatatatatatatatattatatattatatctaaatattttaacagtaatatataattatatatataatatatataagagccttggttgttaagtacacgactaaataatattccttatataaagttatttggtgatttctacacatgctttttaaaccagtaattgcagatatttaaaaaattaaaaatagagacaactacatattgtttagtcattcacgtttgattaatttaaagctagccatgcatgcatgtatttatattagtggctccttagatttttcagttgatttgattgtgtagaaacctatagacatacgtgtgtttatatgtatgctttttcatgggaatttttaattacaccaaaaaacttggggactttttctaaagtattttttttataattttacggtttaaaatttttatttataaaaatacatttataaagttttaaattataaaaatacattggtttaaaaaaaagaaaaacgagaaattaactttacggtaactacaaaaaaatttaaaaaataatctaatgacaactataaataaactataaaacaacgaaaaaacggcttatcgtttatattgatgatatatttttgttaataaaaacgttcaaagtgtaaaaaaaaattcgtgttgatatatttttgtaattcttttaaaaaatttggtctattatgtaaattttttaaaaatttaagtgcaccaatttcaataatttttattttacataaaataaatatttttaattatattagttattttttcttccaaaccatattcttaaaaaaataaacttattaaacaaaaataaattatattttaaatattatca

SEQ ID NO: 325992 - DNA, 1090 bp, Cannabis indica
gggaaaaaatagggttcccaaaattgccctaaccggtagaccggttcccaactataattctggttctgcgggggtttcctggggacaaaccgaaatttcggttcctacaggtccccctgaaccggaattcctgttcagtgcaggattcactcaaaaattcataactcactccaatcaaccccaattcaaaccaaatcttccaaacctgttctatacatcctaaagaacattttccaaaaaataaaactagtaccgaagctcagaaacaagtttcaccattaaagctccaaatttgagttctaaaactcaaaaccttgttaaatctactaacatccatcaacacaagattaaatcaacctatctaaacattttttaacttctaaaaacattatcaaacaacaacagcaacacgagcaactaatatctcaatttcatgcaaaaatctcaaacttaaaactcaagaaaatataaagagtgtcaaaacctttaccttggttaagatcacctaaaaaaccaggtgaaactccttgaattaatgaagaacaaaaacaaaccctagttggtctagggggctcaaaaagatagagagttgaaagagagagatatgaaatttttgataattttctatatttttgtaaaatgaagaattacttaggttttattcaattaatttattaattaaaaacataacttaaattcagattatataaattaattagctttcactaaaagacaaaacaaataaaagtaaaatgaccattttgcgctttccacactaaaaaatataaaaggtcacttaggggtattttgggaaattctaaaatcccgactattctcgacattcccaatgtttaactttattgtcccgctatactaaaaatactaagatgtgattctaatagccaaacaccgcgttccaatgttgctgggcacaaaacatgcaaaattatgaaatttctatatatgacatataaaatgcattctaaatacaaataaatcattgtaaattaataattcaaggttaataaataatttccataattaaatcctaattatgtgctaattttcaaattaaagctaagcggtcttt

SEQ ID NO: 325993 - DNA, 512 bp, Cannabis indica
aaaaaagtgtaaaaacttaaaagaaaaaataattttttatgtttgaaatggataattttgttaaatgaaattttttttagtacgacttttctttgtatacgcacccataatgtttcaaattaaattaactaagtaatttgcgccataaattacttaattttaatttcggttggagataaatattaaatttaattttttatgataataatacataagttatattttttaaactttcctaaatacttgatagtattaagtcaacagtcgcgtaacattttctcattggttcatgttattatttttttttatttatttaaaaattaattgaaatacattaataagaaaatgagatgtgtaattttttactttatggttagatacttagggtgcgtttggaaagccacaatttgagtgtaattgaaggtaattacacaatttggcatgtttgtctaaccatgtaattacattgtaacggtgtaattagaagtaattgaggggttccaattacactc

SEQ ID NO: 325994 - DNA, 1051 bp, Cannabis indica
aattggaagagctttggatagaatacaccaccaaagatacttgagtctctcagggattttactattccacagtttgttccataaagagggggccacctcgcgtggactcactcgatcctcagctagggctctataagccgatttgcaggagaattggccgttactttccaaggtccaggaaccaggtatccttgcccatgccagtagggctaccccctttcaaaatagcagagactgtttcctggttgaaataactgttaagtttttggatgttccatcctccataagactgaagtaattcagcaacctttgattccctattcaaaatccacccattaggaatgggagtaaatccctttagatgagcaatccaggggttagaccaaatgagcgtatcctgaccatcagccacgcgcttacaggcacccttagagatgatagttctggcccttgtcacgtttttccagaaccacgagtctgacgccttcggatcacactcaagaaaagacttacccttcaggtatttggcctcaagaatacgacagcataaagattggttgcctgttagaaggttccatccccatttagcgaggaaagcctggttcatatctttagatttccggaatcctaaccctcctagagacttagggagacatagtttatcccaggcttttaggtacagaccatggtttcccttctccgagccccaccaaaaatcacgcaccaaaccatcaatttttgacgcaagcctgcttgataatttagtggtttgcatagcgtacagagggagagccaaacctacagactttataagagtagctcgccccgctttcgagagcgtcttggccttccaaccatgcagtttctcagtgaggttatcaaggataaaattaaaatcagcatctttttgtctagatctgaagagagggagccccaaatattgaacttttccttccggcgatccaattcccagcaggtccttaatcctctgtttcataccattgggagtattcttactaaagaaaattgaggtcttcattttattgacctt

SEQ ID NO: 325995 - DNA, 885 bp, Cannabis indica
ctaaaatctgatgcctttttccattgtatttaacttctttttatagtgtaaatttgctcctcaaatctgatttttttgagtaccaataatagtggaaaagtggcataaaaagctgaagaaaatggaagataaactatcccactcgcattaggaagagtggactcgtaggtaaaagaatgccgagagagatggattcttgaacgtggtcttgcgcgcggtgagaaaccatcaaatattgatgagtttgtttgaacgtggtacatcaattttgagcttcatataaatggctcacatcactttttgaatcttcaaagttgggcttgactttgggccactatatttgaatcttttttttttctttgcaagaatactacttttcaagaatgccaatatttcatttatatcattttgctcaaatctgaaaaataacacaaaaattaaaataaattaaatatttccaactaaaataaatttattattaaaaccatggaatacttaatttatattaattatgcatgcataaataaaagcttaaaatgtacaaatttgagccttaatcaataactaatcagattgtaatggattttatttagggcacaaaacccaacagcttgctgaggcggttcttcagaggaggcaaggtgccttgggcgccaggtggctgagtcctccgtccaagattttggaggcacgccttcgcactctcgaccaggacggatacctaggcgagctggactgctacattcccgcccacgacaaccgcgctacaaaccctgataaggggatgtgcacttggtcgggggctcacggccagaaaggggcgctgatgcccttgcacaagaacttccgtgatgtggcggacttcttcggcctctgcccggctca

SEQ ID NO: 325996 - DNA, 1111 bp, Cannabis indica
actaaagaaccatccatgtcaaaagacacaactaataggaaaaaactaaaagaaaaagactaaagaaccatgtcaaaagataagactaatgagaaaaactaaattagtttcaacacataaacacgatcacagcataaaaattaattaaggaattaatgtactccttataattccaatcccataaaaacactgattgaaattaacctaataatagtaaattaataaatgaaacaaaaaacattaatcggaagtaacctaattggaattaatacgcgatatttcattctcttcctctaagcgatattttctctcttaaatataaatttgatattaaatatttatttaaattaatttaaaataaatagcattaatatgtatataaatttataaaactaataaccctattaacactattaaatttaacgaaatattcttatattcttaaaatattctgttaaaccaactaaaattgttagatagctacattttatatataaatattatatcaaagttacaacttttaaataagctccttaaaattgaaaaaaaaaaatatcagaatttaaaaattacattcaaaccctctaagaaaaataaattaaatccaaattttaaaatatcccacggccagcacacaaatttttatgacgaaaaaattgatcaattccttgttattatttcttaaaattatatttttaattattttggatttatagagtaattttttgttaccttatagttatatatgtacgttgatactatttatatttattttgaacatttcttccttacaatgttttttttaatagttttgatatcatttttatttcgtcaaaactttttttaatagatattgaatctttgaagtattattattcgcgcgtttgcattgaatgagtaatttttaagtgatatatgtaaacttttcaaatacttaacttgagtggattaattaattaagtatttttaattttgttttatttcgtaattataaataaaaataaataaaaatatttagggtgcgtttggaaagccacattgtaattggatttgtgtgtaattggagctaattacacaatttggcatgttgaatgtaattacactgtgtaat

SEQ ID NO: 325997 - DNA, 547 bp, Cannabis indica
aacaatttttatttaattctttttaattttactagcatatgattgtacatgtactaaatcgtacatcctaattttgctacctaccaaatcacactcttgaacattgatatgtatctaatcatgtccgtcaaattttcatccacgtcaagcatctgttagtaaaattagagaaaagttcttcatgaactcaacaatctcaatagtctgccagaatttttaattagcctttatataaggtgcttcaactgtggggaattaaaaaaagaccccatatgtggggtacttaattggaagttgttatattcaaaattcggttggcactttagaggaggacacgtgtcaatcttggagaatatgaatcatcgaatataatgacaattattttaaaggatattaaatagaataactcattaaatgcagatcatagagcatatctaaaactcactgactgtatagttttacgcgagataaggatgtacaaactattgactcgtgtattagcgagaaaccatttcgcgtcagaagacacaatcataaggatgacatc

SEQ ID NO: 325998 - DNA, 1695 bp, Cannabis indica
tccactgtgctgacgacacaataaacaagaacataaatgtgataagggtttggatgaatttataaatcaaataaataagtaaatgataacatgaaccaaatgacacataaatgagtgatgaaaatacttctgtttctttattgatattgaatcatagagattacattgaaatcgagttttatttagggcgtaaaacccaacaaaatgatctattcaattccagggagagagaaaagagtgggctactccatctccatcttcttcgtcgacaaacgcccgtcaaagtttcatcttctcagacaacaaatgccgatcaaagttccatcttctctaatcacgggtatagcttgaggttccatcttctccgaccacgaccatcaaagtaggctgtgatttagtagttttggctaagaaaagaatgggttgatagggtatgcgattgtgaattaccacaaaaagacgtggtttgcaccttaaagacagtgaagaacttaggtcgaaggtttaagtgctgccatagattcatggtttgaatttttgccgcattttgttttctttttcgttgtccgatctttttgggtttgggtttggtatctttgatattaatcttcctctttcccattctaccatatgaataaatatgatttcaaaattttctctgaacttctcatcaagaaaaaatttatgttcaaatcacctctccttaaaagtaactaagaaagctcctaacataatttccctccaccctatcatctacactaaagattattggattccaagttgttaaatcattcagttgtctccaaaagttgagcagtagcttatagattttctaatttctcgtactgtaagaaattgaactttttctcaattcaatttcattaaaattcctgtgtagataagcttatagtttgtttgtgtgagctcgaggatttagattaagaattgaatttcaagcacttcctaataatctaaaaagatatatgattgaaagttatggatgtgaagatgtggagtcctttcttgagtaaggttttgttagaattttataccctaaataaaactcatttcactataatgttatttattttgaataaaaaattagaagtcatttatatttacatgtaatttttatgcttaaggtttgacatacaatttctgttaaatctaaaacatatagtcattcacaattatagtaatatcaacacagtggaaggtaatagtgattatatgcttcgaaagtttatgtcccataatttatcagtacactggatttacactaatatgatagtcaacgataaagtttacttacacattagataagtgttatgtcagttctagggtgttagtaaagtatactagtattggatgtatggagtatacattggactggaccgatattgaacttagtaaagatattataaacttattgttttatatttctaagtcaatatcgctggttgatcttagatcaaaagatcttaatcctgatattgttaggtttgatctcaagagtgttatttatgttcttagaggtgtttgttaaagcttaccaattggttcgggcaacacatacatattgggaacatgatagtacaattgagtgggagcgctaattatagatatggaatctatagcttctatctagatatagaagtgaaataattattttcttcaagcttggcttaatagaga

SEQ ID NO: 325999 - DNA, 554 bp, Cannabis indica
tatatatatatatacaaattttacattaaatattattgtcttgaaaataaaattaattatgttgattgttgaagaataggatatgatatattaagaataggattgttgaaaagattaacatctctttgatagccaaattgggttggaagcactttaggtgatcaggccttatggtggaccaaatacttcgatgggagtaagttctagtctgttgaactcgtttataagagcatttctaatggtaatattttggagaatgcttgatgaagtagaaagtttaggtggcaaaatataagaatgctatatcattaaagataaaagaatattattcttgaaatttgcgttgatgccacacaatgacatttgatgctatgtttcttttttactaataaaaattaaaagtacaatatatataataatttaataaaaaatttaatatatatagtaatgtgtgagaccataataatagtatttttaaaagatatcctactattggagtatttttcaaaagtaaatgtataaaataatatggaagaaaataaaataaaatatta

SEQ ID NO: 326000 - DNA, 840 bp, Cannabis indica
tataataaattataatataatataattctacaataatactcaattaactagttagggctttgctaatccatttccttaattccagggtattacaacttgactctcgggatgcccaccataagcattggcataaaactctctcaccacactagtgtttgctcctataaccggttcacacaattgttgccatagtcgagtaataatcatatcaagtaaaacaccatctttcgcacttggacaaaaataaaattcaacaatcaagctcttattattagcggttcattccttaaaccttgcttgtgccccagtagtgacaaaagtatgatcaatagtgacttgtgatgacacataatttctttttctttttttgatcttggagtcatatcaccaaatccaaataatgaactctcagaatatattctaaaacacccatcaattattgatacgacacctatcaatcaaaccaaagcgaggtatcacccaaaacttcacaaaatcacaacttttcttcactttggcattttaccgaacaattggagcgcgcacttagttactttccaaatcactctcaaatcttctctaatctatccccaaacttaaaaggaattattacatagaaaatataaattgacactttatttacaaaaatacatccataaggtaaggacaatatttatacattttatgtgattttatttacctaaataccacttacaatatcacttacacaattagacgatggttgtagggtggttgcatcaaacgaaggtttcaatcaaacgatggttgcagggtggttgctgggtgattggccgaaggttacatcagacgaaggtttca

SEQ ID NO: 326001 - DNA, 745 bp, Cannabis indica
taggataatgttgatgtaactcttttttcaatgaaccattttgatgttatcttgtatgcttgttcctcaattccattttactgcttttaatggtgctccggaaactcatttaagaatccatacttgaaatttgttaagaaatttggcttcagcatcaaccactgaaccacggttgataatgggtgattttaatgaacttttatctaatgatgataaggacggggtcctttaagaagagagagtttaatggaggaatttcgaaaaatagtcgatcattgtaacatgtttgccattcctttcaagggtgataaattgacttggacaaataaaaattataatagcattctcattaaggagagaatggatagatgatttattaacgaaaaatggaaagaattctttactgagaagcatatttctcatcttgattacttcaattcggatcatatagagcgattgaatacatggtttccctaccatatcagacttccaatgtggttagacaccgtagcgaatttcgctttgaacaattttggctcaaggatattgaatgtaaagaggccattgttaataattggtttcacaaagatgaaaattgctcgatgaatcttttgttgcagaatattactgttgtggtaaattcaacacgtaagtgcatgtatcgtttacaagtaatagactcaccaaaagtgaggtcgatcccataaggattgtagttaaatacgttaaaattaaacttttactt

SEQ ID NO: 326002 - DNA, 1114 bp, Cannabis indica
taaaaaatagtatatatattaaagataagaatatagaagctgttaggattactctagtcaaataccaatgctccctgcctatgggccaagtgtgtaagaagaaggttatcccgaaacaaaatatgtgtcattaattatcttttttctttgtgaaggacttctaaaatttgatctcagtttaattatcgactacttttttcttggtctagttaaataaatagttcagttggaagaaataaaagttaaagaaaaagaacaccttttaattggtagttaaatgtttgtttaattgtgatgttactagggtatcgacacgactttgcagtggtggggttcggattaggaattcatcacttataatatatatcccaccctctcatttttaatcatcttaagctttaaaacataacatttaaatatatactactggtttattaattagcagtatcccaactagagccattaaatattctaagagaaattaactaatgaggaaatttttttttttttaaatattaaatggatgtccttacaaaagggcaggtctcttattatttctatagattgtagaagttaatgtgtccgtcacgcgcttaatatggcatccgggaattaggaaacgtaatctctacaatcaaattattgtaaggaccatcaactcttcaaccccaacgggtccttataataaaagctttacaaaacctcattttacaatttatatatatgaatgccttgcctttacaaatttctacttcaaacaatttcaaccgtctgatctgatttcaaatttccactaaataaactattataagaaaaagtatacatttcgctcttccacacttacgtggcatttatttcaaataatatagttattataaatacacacaccatcattatcaccattgctttacttttactcataaagaacaaacaagaatttcaccatataaataattaagattaaatgcataaataataaatatgtattgggatgaattatttatacaaaaacaaaaataaaagaaggaaagtaagggataaaccaataaaaaaatatgcaatgataataaaaagtaaaaaaataaataaataaaaacgaaaggcaaagaaaatt

SEQ ID NO: 326003 - DNA, 1656 bp, Cannabis indica
gtgttgataccaaaagtaaaaaacctagattgattaaaaattatcgacatattgctttgtgtaatgtaatgtataaaattattgcaagagctttatcactaaaggataaaaaatgttcttagccccctcatctcatttttccaaagagcatttgtcctaggacgctcgatacatgacaacattatttttgagctacttcatttactattcaaaagaaataacgggagaagaggatttatggaactcaagcttgacatgagtaaagcatatgatcgggtggaatggaggttcttagctagtatgatgcgatagtttggctttgttgagggttaaattagggttatcatggattttgtgacgacccctaagtatactattttaatcaatggtcgtcctaagtggttccgacaagggggttacgacaaggttatcctttatctccttatttattcatcttctgtgcggaatcattatcctcattgttctcccttgcaaaggctagatcaaaactaatggggtttcggtgccctagatcgaggccacgtgcgactcacttgttttttgcggatgatagccttgtgtttggtagggctaatggtggtgatactaaaattataaagtgtatccttctaacttacggggctgtcactggtcaaaagattaactttgagaagttggctatcacttttagtctgaatgtgcaacaggtggatcgagatggggtcctgagagtattggggttcataagtggctactcatgacaagtacctaggttagcccacggtgattggtagaaataaaaaagcgggcatttgaggggatctgtgagaaggttaggaagtgtgtttggggtggaagccgaatttcttcttagctggtgggagagaagtgcttatcaagtctattcttcaagctattccaacgtatatgatgagtgtatttaagatcccggcaacaacttgtgaaaaattaaagtctattgtacaacaattctagtggggttcatatggtgatataagaaagatccctgagtcaaatgggaaatagtatgttagcctaaggcgatgggcgggcttggatttcaagattttcaactttttaaccaagcttttttggctaagcaagtatggaggctgtttctatatctagattcgttgcctgctcaaattttgaaacaaaaatattttccaaattgctctatccttgaggccactgaaaaagatggttcacctcatctttagacgagtttgatctggggaatggatttgcttaaatgtggtcttcagaggtccattagggatagttggaaagttagggctttcaaggacccatggctaccgcgtccgaggtctttttagccaatcacaaggaggattaatgatgactatagggttaatgactttatccttccatctggtgattgggatgtggggaagcttcatcaggttttttgccaatggatgtggacgtaattttgtctattccattagcgagacgtgaggcaaaagatggttggtgctgtcaagagtggctactcattggcgtagtcactccaggttgaggagagagtcgcagattcttccaggctaactcgttggtagaatggagtatggaatcttaatatgccatcaaaggtgaaagtttttgtttggcgta

SEQ ID NO: 326004 - DNA, 747 bp, Cannabis indica
tactaatacatacttcagatgacttgattaattaaattctatgtttgaaattcaaaatggtcaattacttaaagtaaaattgaggctaaacttagaggaaaaagttcagaaaatgtatgagctgaagctgcaagttttcttgtctaaccaattatggttgtgaatgaaggttcaaaaaatatggagcaaataatggttatgagtttttttggtttggaaaaaattcacattttctagtactgacatattcattttctgctctttattagattattagttagagaattataaaccaaacgtgagttttactgttttagtgcttgaattcaggattacccaaaatgggaatttttcaatctctttggcttaaatggtctcagaatgtatgtactttttgtgcatcagcaacaaaataaaattccataaactgatctctaattgatatatagtatataccacaaattttatcatggtgcccaaaaaaaaaaaaaaaaaaaaaacagtgttttcatttaattctcattaaaaattctctgttatgatgacacgacacttttacaggtctacattttgcttatgatgacagttggttggtttattcggttagcttgcttagagtcgatgttagtgtcgttagtcatataaataaagctttgtaagcattgaaatgagtagtagtaagtgcatataataattcatggggatttttttaccgttaaaaattcttcatgaattattgagattgtt

SEQ ID NO: 326005 - DNA, 640 bp, Cannabis indica
tcaacaaacatgtctccaccaatgaatttgaggttattctcatcttctaaatcagcaacaacatgtggtaaatccaatacactacactcaatttgaggaaaagcagttgcaatagacttggcaacagttccagtgcctcctccaacatcaaccaacctttcaactccctcaaacacacccttacacttctcaatcaccacacttgtcaccaatcgcgcatcactagccattccatcattgaataattgcactaatttcggctcatgacttccataatcccaaaacgtcctcccgttggccgtgtcaaatggggttggactgtcattttggaaccaagtatcgagaacatcaaaagatttggtcaagatagggttgagcactagtagcaagaagggtgtgacgctcataggattgtccttgaggagtaatttggacgcttcagtaattacatagccttcttcttctttttctccttctatttcgactttttctaaagcgaaaaagccagagtgagttaaaagtcgcataaggcgatagagacaatggaatttgtttttgttgatggagagtgcaagtgtgagttgagaaatggtcatgggttttccatagttgttgataatatctggtatgcctaattcaa

SEQ ID NO: 326006 - DNA, 912 bp, Cannabis indica
gagatcatgcattatttgaagaggaagaggatgggaagagaaggttttatggctctaaactcgacatgagtaaggcctatgatcgagttgggtgggattttttagaagcaatgttgctccgtatgggattcggttaccattttgtctctcttatcatgtcttgtgtgacaatagtgaattataatgttacatatggggggagggttatgggtcctattcatccaggcagaggtatacggcagggggatccactttcaccgtatctattcttggtttgtgctgagggattgtcttcacttttgaaacattatgagcataatcgatggttgactggatgtcaagttgcaaggagtgcacctcgtgtttctcacatgttatttgctgatgatagctatgtgtattgcaaggccaatgataatgaggctgaaagagtgttgcagctcctccaagtgtaccaaagagcctcgggtcaacaagttaatcaggccaagtcctcaatatttttcagtaaaaataccaatgagggaactcgggtgagattgtgtaatgttctggaaaaaatgaagccatggaaaacaacatgtacctgggtttgccatgtactatgggtagaaacaagaatgtaatacttggttttctcaaggaaaaaatgcagaagaaaatattttcttgggatagtcggtttttgtctaaagcgggaaaaaaagtcttattgaaatcagttgcccaggctttgccatgctatgctatgagcgtcttcttactcactcaagagattttctctaatcttgaaggaatgatgtctaaattctggtggaaatctcaaaccaattctactaggaagggagtgagctggatgagttggaagaagatttgtcgtcgtaagaatgagggtggtattggctttcggga

SEQ ID NO: 326007 - DNA, 1341 bp, Cannabis indica
ctcttcacgctctctctctctctctctctctctctctctctctctctctctctctatacatctcacacaccacacacacaatagtgtgttgtgagatttatgttctttcttatctcatgagttgagaatataccgtgattataaaattatacttactaattgaatctaatagcccactctatttctcactgttgagattggcttagaagatcgtggtttgaacttttcagctagttcttagattggatgttcgataataatacgaaaagattacaagaatcccctaagagactacaagaggtattacttttcttttcattagtctaatttaatatgtacatattatgttgatatccttgagattatggttcatattggattaaattattttttaattgaatctgcttctacttttttaacacacgctggccagccataggggtcttgttcaagacctggttagccatagggtcttctcatggaagttggctagccataaggggtaccctaaagtctattcggcatatgcctgggcttaaggtccctggctggcccttgactgggtcttggaacactggtcggcccttgactacgtcatgtaacactggctggccaaggcctaggttctaagtgggggaccaagattttattttcttttgaccttagcaatggttttgtcaaggccttatagacatatacaactataatctcatacttggttcccttggaaaatctggacaacttaagactcaccatttgtctaagttggtatacttgtgatagtacttttttaatacctaaccttgtataatttagtttatctcgcaagtaaccttgggtacaattggccagaattttgtctatactttgtagctttgtcaagtcggtcacctccccttatctcttctatgtaggtgattttgagtattggtctggggaggtgacaaccatgttgtcataggttcagtcactcttgcctttgtgagaaaacatccaatctgttctctagcaactatttgagtgatctcgaggttgatattgatacattatggcaaaaactaattagtcttaccgtagagtgccaccttttaaccctcacattgccaggctggcaacaataggtagggtcagaatggtagaggaggacaacccttgaataggcttggtcagccttcggtgatcagtgttgaccatgttcttgttggatattattttaccaggatcttagatctactcacaagtatgttggttaacaccctaaatatgaaatttctaaaacgataaattaaacacatataaatttaagaaaaccttacattgatgcagcggaattaatgtctc

SEQ ID NO: 326008 - DNA, 1002 bp, Cannabis indica
actctcatatggatgtgaagccattgtactagtcaaggttggagctaggtcaataagaagagaagttttcaatgtcgagactattaaagaaaatcacttgatccaactcgattttctagaagagaagcgcgatcagacccaattaaaaaatgcagcctatcaatagcgcacaactcactattttaactcaaaagttaaagaaagaagactgcgagtaggagatctggtattgcgaagagtcatgcccagtacacgaaattctgtgcatggcgtatttggcgataatcgggaaggtccttacctaatcactgtaaaaattggtaacgtaacttaccgattatccgatctcaatgactcaagttttggcagagcttggaatggagaacatttaaagtattgttatcaatagtactcacatgtatatactgagtcaatttatttcattaatatcctaagtatagggagtgtaatcatatattgtactcttgattatctaataaagtcttagttttcaaagttctcaaaatttttgaagtatttatatttttgcatgtttatacttagaaaatgttcatcacactaagctgtgaaaattaatcgcatgagcatacttagaaaatgagttgtgtgagattaaagtcttttgaggcattaagtggcaattaaaagcacacatcaaatttagtgataaaagtacttaacaaaaggagtatccccaaagggatatgttgttcgaaaatatggcaaaataagttttcttaaatacaaaacgcgagtacccatgtaccgattaaaagaagttcgataaaagaaagaaaaaatttaatggcaggagtgttgggatcatctaccaccctggtcgtaccatctgtgactttagcagcagtcgcatcttcgacatcatcgggaaaaagatttcaaactaacccttgagtctcagtaggcaacatggtacagaaagcaatggccatcttgtaacgccccgatttcccgagacgtcac

SEQ ID NO: 326009 - DNA, 584 bp, Cannabis indica
tatatttaattgaaacatacctctttttatatgtattgattgtacccaaaataccctgatataaaggaatcacatggagagtatattgatgtgataggggtaaaatcggtaaagtgtttagaaaaagaggaaaaaatgataggttttaaaaaagaggataaaaataaaagagaaccatataaaaaaagtatagagcctaatttcctctattatttattttgggtgtagtatacataatcagtgtcttctacgagtaatgataaaaattaatgtttttaatggttttctttcattattattattaaaagaaatcttaaattttaataataatatccacatcaaaaaaattttaagggcccgtttggtataatttttggaaaaactaaaagttgctttttgaaaaatttatgataaaaatgtgtttagtaaatagttaaaaactagttttttgaaaaatttttggagaagctacagctaaaagctgcttttttgaaaaaattttatgataaaaatgtgtttagtaaacaattaaaaccagttttttgaaatttttttggagaagctacagctaaaagctgaagctg

SEQ ID NO: 326010 - DNA, 729 bp, Cannabis indica
tttttaaattaaaattatattttaaataaaaagttacaattcacatcattttaatttatatactcataaatttatatatgataataattaaaaattcacataaaaattctttgtcaaccgtaaagcttctcataaataattattatttatttatttatgcatatatatgtctctaactctagatgtgtacatcataactattctcaaaaacaacaaaaaaggaatagcatatttttatatatattgatccatgtatatagactttaaactctgtgtgaccctctcttgaattaattatatagatgaatgaatgtagttatagtcatttattttgatatatttatatatatggggaacacttctcaatgtgtattacccataaattataaatggttactaaataaatttaactataaatattaattttaaatatattaaatcatcaaattttaatctaataacaaataataaaagagaattttgaatttctatacttaatttaactacttactcaaaaaaaaaattttaaaaatatctcttttcacatcatattaacaatatgttcatataaaaatatgtaagtcaaactcaacttttacttattctttttttttttttttttgtcttaaaaaactttttttaattttttttttcaaccggtgtaacaatctcaacccatatgatgtaaaaatgagaaattttttatattagatagaaaaattaagcata

SEQ ID NO: 326011 - DNA, 1412 bp, Cannabis indica
ccactatcaactgatcctgagtctgattttgacgactcgattaattctcacagaaccttggctcaaaataggacgttgaaggagttggtcgcgctagatcttgaccaacaaccactgtgcattcattatccacatttggatgttaacttcgaactgaaatcaggcctcatccacttactgccagcttttcatgggttgcctggtgaagaccctaacaatcatttataggagtttcatattatctgctctagtatgaaaccttctttggtgacttaagaacaaatcaagttgtgggcttttcctttctccttgaaagattctgctaaggagtggttgtattatttactacttagtactagtgagacatggaatggcatgaagactgttttcttggagtgttacattttagcctctaaagttcgaagtatcaaaaaagaaatttatggaattaggtaagttactagagagccactttgtgaatattaggaacggtttaagaggttatgtgccagttgccatcatcactaaataagtgaacaactccttatccaatacttttatgaaggcttgttaccattagatatgagtatgattgatgtagcttgtggaggtgcattggtagataagacccatgcagaagccagaactctaatcttaaacatggctgccaatttacaacaatttggcatttgtcgagaccttgcttcaacatcacgacaggttaatgaagtgagcgaacccattgagaaccagcttagtcagcaaatagctcaattaaccttcgtggtacaacaacttgctttaggccaacaggtgaggcatgtgaaatttgtcagattgtgagacatactactgatacctgtccaacactatttgaagaggagactgaagatgtgaacgtaatgggtaattttcctggtcaattaagccatctctatgacccacactcacgaacttatacacctaattggaggaatcatctgaatctttgctacgacaatcaacaaaatgtccagtaatctttacctgccaaacctggtttcaattatcaataacggtcgcaatagaattttgtaccaagacaaaatcaagcaccacaaggtaccccactagcaaatcccaatctttccactgaagatcttattaatgccatggctactagttctttaaggttctagcaaataactgaagccacattgaaaactttagagaattaagtgggccaactctcagaatcgtataatcgattggaagctcaactatttaataaactaccttccctgtaaagaccgcttaactttaatttggaaattagcagataagtagggtttaattatgatacttgcatattagtttggatttatttatttacggagatttatttgaattcagaatgcattttatatgttata

SEQ ID NO: 326012 - DNA, 514 bp, Cannabis indica
caataagcgggtatttttacaccctttagcttccctttttataaaatggattgaaaaaagggaagctaaagatccattttgtagtagtgaacactttcaactatattgtccttataagtacttctttttgagtaactttcaaagaccaaaagacttcattcctagcttgccaaagaaaataaaccagagctgcaatgcaagccgagggaaacaactttttaaatttactaccttctgatctctcaatccacctaatcaattgataaagagaagtggtcattagtttccaattcacccagctcttgacttcctttagtaccctccagctaatagtgcactcaaaaaatagatgtgagacaatttttgtccccgaaccacaaagaagacacgagcaatcctgcactaaggtggcgtttcgttggaggtaatgaaatggaatggaatggaaaggaaaatttttttattccattcttttgtttggttgcattttaaagtattggaatgacattccaat

SEQ ID NO: 326013 - DNA, 842 bp, Cannabis indica
cagttttctaacattcgtaaaggttctttatcaatctctgactatgttgataaagtgcagaccatcaccgattccctgggaattgctggttcatctgttgatgaacaagatgttattttacaactccttaatggcctcggacctgattatgactccgttgtttttgggattacctcaagaagtgaccaattatgtctcgaggaggttcaagctctccttcttgctcacgaaagtcgactcgagcatcatcattccatttctgatcttaccatcaaaatgcaagctaatcttgcgtacaacaattcaagatctggttctggttcttcccgtccttaccaaccacctggccgtggttctcttagtgatcccccaaatcgtatgcaaggcagaggtcgtggttctttccctccctctcgccttatctgtcaagtttgtctcaaatctgggcatacggcagctgtatgccactacagattcgacaagaattgggtcaccccgaagcctccagtctccacacatcgtgcttttcttgttgaacatgactcagaagctgattctctcccctcatccaccactatactgcctgattttggtgatgattccatctggtttgctgatacgggagcaactgatcatgttacatccactctcacaaacatggattcggctattccatattctggccaagacactctagctattggagatggtaagagacttctaatttctcacattggttcagcatctttaccatcatctaataattgtcctttaaacttacagtctgtattcaagtaccatctattctaaaaaatcttgtgagtgtctctaaactaactgca

SEQ ID NO: 326014 - DNA, 953 bp, Cannabis indica
taatttcacaagtctaattgtacttgtatttttttagtggatatgtcccaaaattacagtaaaaacaggtaggggtcattgcaattccaaagccaagtgttatctacctggtgaatttcaatgtttccctatcgacaatagcgttgtgcttgtaataattcccaaccttcagctgtctttgggggcatctttccttgacgactcttagccaaagcagccacgacttgtcttaaagagtttcgaaccaaagcgttaacactcgacttttctttcctggttgaagcagtgcatccacattaagcttgtgtttccccatcttcggaggtagccacttcctactttggtttggactatgagggggaatatgagttctttgttattgttgagcctgttggtaaaaggccaaaaattcctttgcttcctgacatatcctggagggttgttcctgctgattcctgaacacaaaagagttcctgctgttccaagtcttccaaagaatgcatagaaaaaggttaaaagtatcacttggaaagtgggatttaatgtataacaatatatcaatgctattttttcctctcaaattactaagaatatgcctaaaaaccgtacctgaccacaccctcttaacacccttacagttaaaaagagcatgctgaatagactcaggatacagttcacaacgaggacaggtgggggagggataactatttctacaatgtaggttaacaacagtgggaaaagtgtaacgccctgaacctcaggaacgccacgtgtgtgcttttataatcttattatcaataatctattagtttaggaaaagtgtggtttaattcaaaaaaaaatatattatctttaattaaatttaaaatagaaactttagttcaaaatactgtcgtaatatggggatcccctgctaataaatttttttataaccaattataaaaccattaata

SEQ ID NO: 326015 - DNA, 1106 bp, Cannabis indica
gatcctggtaaaataacttccaacatgatgtgtattcagaagattgggacccaacgtagatgaggttccttctactccaacggacgccattatggttgccctgggtgatacacaatctcaggatgcgcaagagttggatgggtcacttgctggggtagtattctccagggttaggagaaaacggaagccgcttttcttgaatgactacacagaggggaagaagaaacaaccaactgggctagttgaagtagacactctgagactagcagactcgcgactgttaattttttttttaaaagtgcattacttacgcgagggacaactgccgtcctagggatgttcacactggcccatccaatccatcctagttcgtcaaagtgatggtgcagggagaatggcttaacgatactgtaagttatttcttaactattcaaatttattattttttaaatttttgtgcgacttaaatacgatctatgtgcgatttatttgcaatattaacaacgttatgcgattattgtgcgacttttgtgtgatttctacacatttttattttatttatttttgtgattattgtgcggcttctgtgcaatttatgtacaattactacacatttttggtgttattttatttttgctattatttgcaatttatgtgcaatatttgtgcgatttaattcgatttaattttaaaataattattttttacagtttttgtgcaatttatgtacgatgtttatgcaatttatgtgcgatatctgtctaacttttttcatttggaacacaacaaattgatgccatggcgcacttattgagaagaagatggaaactctatccagaagtgtacactcaaaaaggtgtggttttggacacatgtgctccacagatattctcgacgtattagaattattctgaaggtgacaagagcacaatgaaataggatgaggttgtttttaattatgtgctggggatagagcacagacacttgccgtgttgggagaaccaggattatatttactttgtgttgaaccttcccacagagtaccaatgggtggcagttgaggtagatattgacaactgggagattattgtatatgattgtgatat

SEQ ID NO: 326016 - DNA, 675 bp, Cannabis indica
ccagttcataagacaatatatacgtatatatatatttttgtagagattccttatcatgcatattaactaaccatgaataggaaagaatatacatataaaatattataaatgtcacgagaaatttttatcaatacatctcgcaaattgtgctgctaaaaaattaaaattatagtggtaaaagtttaactttagctagcacatttacgtgttaggaaaaatcatttttgtccgagcttttcatattgcactggcaaaagttctaataccaacattaatttgtcaacctcttttgccaacacatcaaatgtagattacgttttgctagcacaatatcaaactcttgccaacataaaaatgtactggcaaaagtgacatttcttatagtaattcttatcaaaagatacatacaatctatatatagacaccaatttttaatacatcaaatttttttatttatacactaatattatttgttctcccgataaggacacatggaattctcacaacaaatatagtttaaatacttaaaactcaatagcgggcccaaaagatacattaggccggattcgcaagtgaatagtcttttcggatgaagaacagacaactaggggtggagccagaactaaagagttggggggccaatatcagatagtgcaatatacaataaatttaaat

SEQ ID NO: 326017 - DNA, 1181 bp, Cannabis indica
gagtgtctaagtaaaagtttctcaaattacttaaaaggcccttatccaactcacatctcacgggtactcataattcatcgaactccgaaagaaatatttatcatcatctaccgcaattcaacgaaaccaaattttccgccacttcaccaaatcacgcatattgttgcaccagctcttctcacgtgcataccagcccttcaacatttttacgtgtaattacaataacaattattatttattttatttctttgttcttatatagaaagaagtattaactgagaaaaacactacaagtagaccatatcaattccaccactacaactcacctcgcccaacaatgccgtcaatctccataatcctcctctccatactaattgctgttggagtgtacagtcttctcaagaagctgcgaagcagaggatcctcactccccctacctccaggcccacgaccatggcccatcgtcggaaacctccctcacctgggcccagttcctcaccaggcgatagcggctctggctcggaaacacggtccattaatgtatctccgattgggcttcgtggatgtggtggtggcggcctcggcctcggtagcggcccagttcctgaaggtccatgacgccaatttctcaaaccggccgccaaactctggggccaagtacatcgcttataactaccaggacctagttttccgtccgtacggtccacgctggaggatgctccgcaaaattagttccgtacatcttttctccgccaaggccttagacgattatagatatgttcgccaggttcgattattataacgttcttcctttaaactaatttacatacataaacatatataacgctactttatccaatctattacttgttactaattaattgattattaatttcttttagaagcgtactgtttatattaatttttgagttagatacctgaccccacacgcaccctaattaataccttctatatcgctatatagcctcaatacaccacttgagctatacagagtatctaggattacctcctagttacatatatgaatcgtattaatataggtccgagcatctctgtatatatataaatctatttaatgatataattatattgctcagcaggaaagaaaaaaaaattaagggtctaatatatatttacttatatatatatttgtatatata

SEQ ID NO: 326018 - DNA, 950 bp, Cannabis indica
cccaaatatccacattagttagacggacaaccaatggatcatctacttgctgtagttgctggaacaccagtaaagagcaattaaacgtccaaggacttttgtcaataaccctccgtatatcgacttcatgataaaattggaacaggtactaattatcacccagttctttgacaaacagttcatggcctggttgccacaaggaggccatcaattgttgcatagcgtcgaaatcaatacttcgttgggttaagaacctacccaccaaacaccagcgatcgtcaatagttggtgctggttgaatagtctcaaataaagctaaaacatcttcttcctcatcctccatagcaatattagctctttgctttgacagatcaagagttcccatactactagaatccataaaatgaccaggcagaaacaaaacacgggaaaaaaaacttcaaacaatatgatcaaaccaacatgtcatagagacaagacctaattcataatctaaaagttgtatggaaagaattttcaaaactgtcgttcttttcataactttcatcgatttttttttcgtaggactttcacgagttttgacatgtctttgttgtttgctaaatgcttagtaatttcttaattgtgtataaatttatattgaatcatgttattttctgttattaatagatgacaacttagacaagtattacaatgtaaaacatagagaacttataatataagaataacttgactcgcctatcgagacatcattggattcttattttaaatttgaaattatcctttaatttttcctcttagcttattcattttgatttagcttaaataattatcattggatgaatggttataaatcatttgcttatgatgtcattctgttttctcttatgaaaattgaatggcgcatatgattatattcccgatattctatcctgaaatgatataaatcc

SEQ ID NO: 326019 - DNA, 1202 bp, Cannabis indica
cttaaaagtttagggggcatgatttggtacatgtcaaagttcagggagcaaaaatcctaattagcctttatttattagtaagaaggtgtggtttttgtaacttacatttattaaaaataaaaactattacacgatcaaacaaatcttagaaaaataaacttcaaagcttttaaatgggaaatctatccagaggacattacttaaaagtaatattttataaaaatatggtcattcagaccttagcactaaaattaaaaacttctgaatgaacagtccatctaaaaggcaccacttaagaatggtgttgtacaacactatgcaactaggtggtcttcagacctttacatttattggtagaattttcttaaatgttcttcgctctaatactgaggcactaagacgagttctatttttcatcatccgacccaatttgtatactccaaaacttgtaacttcggtgactttatacgtcccctcctaatttggttcgagcacaagagccacgctgtctttcatattaaagaaatcttctgagtatcgtatctcccaaaaagaactttctttcctttacttgtttgttgaagtatatagccactttctgtggatgggcttgaagctttaagcgtgctagatctcttctttcttcaagttcatctaatgacgctgttaggaggttatggttgacatcttgatcatagcatagtcttctatgggacaaaggttccaactccaccggtagcattgtttcatagacataggctgatgcaaaaggagtctatccagtagttgtccattcagtggttcaataagaccagagtacttcaggtagttcttcaggccaattacccttagtttctacaagacatatttttagagtgtccttgagtttcactatttcgacctgcccatttgcttgagggtgtaccacttttgagaagctctttacaattccatgtttcgtatagaagtctgtaaacatctggatgttaaactatttctcattatctaagacaatattatgaggaaggtcgtaatgacatataatgtactttttaccaaaaaatctaagactttcttagaagttattatcactagtggttttgcttccgtccacttagtaaaatagtgagcaacatactgcacactaacttttccttttggaagttgtccaattaggtcaattccccatattgcaaatggcc

SEQ ID NO: 326020 - DNA, 1053 bp, Cannabis indica
aaatctggatgacaaacttgtaaaaacttctaacaatgatcttaaaaatattagagttagggaaacttcattaaaaaaggaatcacggttgtaaaatattagtgtgtgctattttaatgtatctaaatcatttagtttatcttatttaattatgaaatatgaaaataaatataaaaactttgattccactacatgattatcgagtattgacccacctcaaactttggtaagaagtattatcaaaagtttaaccaaagtccaatctatggtattaatatatcatattttaaaaaaatatagaatctaaactattatattacaaaagaaagtagtgaataatttttattaaagcataggatatcgaaagtattatttaatcttttataaattattaaaatattttttcatatgactataatttatgcatatattgtgcacctcatttaataagaaatgtgatttgtttttaagtgaatagtttgacttttcttaataaattaaataattaaataaaaaatatgatagtaaactttgtgatatttccttaagaaaccctcttgctatctcttaagattttttatgaatttattcattagtttctagacccttggttagttgcctccttagaattaattttgttgattatgtggcgaacttagtttaggaggaacaaaaaagtatataatgacaaaataattgctccaaatattattatcttttggggtcgtgattttcttattgactattagagattagaaagtctcaaaattaattctcttcgagtaggagcttgtcgttctcatctaaaggctcttctaattctgtttgggtgtcgcttgtttggggtaatgttaaaattaaggtcaatgctacacttggtgcttctaattgaagatgtgggttagatatagtagttcatgaatccatatgtgaggctatggtctctgttgtttggtacattctgagtactttttctcttgaaatggcagaaactgaagcaaatgagagaaaattgtttttatttctgatgatctcttttagtatatacaaagg

SEQ ID NO: 326021 - DNA, 2759 bp, Cannabis indica
tgctatttgtagtctattttgtacttttttcttcttcattctttgtgcttcttctttacttattttttatctcctaacagctctgatacaaatctcccactttaccacagtgatgactatttcttgatttccttaggcgttgattttgatcttgaatgtcctactaaatcttgagttgtcctccttggatttctcatcgagcaaacaaccttcatcttgtcttgatatttgtctgaaaacctttttctaattcaattctgcatctcttgacctatgggtgctcataacattttccagagttagagtatctcaactgtacatcttcccgaaagtactacattacattaattaattcaaaggtgtaatcaattttgacactttttcttccaaaagtgagacaatcttttctatttttaaaaatattatttatttattctaatttcttaaataatagctttatattataattattaaacaaaattactatttaaatatatttattaattagaccttccaaggtctcctaattaataaacaaaccctgcattatcttttcttctcaattatgcccttagtaaaattcataaataagacatagtcttacttagaattctaattgattaaataaattaattaattgagactacaaaacaatattatcccaattagtacggggaccatgggcctatgtaaccaagctcctaataagtaaatctgaaatttaccaagtaaattttctagcttatttattcctcctgactctactatagattcggaattgcacttttgattagacagagcgctctatatatcaaatatagatacgctgtaaattatctattattacaatctaaataatcaacaatcctctatagacgatctacattgaatagggactaaagtaccgttttacccttcaatctactttatccttaaaacacttagctacttgtaaatgatattttggaaaactaatataattaccaaaatgagatctcaatcatttaaacgtgtttagccaagctctaaggaaactatcattttacttctgtgtacttgtagaagctatagattctaggagtgtacatcggttggtttggtcgggttatagcatatttttgttgacccaatataaatatcgggttacaaatattttatcataatctacccaatcagaaattagaaaaagttcaacccgtccaataatttcgtcagtttggtcaggttaatccatccaaaccgttttcacttttttttttgtaattattattgttagtttctagtattcaaataattagatttaaaaaaataaatatacattatttatatttcaagctgaaaaaatactatagcttaaattaattttaagaactttaatataagataaatataattgagtaaacagacacgtgtcacccatccgaccagctcagtggccaaataagtctacatgcgagtaggaagttcccacacagacttgggggcaaatgttatctcaatttctgtacaaggtgatgtggcatccacctgggtgacacgtggagaagacacggtgacctggacagatagttcatcctgtgatatgtcgtccatggtaatttatcacttgaaattaatcaatctatagaaggagccaagaatgtccggacagagtatgccacaccatctgatcaacatctagtgtgcagttaatttgcacgcaccgaccatagattgtgagttaaatatctttagggatatatctcatgaatccacaagcttggaagtcacgatcatatccctaatttcatgggatagattcacattgacaaaaatataagaggaaagccacctagtttcctattttgctttatttatttcaagtaaataaatttcttattttaattcttattatttttgggaaaccaatttgatgtaattcttccctataaaaagtggagtcgtttgactatttagggacacgagaaaaatcagagagaaaagaatcatagatttaatggcacgtttactatacagtattcaaaatcggaataaattaatgaagaaatataacggaattaatgaaaaataatcgcaatcaatatttgtaatatgttgtttactaaatttttttgaaaatagaatagttgtgatttatcttgtttactttattaggaaacgtaatcagaatgcttaaattgactagattatccttttgagttaaactatattatatagtagttattttgtaagatatattttaaggacaacattatcattatatatttgatattaaaaaataaaattaaaataattaaaatccattacccttaatgacattccttacaaaatatgtggggacagttctccattttttttctcttatttaatcaagttttccctttcctaatttcaataatgtaagtaaacaaatgtaaaagaatgattaccttactattgattcacattacttattagtaaacatgtcataagagaaatactgaaaaatcattataagagcttttaagagagatcaagaactccttgcttctctctcacaagttaatacaagtaaaaagagagtagactattaccaccatcacgagactgaacctctataaaaactttgatattctcttctctttatttttatcattattgttattaattatttttaatcaattaaatttgactcattgtagtggactaaaagcaatgtcaacaaaatatatattctattcttatatataagaaaaatatgattaaaaataaaattaaac

SEQ ID NO: 326022 - DNA, 999 bp, Cannabis indica
ctatcatcaaattgtataacaactcttttattacactatagatcaacacaagagttacaagtgacaacaaattgtaactcctctccaagttacaacatgtaggttacaaagtgtatattaaaatcataggttacacatttatttaccatacacttaaaatatattatttagataataatatatttatcacattttaatctatacattattatattaaaaactaatataacagatagaatacacaacaaataatcctatataccctaaactacaaagcataattctatgttgcatgtacaaaatacaaaacgaaagaaactaaaaaacttttatgagagcgtatgagaataaataaataaataaatatataagaaaaattaattaattactttaccaccttttaaatttattggcatcttgtttttattgttagtgtgatctcaatgaaataccaaaatatataggttaactctctctatctataaatatatatataaatatatatatatatatatattcaatctgttataaaaacaaaaacgaaaatctacattaagaaaaatagacttctaaaaatatgagaatgggatgaaattcaaaacattgaagaaataaagaaaaaaaaatagtgctgagaatgtaaagtaagaacatattagttagatgtaaagtaagaacgtattagttagggttaggtttagaaaattcaaagtattttctaatcatattgagaataaatactttaaaacaaatgtttagccttattgtttttttaaggttttaagagtgatttttttagtcaaaattttttaaaatatagaaaattagaataattgttgtatacttatatgaatattttaaattaaaaaaatataaaaattaaggtgagaatacatagactaatttaaactaattttagtgatttttttagtaattttttttaaaaaaaaatagaaaattagagtaattttgtataattttatattaaaaaaatataaa

SEQ ID NO: 326023 - DNA, 993 bp, Cannabis indica
ttaaatttcaatcacacacatagaatgtattaactgtaaatacgtgtgtatcaacccgacttgacttatatttgaaaagcctgcaataatataaattgcattgtgctggcatataaaaagatatgagttatgtcatatcataccaatatttaaaagggtaagcctgatacggctagtaaactcatatttcgtaccgtgctcggactcgtatcgtgttttactcgggtcgattcatttttcgagtcaacctatttacttatatgagctcgaattcaagctttatttttttattatttttttacaattaataatttaatcactaaattatatatattttttataattttaattatttttatatagtaaaatttcattaaaaaaatttatagataaatgactccacctaattttttatactttttattattttccttttatatatatggagagaaatataacaaccagaccacactctgactactattactgtcaaaatttaaatttaaatatttatttagaattaaataattaaatttaagtatttataacattaattattcttaaaaaatttaaatttaagtatttataaatgactccacctaaatttttatcctttctattattttctttttatatatatggaacgaaatataacaaccacaccacactctgactacattattaattattattattattattattttcttctcaaaaatcatgcattttttttttattttattttgtcttttttaaaagaaagagacaggtctgtcttaactcttaagaaatgaaaaatttgagaaaatccattaccccatttctattattatcaataatatgatctttcctatgtcgacagaaaaaacaaaatgtcaatagtgatgaatatttttcacccaaattaaaaacaaaatttatttaatctatatataatttatgggatatgattttgtcctgttattgtactttcacggattgtaatccgtgatg

SEQ ID NO: 326024 - DNA, 1871 bp, Cannabis indica
aaatgaataaaaaaaaatataattagtgtagggcccacatatggccagccactatagccttattttgctattattttatcatttttattccatataattcaatcctaaccctaagtgaattagtataaaaagaaaagaatagtctcattatccaactaatgcttttaaacctagttttcattctgtcattcaactggtgtttagagacttcttcttcttcttcctaatttcaaaatccaatagttttcatcacaaaataatttcgagccttaatgattgagtgcatgcccacccatagcaagttagtccttaatcatagtgtgtaagactgtgaagaatccaaacaacagaaggagaatcgggctcagatcttgataatactctgctacagaaaggaaacaagggtgttagagatctgagtggaaggaaacattatattccgctgcaaccaacgtaaggtttctcatactttatatgtgtttaagtttcattgttttgtaaattcatatttaggatgtgaaaaacatacttgatagtaaatctaagtctggtaaaatataatccaacagtttgaccattctagggtggaacgtcattgttgcacccaacattttgagttcttcggttagtgcgctcaccactagggtaactagtggcactatcctcattcgaattggggtaagactccccagtgcgaaacctactctggccttgccttggcgggacatctgaccgtcattgggttaataggatggtggccttgtttgggacacagtcgatccccctgcccgtgaggttttcccatgattcctagggcggtgagatccctttgggacatagggaccttttctccaaaggggatcccttatgaggtggctcttcaacctgagatcctaccctcttgttgaacaatctaattaggttgttagcctccctattttagcggttcaactttgcctgttgggcttggaggattgtagcttcctgatccatccactcttgaagttcgcatctctactgggcaaaaacatcgcccatagcagcgcgtgttgcttgttggtcatgatgaaggagatttgtatgaccctgtacttgtcctacgacctctctcaaccaggaaagtttagagtcgtcccctaggtccacgtggggttcgttatagggttgccaaccgcaggtcaagtctcaccatcataaacacgaggtccaaccctcgtgccaggaacttcagttgttggttgaacaatggcccccgtaggaggctctttacttggttggacctctgttgtaatatcacaataagcctaatggtaaataattagggtttatatttatattatgagttaatcaggtaataagtgggattatgatcctactaatttatttcaccataaaatgtaaaatttgctaaaagtgagtaaataagcgtaatttgtaaattacggagatttatatagcatgtgtgaatataatatgagttatttgtgaaataaatatattttcaggttcgacgaccctagagacccgattggaggccaaaaatgtcacaacagttttagttagaaatattgatggaattattaatataagttgattttagcaatatgagggtattttagggtactcgaagttggcgaaataccctaaaaatagagatttcttaatagctaagaaataataagataactattaataataaattttttattaatattattattaatattatatatataaaacgatacttcagtttcatttcgttttaaatatatatatatatattaagttttaagttataacagtagaaagaatgcagaacgaaaacctcgttctccctccttcgacaaaccttctcctcctatattcatttt

SEQ ID NO: 326025 - DNA, 1144 bp, Cannabis indica
agagagagagggaaaaatcgggaagagggttgttgggttcggcgtctgcgtggtcgtcgtcgtcgggttagatttcgttgttcggttgttttgtttttgggcagggatgaagaggaaaagtcggagagagagtgggaaagacagagagagagggaaagacagagtgggaaagagagagtgggaaaattaaatggaaggggtattttgggtagaatttgaaaatagtggaattgttttgtataaattagtaaggggtataaaatttgatataagatatattattaagggcaaaaattgaaatttccctttaactattcattaaaaattgtggaaattactactatacttcgggcttacttcgtaacaagaggttagaggtcgaggttgaggctcggccggggttggggccgaggccgagactacttttgtacagtttttaattttttattttcattcatcgtgaaaaatttatacgcgctttcttatttaatagtatttacatttttatattatatttggttgagagttgtaaatagagttagtaatcattatcaatatcatgttatggttataataatataaccatcaattgtaacatataataaaacaaaaataaaaaatcttttaatcaaaaaattaattttttttcacaggtcatttgtggtctataacattattaattgagcatgttatatgaacataatcttgttttatttgttttcattatctaattagcatcttaattataataattatatatatttttttttgaaagaaaattatatatatatatatatttgttatatgtgattgttgaaggccatgtgtatgcaacatgtattttttatttattttttgttaatataaaataaaagaaaacatgaatatggccaaaaaataaggtctcatgcattttgatataattttttttgcttatgtttatagttttttcataatatacaaatgcttagttaacgaaccacctccacctcttttattggttttaattttcatttcgttcgtagacagtgtaattttatggcccataatgtggctaactgggctttttccaatcagaggtttggctctgtgccgatttcctctttgcctgaaattatatgttgtaatgaccgggaggtctaac

SEQ ID NO: 326026 - DNA, 1162 bp, Cannabis indica
caaaaacggaagatgatatgttagttttttacagtttgactacctaaatttacgtttggtggggtatttcttttttttttttttttttttgtatctcctccactccgaacaattgaaaaattcggagtaagcagccataaaatgtaatttataatgtacgaaaatttgttagaaacaagctgcagattaagaatgattttgtgaaaaataatattttttgtatttttcaactcttttttgagtccagtggaaaggaaatcaatcttacattttaacaataggtgtatgattagaatgtcttgtttgtcattatgtgtgctatttaaagtttgaaaactgacttgatacgtgtttgtttaaatttcaatactttagattcatttttagaaggttgaaatctgaatatctgatgaactaaagcaacacaattccagaaatatgaacaagtaattttactaggtttaatcgagtttttagtgtaacatgttgaacaagatggcacgatataggttaggtgatgcccatgagatgctcaagtggtggtcaagtagtggtgcatgctggtggaatgttgatacttagtttgtacaacaatgatattttcataaatatctttattattattcggatcggaataggacttggtattcgccatttatttgagtttaggaatacaatggagaaatcatatttgaagaacttagagaattggtatacgttgatgaccatttgtctacagagcaaaaattatatatgttcctcatagcatgctaaaaccctataatgctccttaaggtgggagaacctagtattagctctccacaccccatggtaccttggtgataagtgagctactactagttagtggagatagtatggcgagcatatgaggaccacgagaggactcatatgtcttcatgagctagagtactcatggacattattgggccaacccagtagtgcttctagagatatcaccaaaggttagttggtacgtttccatcagcttgtcggtctgccgcttgcatagaatgtggcctaaatctttaggggacattgtggtgcaccttggccacgagtctctacacgagatgacacagatagtaattcgtggtcatatgtgcatggaacggatgtaccatacgagagagagagagagaga

SEQ ID NO: 326027 - DNA, 693 bp, Cannabis indica
aacccaagctcactaactattgtattattaaaacttgaaacttttttttacaaattcattttcaagccttatggtatttttgacaagtgttgctcaaactttgttgtatttgtgatagtttaattatttatagtctaaactgaataaactgcaccgtatcgcacctttttttgtagtgcaatttttgtgaatttttatttttgcggtgcgaatacagtttggaaaattgaaaacatcacgtgtatatattggtttaagaaaatagtcaaagtgcttcaaatactttaatcaaagtcctttttaatgggtaagaattacaataattaatatagtttatatataaatatataaatgagtattggtaagggctaccatatctataacattatgttgtataattagttagtaatttcttataatttttaataaattaaaataagtatgattcaattttgaattaaatcaataacgatattatatctcataaaagtgttaaatactccttagcatttatttataaaaaaattcacttcttacaatatttgactgtaccatgacagatattcatacccagggacggagctagaattaaagagtaggggggccaatatcgaacaacgcatacaataaagttttacattaagaatttcagcgacggaaactttatgtatgtccattgaaaaaaatatgata

SEQ ID NO: 326028 - DNA, 765 bp, Cannabis indica
gggacgcttggaaggaaaataccgaccacggtggctttgtttgggatgagtccatcttggaactcattcgtggggatccactccaattcatgcaatcttagtaggatatggagtgcatatacatggccatcttcttggaccgacaaaaacattgggtggctatggaggcgaatcttgaggtcttagctatcacaagctctgggtttgggattttgggtttgttggggaaggaggacaaagaaagagaagaagataaagaagaaaaaaaaagagaataagaagaataataatttttttttatttatttattttagattacttttaaaatttttaattaattttataataataaagataattaaggacaaatcaaaacatgacacatgtataattgtgtacacatagatttactagcttggcatttaactttgaaaatttaacggaatgataaagaccacaatagagattcagaggtttcaccaccaaaattttatttgagggattaagtgtttaaaaatatataatttgattagtttagccgctaatatgccaataatttatgaaatctcaaaactacaatcaactagtacatgatgacttatgcgtaaatatcactttcttttacgaaaaatttgactttttataaatttattagattaaaattattttcctaaacctaagttaacccatattggtagaataggctaacatttcataaaatctaattctacccatcccatttcaaacacctaactctctctctct

SEQ ID NO: 326029 - DNA, 825 bp, Cannabis indica
cttaaatagaatttatacattatatatataatgatgaaataaatcatgtgaactatgcaacataaaatgttatttatgatctttattaataagtaaatctgattatattgaaatgggttttatttagggcacaaaacccaacacttagacatttcagaaaagtataggggccttcaaggctaccccactggtattcttgagcctacttcttttgagacttgttgcatggtgattcgatctagttattatcattacaccatcctgctagaaccactgaagtaggaacaacaagcaccaaagaaagaggtgcatcaaaagaattatgctgccataacaactggatttgctcaccttgtctattaattttttcttttatttctgcaaacttttgctcccacctagcaaatcttgtggaaaataatcatcacactcgccagaagccctctagtggcttccactttggttacagggacaactaggattccaatctctccaaccattactagccttgaccacgttgttctgaatctctatattgtactaggtgtccattctataggatagacttgtcaatttataagtcaatctggtcaggcaacggtccaagttggaatcatactaccacccttatggattataagccaatgcattcaaattataatcataaaactattatgcttccttgttgggcattgtgccctaaataaaaaattctatttcaatgtaatcttttctattcaattatcaataaagaaacagattttttttcattacttatttaatgtgttctttagttcatgtggtcatttatttgtttatttgatt

SEQ ID NO: 326030 - DNA, 1186 bp, Cannabis indica
aacttcaaaatttcaagaaaaatattcaaatgcttaaccttggatcttctatttttgaagaaaaatattcgacctaaatgtttcaccatgaaaaatttttacaaaataaattattttggtaatttgaaattttttcaaaagaaacatagtgctttgaaacaaaaatggattgaataaaaaaaatttctagctggttttttggacaaaagtggtgcttctccaatgtggtattttgatagtagttgttctagacatatgacaggtgacaaggatttttttgtaaatatcagattaatggaatgtggtgaggtcatgttacgaaattgtttagcaagaaatatcattgggatgggaactcggaattttgaagggttaccaaggttgaaaaatgttatgcttattgagggactaaggttataccgccaatttcgacaatgatcattgttttgttcttaacagtgataaacaatgcattttacaagggtttacatctgttgataatttctcacatatgttcttacttatcattctacatgtgaaaatactagtgctataaatactttcaaaaatctcattcaacattcacgtacaaaacatattgatataagacatcattttattatagaacttgctgacaaccaaccattgtagttggaattggctggtattttcactaaggccccagattcaagtcagtttgactcccacagaaaatctttggggattcgcattgtataactcttttatttttgttctctattttgcacaaaatttttttgagtagttcttatcttgcatccatccttctttcattcttagtcagcaaaacttgtttatgcttttgggtgataattatcttagtgtcttgtactcttcatacttttaagattgcgttaaaagatttaagttacttgcatatgtgtgatcaagataaattaaagtattaatgtacagaggtgagcaatttttgtttcagtttcttgtcaggccccttgatggaatagagctacccatactggggtgtgaaatacatcttttgagtaagctggaactttgtaattaagagttatgaagaggatgcagtaccatagaaaaaggctaccttcagtatggtgtgatagcatccaattgtgagatcaaattgaaaaaggtgaaaaataaaaatcttgccaaggacaatgatcct

SEQ ID NO: 326031 - DNA, 815 bp, Cannabis indica
tgttaaagtacttttaagaatatatttagatcagtgatatatatttttttgaattttataaatactaacattataaaccaaagaaggagactgttatatgatattagagtgagtgtgcatttgaagtgtaccctatatggtgggtctaatgaaatgtttagtgggcaatatgaatacttttgaaagggtgagttttaaattcccacttgtcaaacccctccccttacccccacaaagcttataacaaaaaatattctttttacacgtttttcttttaatcaaattcacttgacttcttttgcgtttttacatcttttatgctacatttgcttacatgttcttcatacatcattatctagaaaataatcaaaactcataataatacattttaaaagtaaccaaaaacatagtgagggtagcagatgattataatgttattaatataattgaataaaaaatctctcagttattcaggcgcagaaattctagctctaataatagttgcatatgattggttgttggaattggatttcctctcatttcttttgagcctagttatttagatttgatctttgcattatttaagagtattttctttctgtaataatttaggctctctatttaatgtatttttttaatttactgtctaatttttctaagacgtcccttattcatgcaaattattcggccaatattagagtagatatggtgagctaatttggatggaagatcttctgatatatatatagaacacttctaaatgattattatttattgatgggtactaaatagatttaactataaatattaatttt

SEQ ID NO: 326032 - DNA, 665 bp, Cannabis indica
ttaaaaaggagaatttggtcaattgcactaacttaattttggtgtccctttctaggagctaggttgttacaaatgaaagattggatgagttttccttgaaaagtaagattattgtgttttgttttattaagaaaattttctcctacacaaattccacatgaaaagagagcatggttatagtaggcattatttttaagtctaggcctagggtcaagaaaccttcatttgtggcatctaggagtgcattcaaagagtcaacagttaaggtgaatctaactcctttgagagttccccttatgctatatggcttacaagaaatttcaatggaagcgtaaaaagcccttactagctagcctaggataaatgtttgttgtatacttatcaaagtttcccaactcatatctctaaatagaatgctaaaattgacataatcaaggacatctaaataacatttcttaccatttagtatgtctcttttggagaaatctttatgaaatctactcgcaaatctttcatgagagaagagctcatgcctatccttggtcctcttcttattgcaaggaaaatcttctcctctttccttgcctagatgacgaagcagccattgaagaaataagagagatggagagtattgagatttgagaacaatatggattttgagaaaa

SEQ ID NO: 326033 - DNA, 461 bp, Cannabis indica
gatcctcgtaaaataatttccaatagatagtacagtcaattatcaaataccatcatccttagaagaagaatcagcttaatccttaacaaccgccttgcccttgaatctggatgcaagcaaatggacgagtgggttgtgtagagccctggcctctagacttaatctgaagagaagcgtctccaactgtaccctcctgagctaagcactggcagagggccctctctctcttctctagacctcaagctatccaacacagaggcacgtcatcatccatgataggaacttgtccatcacaaggacaaacccctcagcatttgggactccatccataccaattgatggaccctaggcccccacaacttcagaggtaggaggttacaggtcgtacctctaaaagttggccacactagctgttgggttttgtgccctaaataaaactctttacaatctgattagttatc

SEQ ID NO: 326034 - DNA, 877 bp, Cannabis indica
gaggttaaaattttattttatcctctcatttttttattatttttttcttttaaattaaaaaataaatctctcaattatttttgactcttaattattagacctctcctcgtgcatagtttaagctaaatttagctaaaaaaaattagcctaaatttcacaatagtactcatgtatacttgtttaggcaagtaactgtactttttaaattactgtactaacatttgctaattaagggatttaatataaaatcatgtttatttaaaactttaataaataaatattttcataaataaacatcataaatgtaaactgtttacaaaactcgggatctcacaatctattttttaaaagtaaacatagcaaaagtatcgtccagggactaataaatacgagcccatattgtcttaaagatccgagcactctaggtctaataacatgcttcttgccaggcttttctcataacatactaataaaacaaactactaaagcaataaatgcttactaaattgtgagtcaactaatgatgattgtacatattgtgacgatctttgaaagacaatcttgcggctctgatactaaattgtaatacccctactattttaggcatgttactttgagtttatattaattgtgcaacccgttgctaattagcgagttagttgaaaatcaggattaattaaaacattatttatttacccttaaattaaaagtaaatgacttctatttaaaccgggatcccgtatttaaaatttttacaactgtaatacaaaatttttgatataaaagttgtctcctagagactactcaaaacgcagcctattatcccaaagatcgtacgctccaggtctaaccaccccaacatgtataatcttcatat

SEQ ID NO: 326035 - DNA, 1762 bp, Cannabis indica
  modified_base (198)..(198): a, c, t, g, unknown or other
atcttaatttttttgcctctcattttcagttttccccttttctctctgatttttgaattttccaactttgacttcctataacttttctttgctagaaagaaactataagtggttcatacttacagaatcattcaaagatctgcattttcaaggttagtggaaaaaaaattcaactgcttcctttatttcgaaattaancttgattctgtgtttcgagaggtagaaaatgcatgagacgataagatatatgtatgaaactttatttccttttttgacaaaatatacatttctctgggaaatatatacctgaaacttgaataatcacggatttcaggaagaacagtgttcgtaaatttctcgttgagtatttcgaatactcgcgagttttgtgatgaacatctcaaatacttgcatacacttctgaatatcaaaaatgacttagtaaatctgtaccttagctcactactacaatttggcattttagtgacactatttagtgacccacataaatatgtgtgtcactaaagatttaggggtcatttttagtgacatgtacaattagactctaaatattcagtgttagtctcttataatgtgtgtcactaaaaatatggagagtcactaaagagtaaaatctaaaattttctaatttttattaatttaaaaaatactgatctatagtgacacgctaggtgcgattggataaatatatattgacacacttagcgtgtcactatatcacaattcttaaattttttttaaaaaaaatatgtataattaattaataagtaaataaaaaaataaaatatatatatatgtcaatattagataaccaatacattttagaaaaaaaaaaacaatttattaataaaataaaaaatattattaactaaatatataaatgagataaagaaaaccttaaatttcttcattaactatctctacgctgcctctctctctcttccccttttctctcatctctgtttttgcgttatgcacattaccatcaaccatgatcgctaccctctcaaccttcgaatgggttcatcgccggacaaaggaaatctcaaaacctcaaagtcccaaaatcccgactcctccgttctctctcttgtctccgatgcagatctgctctgtcggccaaagagtttggatgagcttctctagcatggaaacaagataagcttcttcaccatccatctctttaatcctctttctacatatctccatttctttattattaattttttttttaattcctgggtttttattattagatttcaaattgatattattaatgtaaggagtcatattagaagatcattcaagggcatggattgggttcttctcaaccatttaagggcgttgaggtcagttggtgctcctgcaacattttctcaattgagaacaccatcgcccctgccatagctcatgttttcactaatggcttgtaattgaagaggctatggttttgatatctatagtcttcgcctgacgaacagagaaagtgaattgcctggagtgagagttgggatcaaagttgagcaagatggttcaaacgtcccataaggtagcgcaaacgacaggtcgttttggctggacctactggtggacaacaatgcaaaagagaaagtgaaaaaaaggtgacttgagtagtgctaagtttacctctcaagatcataaccgtttttggatttttttttcaatcattttggtttttttgtatcaatttttgggttgttatatatttgatttgtatatg

SEQ ID NO: 326036 - DNA, 548 bp, Cannabis indica
tctctctctctctctttcttctgatttgtgttctctgcttgtatttgctttgatttcgtgtttatatacatgtatgaagtcggctgatcacagatttaggagttagttacaataacagttgtaactaactcctatttcttgatccagtagaggcgaagccacctaaggttgagtcaagttgtttatttctgttgtaagtttgctgatgtggatatttgtttgtaagggactggttataagtggaatttactcaacatttcctatgtatatcgaccttaaatctctaatttctaggcacgccaatatattggccgaaagggcatagtgcctaaatctaatatttcttgtggtggcatagtgctaaacttaatagaaataaagtaaatatgctcatatagatagaaagcctaattattaggttcccaccttactatatcaagttgtattattttgaaccacttgaggctagctcaagtggccataggtgggtgtgtgtgtcttggaggtcctggttcgagtcccaggtaaaacatggttgtaatatataa

SEQ ID NO: 326037 - DNA, 708 bp, Cannabis indica
tttttttacaaaaattatagcaaaaaggacttgacacgtgactataataaatattgtcatatatataaatataaaataatgtatctatcatgtaaaaaaattatataataatttatccacatgttttaaaaactaaaaaaaaaaaaaaaacaaaaaaaaaaccaagaaaattataatttaccaagtagtacataaaaaagtgcaattgtgcatattgtaaaggaataaaaagcttttaaaaaaataataacttatcaatatataaagtaagaaaattatataatgcacttaataaagaagatgaagatgcatcaatgcactcctatttattttggtattttaaattatttttttaactaaatttttaatcaggtacgttatagttatttaaaacattcaataaaattcagataaatttaacgtgctgaaaacagaattcaaacagtgtgttgtacgcgtcactattttattttatacgcgtgtgaaatagattgtttgaacaatcactacaaaaaatcttatttttagtcacaataaaacttatgactaaaagtaaaaaagttgtgactaaatattatttatcattcctatgttgtgatcaaaaggtctgtgactaaatgtattagtcacaaaaattatttgttgtgactaaatgtagtcttagtcacaatacttgttgtgactaaaagtaaattagtaataacttgt

SEQ ID NO: 326038 - DNA, 1026 bp, Cannabis indica
cctcagggacatctcagttttctttgggaaatctgagtatacgtgtcctctaaataggggtctggtctcgagtttctaggtgagagaaatctcactataacacaaataaaggaatggtacggccagagccaatcctccagacaagaccctgcttaaggagatgacggccccagagaatacttctccaagaacaatacacttatttatatactatttacttcttttttgatccacagaatatactactttccaacaacagcaactaaagacaattgcagaaactaaatattacatcaccatgtgcctcccacgtgcacgtgctaagtcccagtagtaattaatataagattttatctagctattcaaataatgcttagttaagatattcagaaataaaaaaaaaaaaaccgaacccactaaataattaaacgaacatatgttattaagtttagtaccaattactacaatttttactttcgttttaagtaagtaaactaatttgtataagaggtttatttgtaccaagtcttgcattgcaatcttttgtctcttataaagttgtaagtgatgtcttaatggatttattgaaacatattcttgttcttacttaatattcttaataatttgttgaaaaaattaaataaccccaaatataaaatatttattgataagaaaaccacaaatatatatcacatcaaagaaacaaatatatatcacatcaaagggtactgccagagttcttttgtgtgttgacttgtctaaccttgtgttacataattacgcgtttttcttttgaaaacttcatggtaataggcataccattttttataataattagcttttaatatttacttaaaaatatctaaaatttaaatatcatattatatttaaatttaatactttataaaaatacaatctaaactttcaaataactaaaataataatattattaaataataaaataggacaaaatatcataaaaataaatacacaaaaaaacaaaatattacaaattgaataaaaaaa

SEQ ID NO: 326039 - DNA, 969 bp, Cannabis indica
tttaaaattaataaaaaaattatgtatttttataagaaaaaaaaaattagacctttaagttaggtaggccattagtaaaggcttagtctgcctatgtactgtgactaaggtcgggcctgcaaaccatgtaatttgtgaaaataggaatgaaaatcctaatagttaatttgactaaaataatcataaatcgctagcgttgaaacatcaaataagcgcgaaaaatactagatcttcaatctaattaaatgaatatgtgacaagccatatcttactatcatatatactctataaataaattaatatgtaattttaattttacatattttaatagttttaattataaaattataatatttaatattatatttaagttttattattattttaacttattcataattgaaatatatatattataattattaaattataaggttttaatgtttcgtgtcgtgtcatactttttgggcttgtctattcatacttacatgtcatgtcttctgtatttctcgtgtcatgttgtgtttaatcgcgtattttttgtgtcgtgtcgtgttgtgctaattcataacatcgtagagtgtcgtgcctaagcctataggttttcgtgcttgtgtcaatttcatgtcgtgtcaaaaaaaaatgattcgtatttacaaccctagcatataaaagatgaatgagatattcctctcatagccaattggttttgagatggaaccccatgcaattatcatacactcacataacctaaattctaacgtggtatcagagccaaataaaaaactataaataatgagtatttgatccaaattcgatagccggtacgagccaaagaatcgtgtgagctaaaagtatcgccgaatctaaaaaaacgagctaaaagatcgcttttgattcgatgagccaaaaaaagtactcgcttgtgatcgagtcgtcacgattggtgagtaaaaaatagccaccatc

SEQ ID NO: 326040 - DNA, 705 bp, Cannabis indica
atatatatatatatacattcacaacaacaatattacaaactcagctggagctagagataaatcctaacgaagtacattacctggcgaaaactcagctcttctcttcatttctttacccaaaatttcattaaactctgatcaagtagaagaaaaacaagcatattacttgaacccttttgcattttcagtaaatacatatatacatatataatatatatgatcaagaaagaagtgaaaatgagtaagagaacttacatttttctctgagttttagagagtgattatggcttcgtttctttggagatgaagaaggaatgttagagagagagagagagagagagtggtgagtggtgaggaagaagaagatgaagtagtttttctcacttcctcactaaggaagatgaacactggcaaagacaattggacgaactgtactccgacacgtgtcgttttaggaccttctttgttataagttgggccctacttgcttttgtgggtcacaacacataataaattatgcactaatggcgtttagtaacacttttttaattagttttttattttttaaaaatatgttctataaaactgttttcacctttttattttttaattaaaaattaaaattttaaaaacaaaaaaaaattacttttaatatttttttaaaacagtttttttttttcttaatcaatattttagactctcacc

SEQ ID NO: 326041 - DNA, 1445 bp, Cannabis indica
actcggatggttggaaggctgacgttggcttagagaagtcaaggtgctgcacgggtattccgctgcttgaaaacgtgagcctgtgacactgggcaagggactcttgtttctctacaggttgtatgcttcaattggaggattgttcctctaaactgcgttctattgttttgaacaaatttattaattaataaaatttctgagttattcaaaaaaaaaagaagtattttctctctcaaaaagattgtttcctttctattttatttcatttcagtttattacttccaacttaacgccaccttaattatttgcttcactgcacggagagcccaccccgagtccaattcctcttgttaattggtgcagagattacttaactgacttcaacaccgctgcccaaagctctaaaccacgtagacacgatagaaaggtgagttggtcccctcctccaaggaattgtttgaaaatcaatgttgatgctagcacctccccaaacttatttggagttggtttaggtgtagcgatccgtgactcctccagaactatcatacctgcgtctcagacttacctccctatcctttcctccccgctcggtgccgagttgctggccattagcaggggtcttagtttggttcaggaggaaggctgccccgaaagtttgcttgagtcagattgcattcaggcaatcaagttggttaatgattacaacattggctgctcagattttgattccactctaaaggatattaatctgttgtctctttcttctggatgtaatgtttttactttctctgtccgtgaaaccaatgttgttgctcatttattagctaaaaaagctttagagtctaaagcttctgctatttggaagaggataactccctctgtggttagttcagctgttttagctgacttaccctctcctatgtaagtttctcttttatgaatgaaactcatttcaaacaaaaaaaaaactatatgattacaggctgggtatcgtacagtacaggtaggtatggaagcataatatcgaactctacaatcttttattatgtgggtgttgtactattatttaatttatcatgctctctgtaatctacatggttcggcaatggacaataatgtagataaggaccatttactgagatggcctatatagtatgatattgacatttcacgttaattaatactcacccatttttggcatatgatgacatttcacgttaattaataatctcatctctttttgggatatgatagatactgttcgcgttgcgcatcttcttcttcgcgcgttgcatggaacacaagttccttaattaataaatgtgatgtttacctgccgagactttctccaggggcatccattataatttgagaaatgctaaagggcacaagtggtgcctagcacccttctatgtgtcagtatcgctattggttcaattaaatat

SEQ ID NO: 326042 - DNA, 502 bp, Cannabis indica
tgtaaattaaaaatcaaatcccctaatatatgtaggtcatgatttactgaattaatttgacataacactgtaaaaaccctgacatacactattgaaagaattgcaacttccggccatttcaattactgtaaaaaccttgagataagaaccaaatctgacctttaattaatgtggaaggtataataattcctgtaaatatctcctacgggaacataatctcaatcttcgagtggtgaataagtttcgctaacaatttttttcaaatttcttctcttattaatgttctggctctaggaaatcgaacattgaaagtcgtacaccacatcaaatttaaatttacacaaacaaggaagtcatacccaatacaacacaatcttgacttaagcttttgtcaactttgccattctttgttatagccttgaaactgaaaaacactttaaaaatgaccttgtatttccaataaagtttttaaacaatgaagttgatatgacatatgtttttt

SEQ ID NO: 326043 - DNA, 1894 bp, Cannabis indica
aggggcttgggaacccctggacattgaagacgctcagttcccatgttaaggatcatcatcccgggatgatattcttatcggaaactaaactcaaagaagaggcgatggaaaggattagaattgtgcttggttatgatggttgtttcgttgtagctgcgaaaggaaaaagtggaggattagctcttttatggaaagatccttgggaggttagtgtgaaatcatacactgtttctcacattgatgcggttattgaaaacggtttggggttcgagtggagatttactggcttttacgggagtcctgatcccggtggacgaaagaattcatggaaacttttggaaagactccgcgacttgagaaggggggcatggctgtgtggaggcgacttcaatgagattctgaaggctagtgagaagaaaggtgggggcgtgaagatggactcacaaatgaaagaatttcaacaagctatctcgtattgtaacttcaaggaactatggatggatggtggtgaatacacttggtgtaatggacgacataacaatttggtttttgagaaattggacagggttatggctaatccggattggttcaacaaaattcgggtctccaaagttactcttctcccttggtggaactcggaccatagacctctcatgattaacatcatcaaagatcagcaacactccaacaaggaacctaaatggagatcccgattccactatgagcaggcttgggcagaggatgaggagtgcagcaagatagtggagtcgacttggctagatgtttctttttggggctcagctactggtcttcgggggagactcaatcagtgtggtgagaagcttaatgagtggaacaaggataaaaaaactgaattgagagcaaaaacaaagaaactcaaagaggatttaaaaaaattatcctcttcggatggcgaaatagactgggaaaacaagcggaggattgagaaggaacttaatgtagcagaatataaggaggaaatattatggaaacaacggagtagagctctttggcttgcgcacggggatcgtaacactaagtattttcatcacaaggcctctcaacgaaagaagaagaatactataaaaggtttatttgatgagcaaatgaaatggtgtacatcgggcagtgaaatagaagaaattctggttaattactactcgaaccttttcacctcttcaagaccttctctcaacatggaggatatcctcaaccagagtgttccttgtcgcctttctttccaagataacaacctgctccttgaagatttcacaaaggaagatgtaaaaactgctattggccaaatccacccgctcaaagctccggggaaggacggtctgcctgggttattttaccaccaccattgggaagcggtgggagacgaagtcataacaacttgcttggctgtgctaaacaacaatgaagacagtaaaagcattaatgatactttactttgtctcatacccaaggtgaaagatccgactgttgtaagtgactttcggcctttaagcctctgcaacgtaatttataaagtgatctctaaatgcctagccaatcggatgaagatgagtatggataaggtgatctccgaaaatcagagcgcattcattaaaggaagacaaatataagacaatgccattttgggattcgaaagcctacactgcttgaaaaaaaggccggtttgggaatgggaagaagatgactctcaaactagatatgtctaaagcatatgaccgagttgaatggaaattcttagaaggcatgatgagaagcttgggatacgacgatcgttggatagccaaagtaatgagttgtgtgaagtcggtaaccttctcggttttactcaacgaagaggctcggggtcacatcattc

SEQ ID NO: 326044 - DNA, 925 bp, Cannabis indica
taaataaattcatgaaaaatacaaaaatagatcaaaaacaaaattcaaccattctaacatagtttatagtcccgtaccaagccaaaaattatttactttgaattttttgagcaacctaagtactttttataattaaattaaaaaatagcataaaaaattcataaaaaatacacaatggactgaaattgaaatctataaattttgtaacagtatatatctcataaataatcatataaaataaacttagatttttttgaataacttaagtattttttataattaatttaagaaataaactaaataattcataataattcaaaataatttcagaaaattatcaaaccttactaaacaccttagaataaaataaggaatcgaaatctataaaaatatgtgagaaagaacgtggtcgccggcgtgcacatcagttccgtcgccgacaaagtgtaaccttgtccccgattgctcttgacgcgtcttttcgattggggaagctttccacactgcttcagacatcaaaacaatcaagaactacacaggataacaaccccaatccatcagatcgaaatcgtcttctccaactccggtgtaccgttgttaatggactcaaaaatggcaaattttatttcagaccttaaagctccgattcttcaagttaaaactgatctttggggtcccacaaacttaaatacaaccttctttgatctcaaaaacaacttaaacgtgtttaaatctgggttcgtttcaagaccggtattttcgaaaggtgtgattacagaccttctaatcacatttaaaactcctcttggatgaaataaaactcaaagaaataatctagagcagcccagaaattcttaaactcaacaaacccaaaatctcactttctcaccattcggtttcgttcgacccacaacctctctctctc

SEQ ID NO: 326045 - DNA, 895 bp, Cannabis indica
atcatgggacattaacttttgaagcatgtaatcacaattaccttctactgtgttgacatcactgtaattgtgataactatatgctctggatttaacagaaattatatattaaactatgaacatgaaaaactacatgtaaatataaaagacttataatcttctattgataacaaatcagattattgaaatgggttttatttagggcataaaatcccaacacccatgcctttatcagtgaagtattatatccatttttagtatccaaccttgtgttggtacccaaaccaaataacaagtggagggtgtgcatagatttcactgacttgaataaagcatgtctaacggtctactttcagcttccaaggatggaccagctggtagatgctacagctggccatgaaatcctgagcttcatggatgcttattcaggtaataaccatatcaaaatgaacccactaaatcaagaacacacaagcttcatgacagatctaggcctatactgctacatggtcatgccctttgggctaaaataatgcatgggccacctatcaaagacttgtgaaaaaaatgatcaaagatctcagtggctgcaatatggaggtgttcgtggacaacatgctagtttagtccaacaaggctgggggcatgtggaggatatagataaattcttcaagatcctccaagaatacaacatgaaactgaacccctacaaatgtttttttggagtaggcttggacaaattccttggctttatagttaattctagaggaatagaagcaaactcaaacaagatccaagcccttttagacacgaagtcgcccacaaaaattaaagaagtacaaagtgtgataggacgtatttctgcactaagcagatttgtgtcaaaatccatgga

SEQ ID NO: 326046 - DNA, 589 bp, Cannabis indica
ttttgaagtatattgtattgtatgatctgtacgtacttaatagaaataaaattattaagttagttacctcatagtagagttacttttaatatcatatattgtttgctaggatttctcttcctaaatccttagtcacctaagattttttttcttaggccaggcccgctgaccctccctgggcttagacgtggcttggtcggggcctgtagttttgttactacgattaagtttttgctactactattagtcttgtctttgtagtatggttttgactgtcttttatttgggttactgtaattagtctcttctctatgacatggttttgtttcgttttatttcattgtattggtttgtcttctttgttctttgatgcattgccatcaatttgatattagtggttagaaataacaagtttttgtagctgaagggattgctagtggtgtaattacgcaccttgcataatagttgactgctccagctaaggggttgaataaacctactgtaatcgatctagtgttgtgtcttctgagcagtagagaaaactaaatacacgtgttcttaaggttaactatgatgctgcaatcttttt

SEQ ID NO: 326047 - DNA, 775 bp, Cannabis indica
gtgttcttaaggttaactatgatgctgcaatcttttttgtttgactttattttaatttcttttgtcaaatgatgagggaaccagacgactgattagttgtctcattctttttattctaatcctatttgtatttctaataaagaagatgtcttatttaagttacatattattatttaactaatttctctaaataaaattgcatagtttcttaaaaaaaataatgataatatgattatcaataagatctaaacacatcttatattatcagataaactgcagttactatatcttgtaattattacataattactcccatacacgccacactcttagagttttgttattcataaaaaagttataaaagtctaaggaagtgtttggtatgagagtttattagtatgggaataggaaaatgaaacccaacttgtgtttggtattatttttttaatttttttactggggtgcttggtttgtcgtggtttaagatggcattgatttgcgggtaatgtctactccttccaatctttggatttaatattactagaatagataaaatactgctttatttattttttttcatgtgagctctactaaattttactaaaatattgcatataattttatcaatataatatatgtatggaataattcttaatgggtattatccattaatgggtaataaataaatttaactataaatattaactttaaaaatataaaactattagattttggtccgataataaataataaaagagatatttgaatttctatg

SEQ ID NO: 326048 - DNA, 819 bp, Cannabis indica
actattccaactgatatattttagggggtatttttaactacgcttataaattaaggggcatcatagtatagtgtcataagtacagggactaaaaaagctaattattcaaaaataaatgtggggtagtagattggattgggccctatctagtatctattcccctttctttattagtgtctttcttttgtccttttaattaattaaagagtaaagagtgagaaagagaaatcctcctatattcatattgttgtgtctaatttctgttctctacctactctactctccaatttgggggctatcatgaatctattctacaaattttaataagttgaaagccattgtcccccaaatcacacacaattacatactattactatttaagtgttctcatagatatagataatagttatagaaacttatacaataacaaaatgattttaatcaaccaagttaatacaaccaacaaacctaactattacagtgtcaaattaacacatatttgtagtcaaaattttaaaatcacaataagataaccttctatgctttatattgtgtaatctatacaaaagattttttttttcttatcttcttatcgtgtatgtaataaaatatgaaaaatcataataaaaatacttatttttattcctccacaagtaatagactataaaagagcataaattgcattgaaagattcatttcttccatttcaaattccgaaaaatcattttattggaatgatatccagtactttaaaatgcaaccaaacaaataaataaaataaaaattatttcctttctatttcatcacctccaaccaaac

SEQ ID NO: 326049 - DNA, 535 bp, Cannabis indica
atagtcctctctttctctctaaaaaaaaaaaaatatagtcctctctattgactgtcaagactcctatgtccttttcttctattattcttgttcaacttaaaattgaaagttgaatcaataaactcttatatatgcatgtgatatgttactctgaaaaaagctatgtatataaatatatatattgttttaattttattttaatttgtatagtgtgtgagacctatagtaattatgggtttgattatgtttagtgttatattagttagggccaagatgcaaaatgaccttaaatctaacaattaagttaataaatgtccattttttaaaaaaattaacaaaatgtccttttagttaaaaatttgatgataaaattacaattataaccttgaataattaagtgtttggtatagttattttgcacaatagtatatcgtttttatgtgcaataatatattaaaaaaaactgaaaggtagtatatatatattttgaaataactgaaaggtagtatattagtttaagattgtagtatatatt

SEQ ID NO: 326050 - DNA, 781 bp, Cannabis indica
gagatacgtaagacaccagattggtaattgccgaattgactagctaggtagagtcgagacgtcgtacgtgaaattagaaataaacataattataaattattagtaattattagtccatcgaaccaaccagatcctgagatggcttcttcgagcggtggtgtgcctccaggatttcgattccaccctactgacgaggagcttcttcactattacttgaagaagaaggtctcctttcagaaaattgatatggaggtcattcgagaggtcgatttgaacaagatggaaccttgggatttacaaggtacgtatatatttattctttattattatttcctttcctatcatatattatagctagctagcttgagtaattaagtttcgaacagtatatatttgtttgtcatatataattcatcagttagtttaatttacacataaaattacccttcaatattttattacaagtttatatatatatatatggcaatccgttagctgtattacaaggccggcaggaaccggccgtagtagtctctagtctacttttgatgaacaattgacgaagcttaaattattaattaattagatattttaatggaacatatatatccatgtacactatgaattgtgcaaatcattaatgaagtctgtaataattaatatttaatatttaatgtttaatagttatttgagcagtgtgtattgtatttattagtggtactgatattatggtttgcctgtatcgaatagaagaaaccatctccacaacacactcctctat

SEQ ID NO: 326051 - DNA, 1500 bp, Cannabis indica
aacaacaagaaaaatactcaaaatttaaaagtgtcattaatgactcaagtttgagttttcaaactcaaacttgactcaaatcataaaaaccatcaacaaccaactaaattctactcaaaataactttagaaatcattctagaaccaagcctaccctaaacagccaccaattcacaaaattgcacagccaaaccaaactttaagcttaaacaacatacaagctagaattatagggtttaccttgataaaaaccttccacaaactgttgagcactactctgaattccagcaagaattactcagaacaatcagaagaaccctaagtccttggcttcttcttggttcaaaaaagagagagagagaaagggataaaaattccatttgttttctcgatttttcttaattgattaaaatctaatcttccaataactaaggctgagtcaactaagtggccaggtgttaaattaagaaccacccacctcaacaaataaatcaaaattcccaaaataccatttttcttccaacttaagtaactataagcttaggggtagaatggtccaaaaccataaccccatttaaattcgacattctaaatatctcaaatgtttgtcccgctaagaaataggttttaaacttacccatttaactctaacggtcatccatcgcattttttttttgtcatcgaacaaaaatcataaaaattgcatagttcatatttaacataaataatactcttaaaggttaataaaatctccgagattgagaaatgataactctaatgcccatttctaaaaataggacccacaacaatataaaatcatataaaattataaaatacaataattaatgttaattgcctttactaatctataatctaacatgcagtgattacacactattaggagattacactgagggaaacaccctatagccaaagaaagagacttcacccaagaggtctcatactagggggcacctcgcatgtggctcccgttacacaagacctgagttcctctcataaacccccgagggaggatgagcgagaagatgaaggagttagaggcagaaatgcaagacctacaccggaggatggccatcgccacgcggagatacttgaatgatgatgaggagttttatgaagaatcctctcttttcgagagaggttcaaatggagccactaccaccgaacttcaaggagccacaggtgacaccatataatggtatcactgacccaaagtaacatcttggcgcatttaatgagctaatcaagatgaaaaaggtgtcatgtaaggtaaggtgtcaatgttttgtgatcacattaaaaggagtcgtgtataaatggtaaatggttcacacgattagaactggggatgatcacgtcttcgaagcaactttcagacgaattcctctagcaacatcagactgcatgtgataacattgtgtctgtcacaagtatcaccaacgtgaagcaagggagagaagaaagtttgtgaagctacatc

SEQ ID NO: 326052 - DNA, 559 bp, Cannabis indica
ttttttttttggtttgatgagcaacgtttgacaagaagatcaatttttcgaattaacagaaatgattggattgtaaggcaaaggatcctaggacacttctcttcgctgagaagcagatcactgtttttggtgtcatgtatagatctaatttttgttaattttggcagccatgcaatgtgtctttctcacgatattaaattccttcttcattcataatttttatttgttttgagggtgcttgcttccattcatgatttgggattttatgaggttttcttacaaattgatatcacttgcatttatattattttcttatacatttttaccaatcatgatatatatgtatatatattttgtttttcttttttttcagttattttgagaagtatagtgagataactgccaaaggtgccccattctttcctcttctgtaattacatttgaaaaactagccttagaatagaaatgtaaatgagtagatatgttgattatgtgtgtaacgactcggtttgaccgagtcaaatatgtttatatatatataaaataatatatatatgta

SEQ ID NO: 326053 - DNA, 1084 bp, Cannabis indica
aaatgggggtggaaccttctgacaggcaaccaatccttatgctatcgaatactggaagccaaatatcttaaaggaaattcctttcttgactgtaattcaaaagcctcagactcatggttttggaagaatgtggctaaatcgagagctattattcataagggtgcttgcaatgggtggcggatggtcatgatacaaatatatggtatgatccatggattgtgcataagaagggtttcgctccttacccaagaggaccctcgatgaatggggagataaaagtagttgagctccttttggacaatggaggatggaatattcaaaaacttaacagtttgtttgatcatgaaactatctcggctatcttgaaaggggcaatccaactggccttggaaaggatagctggttctggaccttggaaagtaatggttgtttctcctgtaaatcagcttatagggcccaggctgaggaaagagcgactcattgcgaggttgccccatccatttggaataaactttggaataccaaaatcccggagaggctcaagattctttggtggtgtatcctatccaaagcacttcctgttcgttcggtaattgggagaaggtttccaatagaggatgatagttgtcccctgtgtggaacctaggccgaaactatggaacatttgttcctttcttgtgactttgcttttcacttatggcggtcatctccctggggtatcttccccatttgtgatactggtattcgaatgtgggattgggttaaattcttgcgggacctaaaaacaaaggcattaatgcggatgaggctttcctctatgcctcattaattattgacacaatctggcgaactcgtaatgacaaggtacacaacaattgtccagtatatatttttaaatgcattgactctatttgtttttcttttacatatcaccatgcttatttgctctcttgccccatatcgtgctcgatggatgtctgacgatccccccaggattggttgaagctaaactgtgacattagagtggggatggatagcatgttgggaattattttaccaggaacttagatctactcacaagtat

SEQ ID NO: 326054 - DNA, 1088 bp, Cannabis indica
ttatagggagatctagttgcttagtcttggtggttggttgaatctattcagtttgaatagttttctaattaaagttttattctgtttttgatatttttttcaggtggaacttcagtattatattgagttgggagcgttgttagaagatgttatagctttattgtctaaatttccgggggcagttttgtcccatggggctcgctcttagattttagcggcctatggttggcaaagcatgctctgcggttagacgatgagctatcctggttcgaggaggttccagcgccggtggcggacgtgggcgtcgtaaattcatgagtgattttaatcactttgtcaaaaaaaaaaaaatacacttttctttttctcttttttctttttatttattattttttttttttttttggctaagtgattttgctaccccattaatatgtatataatgagtttttctttctcaaggtttgaatgcaaaacttattttaaaaattactcatattaccagtttgtagcgcccggtaacttggtttgttttttcaagacacattaattgagaaactaaaagtcacttgatatgttgctaaattgttaagttataacactaaacaagactgatattttatttattattaatttatattgaaaggaatatgacattggaagctgccatgaacatttatgaagaagcaattgctcacttcccattcccaacacttatattctcctcctcctccttcctggatcacatctaagttagtgcatctttttactatcagatcaaggaaccgacgcctcacttttcaattcagaattagatttattatttatttgatgttggtttcagtgattatcgtactttattattttatttttttttcttgaaggcttcatcctactatctctaatgttataaaattgggtaaatagcggcaaaatcccaatactttcgttttagtttcattaaaccccaaaacccaaatttttgcgggtaaacccccaaaaccaggaaactgttaacaatttaccctttccgtccaaatttagctgttaagtgtcatgttggcttgtccacgtggacacaatataca

SEQ ID NO: 326055 - DNA, 1473 bp, Cannabis indica
ggcctagttgattggccctcctttaatgagttgtagtcctgaattggctagagtctggtcgtccctactctgggagagggtatgtgtgaagccgaccagccctatacctggcaattgatcatggtcggccagccttgtgctaggtagggcctggccgtccactcctccttggttggttggtggagcttgtgcgttgacatggggtagatcccaccaattgctaaagtttggtggatctaactagttgaagtgattgtattcacttctcgagttgttgttgtcttgggtgtttccacccgttgccaatcctcaccggttaaagattagccttttagtgacttgctcccgaatgtcctgagacatgaattcaccttgttggctggctagaggtgcacttcaagggtgctagtgggccatgagtatgacaattgtgggcattgtagtgccaaaaattcctaaccggccccataggccaatggctgctagaatttggttgttctcgtcattagaccttttgtggagaggtatgtcctccctctaacaagggaagatctatcctggttcctaaagcatctcgttggtcagcttgtcgatagaccctccctgatctatcaactagtcttccttagagtggatctctgatgagatcctggcctcttccatttgttctatgattgaacctccttattaggtcgttgacctctctgttgtggcgatccagctctacctggtgagatcgaaggatgtactcctggttatccatccctctcaggaatttgcgtctctgttgagggaatacatcgtaatcctcagtgtgtggttcttcagtaagtctggcctaatagacaacctctctcagcctggctaactcgagatcttctccccagttcacatggggctcgccaattcctggtcatgtctctcctgcatagtatcagggacgagatctggttgttgttcttgggggttgctccctaagggtccttccttctacgggaggcgcctgtggagggtcctcccttggaggccgggaccgattgttcagatccactgggatgtttatgccatcctggccagctgtagtggccagatttgtgatgcctgctgagatggcaggattgaccacatccgtagtgttcatgggaattccaatcgttgctggatcatggacatcaggatctgcagtcagaggatcttgaggaagacctaataatgtagatggtgcagccacagttctccttgtgttatccatggcctttgatcagatatgatttcaactcgctctcaatgaaagcaccaaactgttgacctcaaaaagtggccaactgacagcggagtcgtattaaactgattctttccatgtgttacacaattagaagtagaaagtaaaagaacacaaggatttttatagaggttcggcccccttagttagcgggtaatgacctactccccttttagttatattgataccga

SEQ ID NO: 326056 - DNA, 931 bp, Cannabis indica
acctcaatcatagattggaagactgtgaaggatcacatccaaataaggacatttgggctctgatcttgattatactctgcgatagaaaggaatcaagggttagagatctgagtggaaggagacacattattctgctgcacccacagtaaggtttcttgactttatatatattttatttattatcattttagaagttcatatttaggttgttaaatcaacatacttgtaagtagatctaagatcctggtaaaattaattccaacaaaggatcccacattatggctaccctagaggaggtgatgaagggaccggtggtccaggagaagtacacttgccaatctaccagctgggaggtagacgagttaaactcaactctaactttcgcccatcaactgaagaagattatcacagtagccaggatcaagcgttctacttccggagtctttcatcgtcttcccagagacgaggacacgcccaaccgtcactatggtggtttgagagcttgaagccaactcacctcatgtccggggcaatgttaccgcttcaggactatttcataaatttcttactttttgttggccttgtgccttaccaacttatccccccaagcatatcgcatgctctcaagcttgtttattttttatgttgccagaggctgggatctgcccagcccggccgagattctttatttttatgaacttttatctgtccccacgaagggagaaaaactcaaagatggtctttacaaactcagtcccatcttgccaatgagggcctagttccctttaacttttagaagagtgtcaaggaatgtagtcatcaatttttcttctcctctggcttcctagctattgagcgcccggagttgcttaccgaatgggtcagggtccccccgatgcatcgcactacccccactcaacttttccttcaa

SEQ ID NO: 326057 - DNA, 717 bp, Cannabis indica
ttttttttttttttggatttcagcttaagttaattttcaaatttcaactataatttgtgaaaatacacgtgaattaatggctctcgtgaatttgattaagatatgtatatgttattaattccttttgttatatatttaggtgaacaactaattcatatttttcttttctgatatatttgtattcttacctattattattattctctcttcatgccacgtgttctctcgtgccacgtgattttataaagttctttttggtatgaatatacatatacaaattttagcatgaattttcaactgaaacctaatcatctaattaataaactgattttttataaattttgacacgggtgtctctgacctttgaatatttctttattttttatttttcacaaattttgttgattcctttaattaagagagaggagattgaaaattcaaagtcttaggagatcatgagttcgatcatttttacaaattaaaatctgagcctcaataagtacctaacagctgtaaacaatttgtattcgaacatgtaatatataaaacttcataattaatatatatatttatatactataggaaaattttataatatataccttttaaatggatatatttgatcgatacactcttatttattttagtatctaaaaaaatattagtacaatatttttttataatcgtgtacgttaaaattatttaaaatattttaaa

SEQ ID NO: 326058 - DNA, 1900 bp, Cannabis indica
ggagaccactgccattgtggagtagaagacgtcagctaagaaggagggaagtaagattctttgccaacaatgcattttcatcaataatagtcaaaccaagtgaaagaagccaccaagtggtaaaaaaacacttggccgaccgctgccataaggaaatggcagtgctctccaaaattggagaccactgccatagtggaatgacagtggttggtcactacacaaatggttggccaagctacatttcctacatatttgtatcaaatcaaaatgagaaaagtcacccaaggctttacaaaggtccataagtgaccactgtcataaggaaatggcagtgctctccaaaattggagaccactgccatagtggagtggcagtggtcagttactacacaagaaaaaggaatttactggccaaattatatttttatcatccatgtacgaaatacaagtgagaaacaccacccatggcttcccacaagccatgggtgaccactgccattgtttggctccaactggtggcagtggtcacccgttagggtttcggacatcgaaataaggtttttgagtctggagactcccaaaatatgaatcaccataaaaggaaaagtcaaaacgcaccccgaggggtccgagagcatgcattgccgaccacttccatttggccatgcaaatgctcgcaactggtacaagataacataaacttcctttagtaaaatgggcataacattctcaattttaataaaaatgacctggttcaacttgaagtggaaagataatttcaagacagatcaaaatgtgcctcacatccatgactaaattctgaagttatcgggtacaaaattggcttacaatgtaagttggtacattttactcaagaattagaaaatggagctaagcgagggttggtggagcacactgccacaacctatgtggcgttgtgtgcgagcatcaacactccacaacacatgtgttcagcactcgccaccaacatcatgcatttctaggagaaaggtgacatcccaaacctccatttcaaattggtgcatcctcaatcgaaaataaccaattgtccaatatttatgggatatttgcctggaaacaagaggattgttatagatatttatttactggtaatattttttcatgaaaagagtggtatacgagatttttagcgagatatcccaatgtgtgggggatcactaacaaaccctctagcctatatatacatcaagtaggaggctaagaaagggatcttctttttggcctcttctttttggaccatttttctctcttttggatctttctcttcgtgaccttccccttgaagttcacttgacagcaaccaagaacattatattatttccatcaccttattctttgagtccaccatactcagtcgacactagttctcaaaacaccattgatacacacctttttcaacaaattattggtttattattcccaagaactttacaacctttaatttagatcagatttatgaatatcaagtctcccattagccttatattcataaatctcgattaagatttcacctagaaattttttgccgtacttttatctacacactcttaagaacataattctggtgtgtcggatctaatcaataaaattacaagtagacgtagccccattactgtcgcgacatggggggtgaactacaataaatccctggtgtccatttatttttttgcgattttattagtcagattaattcaccgtggtccttttttattttacgatcttcttagatcagttgaaaaaaaactgcgtcaacagtttggtgctttcattgagagcgccacagtagaaatttgactgtttccccttggaaaactcatcaatttattttttcaacaacaatggtgttaagtacgagaaga

SEQ ID NO: 326059 - DNA, 514 bp, Cannabis indica
aggcataactcactcaatttttatccaaatgacttggttcaaatttatttgaaagatattttttaagaagggtctaagtatttctcatagtgatagcatatataattatgaagttatcaggctcaaaatgggctacaagacaggcgggcacactttactcgagaattaattagtttttctaagtgtggaccgcaaggggttgatgagagagctatgtcacaacacttgtgactctttacttttcttattccaaggtgtgtcatcccatggtaacttttctccaattttgtcattcccaaagcacaacgccacacaagtgatttcaagagacaagggaaatgaccactttcacaacaatcccaatgattgtggatatttgtcctatgagtatgggatatttccatatatctttatttatttatattttgtattcattattttggagtcagatacgagatttaaagcaagatacctcgacttgtaggggatcactaacaaaccctaagcctatata

SEQ ID NO: 326060 - DNA, 621 bp, Cannabis indica
gtggttggcaatcttgatcgttggaggatggaggataacaaagacatcaaggttcagattaatgagtatcacaaacttaatgaagatctcaaggtagagagcattatcctaccataaatttttttgactggactattagttgaaaggtttcctaaatcgtgaaaagaatataagagtcgcctaaagcccaagcataagcagtcatcccttccagatctgattactcacatcattattgaagatactaaccgcaaggaactccaagctaccaaagcgagagaaatggcaacaagggagaatttggtacaaactcaaaacaaaaataaaaggtatgccaacttacccaatcattcaaatagctctgtttacaagcctaaagctaataacactactacctataagaaaaaaagggagttgttttttctgtggaaagccagatcatcatgcacctcagtatagaaaaagagtaagaaatgacaatcctcctaaaccaaatgcaaattcagtagaaggagatgatataattactgcggtcatttctcaagcttatcttgtggccaatgtgaaagaatgggtggtagactctggtgctacaagacatatttgtgctaacaaagatgt

SEQ ID NO: 326061 - DNA, 653 bp, Cannabis indica
tgattacgcgtttttcaaaaaaaaaaatctagatcctagtaaaatagttccaacactaagccacctaggtccttggtcttcaaagttatggacctatccctgagtccaactattgagccaagttagcgagctttgactaatcaggaaatttttcactaagatttttctcaaacctctcatagtagttttcttccaaggattattaacctcactagattgttgaagtaccgatctcacctacccgggttgttttctatatcgatgtcaacctcacgtcaactaataattttccaagagaatatcaacctcttaaccgaattattgtagtgataatctcactcaaatcgagttgtttataaaaatagtgtcaacctcacttataacttgttcagatatcagtgccaacttcaccttaatacaatggaaatgagattttggaatgcaaggcaaactctctctaaaatagtgaaatacaatttagaatctaaagagaatagcaagcacactaaagaaaataatgacaagtttggctcaaatatgtgtgattggagtgtttataaaaaattaataaaatgtagggttatgtatgtgataactctatggtatagagtcatagagttattttttatgcttttaaactgaaattattgtga

SEQ ID NO: 326062 - DNA, 639 bp, Cannabis indica
gagcttacacaatcatttccaatcaaaaaccaaaaaaaaaaaaaacaacacactcaaaatatgccatggatgaactagttttcaaactcaaacttgtacatccatcatcccacaactctaaaacacctactagaacttaaaataaactataattatactcagaaactgaattacaaatagctctaacccgaacaaccgttaatactcaaaatcacacatccaaaccaaaaccaaagcttgaaaaacaaagagtaagtgttctaggggttaccttaacttgaatcctacatgaatccctactgaattctagaaataaaagaaaaaaatggttggttctttctagtttggtggtacacgagcaaggagagagaaagggaaaatggtttttctcttaatttcttgattattctttctaatttccttatttcgaaaatgcaacataattcaattatttagcacaaacaaagggggcagctgtcacacacacatgcagccacctactccccctcacaaaattactaaaatacccttggtgcttaaataaagccaattcaagcctaggggtaaaatggtcaaaaaccctaaccctgctcaaatttggtattctatttttctccaacatatatcccactaagaaaa

SEQ ID NO: 326063 - DNA, 1260 bp, Cannabis indica
ataggagaataactggattgagtagaaaagtcatttttattgatagtaacattgttacaaggagattgacttggtacagtattgtaagcaaattgactagaacagactaaagcagaaggattacacacagaactgattggttgtttgagagacaggttcgagcattcttcaagcacgtacagaccatctttaagtgttcccttgagcagtaccctcccagtttgtttgtccttgacaaaacaacatgttttatgaaattcaagaaacacataattgtcattagtgagttgagatacacttaccaaattttggtaattgagggaacatgaaggactgaatgcaatttaagaggtaagtagttgaaagactgtaaagaagttgagccaatattagagatgggtagtttcttaccgtctccaactgctaagccttcatgacctgtgtatgtagcaactgtttcaagattttcagtggtagaggtgacatgatttgtggcacctgtgtcgacaaaccaccctgaatcatctccaaagtcaggcaagaatgaggaagcataggcttggggatcgtattcgacatcctgctcagtgagatagacacggggattggtctgagagtttgcaccaggtttgggaggcacccagtttttgcaaatcgatagtggcaaactggtgcagtatggccaaatcgaagacacagttgacataggggtcgatttgagggattcgaaccacgatagcctcctctattgaagttcttggttgtaggaggacgatatggcatatttctagaaccagagacagcaacattggcctgaagtttcatgctgagatctgccacagtattttgatgatcgattcgactttcatgagcaagaagaagagattgaacttcttcgaacgtgagatcatcactgcgcgcggtgatgccagagactacggagtcgtattcagggcccagaccgtttaggagttgtaggatcaaatcttgatcttgaataggcgaaccagctatagccaaagaatctgcaatggactgaactttgtcactgaagtccgagatagattgtccacccttgcgaagcgtagaaaattggcttttaagttgaaggagacgagccttcgattgacttgagaacctctgttctaaggcacgccaaacagagtgtgatgaagtgaagttagcaactgaagccaacacagcatctgtcatggaagcccgtaaccaagataggagtaattgatcttgacgtttccattg

SEQ ID NO: 326064 - DNA, 554 bp, Cannabis indica
aagctattcttagttcggtatctatgcctttctatttttggtttatttgttgtcaagttattttatcttctttaagtaatgtttttattggtcatgttaaacggtctgctaacaaagtcgcgcactgtatggcacgtggtgcttattggtcaggtcgtcttttttttcttgagagtgatattccccttgctcttcagtccttagtattagcggatatttctatttaataaagattattttcatttaaaaaattaaatttttaaataaaaaataaaaatttaatgacttggactaattaggaaatcgccttgtggttattgtcttacacttaacggtcaaataattacgaaagttcaaaaaatataaaatagatattattactgtcaaaaacttaaacttaaatatttatctgtaattagaaattaaacttaagtattcatattataaattacttatatatatattattatcaaaataaaacaacacacattatataataattaagatgtatttctaaatcgcactttaaggttggataaaaattaatatcatat

SEQ ID NO: 326065 - DNA, 949 bp, Cannabis indica
tcattttctataaaatatatataatattatacgttacaataatacttacaagctatttttataagaataaaaaggatttttttccttgaaatatgagagttttattttttgaacttttttcttaaactatctaaattgttgtgaacatttccttaaattatgtaaaatatatattgttgcaatatgccccactagttacattgctcataattttgaaagttgaaacaatttatttatgtgtatataagttataggtataatagtagtctaataacctatttgatagctttaagttattcgaaatctaatttattaacattcatagttaaactgttatttatacatttaattttttgtttatactcttaaaatgtgctaaattagtgttacattagtgctatataatttttataatttatggagaagttttgcaatagaaattcaggaacaaaattcaacaaatggtgataatttgggaaaaaaaataaaaaaactaaaattagtgcgccgtacgcacatgtaagttttactgctctctgtctctgacatgaatattaattaattaagttcaaatcgaataaaaaaaaaaagatatgtatgcaaattaattgaattttttttgttagggtcacggaagaattagtagtattcatatattaacctactacatctattaacaagtttttattattaattagaaaacaaaagcaatttaattattgaccaaaagagacgagtacgtagactagtatagtcagaaatagagttaaccttaataaaaaccaaagtatttgtatattttgaaaggcttgctgatatatatgagcatatatatatatacgttaaatatttagtaagtaaaacataattgtgttataataatgtatgttattaatagtaaaatgtacattaatcttctaattaaaaaaagttctattatctcatttca

SEQ ID NO: 326066 - DNA, 809 bp, Cannabis indica
acgactcatatatcatctaagaacgtaaagaaatgatcgaacaattgaggagctgaaagctttcatttaattgtctttattggaaccgaggcatttttcataatgatattcacatcaatacctgtgctaacatgaattagccatcatcacggtatcccaagcatcatggtctttcccaatgtgcatgaggttcacagaccaagaggctaatgacatgtgcatgacattagctgtaatccaaaagtttccaaccttccgcattcggaaacataaaaggtgaaaaggtctcttcattttcaagattgtccacgtgtccatggcaatccagaaagaagaatgcaagcctccgttactctcaagtcccaaaaacttggggataaatattgttagtgtttccagaaggggggacacatggcttttccaaagtaggattagcctaaaatggtctagactaaagcctttccacgagaataagtccagcctagacaaaagatgggcctgagcccaaccgaagcctagaagactcgcctcaggactgaggcttatctagatctaggaaaggtcgctagccttcccaagatagaataaacgaagccctctggatgaacattgggacacatctgaagagggtactccaagaagcgccttggaagcttagtatagggtgacacctggtcccaccggaaccaaggtttgtcccctgtgtcagagcatgatagtgcgcgcaccactaaaagaaaaaccttcattttgtccaacagcacgtattggacaccacaatacacactgtgtggcggcctgcaagacat

SEQ ID NO: 326067 - DNA, 1494 bp, Cannabis indica
caacttgtaatttctctcatctgcatcaataaagataaaggccttaggggctgttctggccgaggagtaggcaagtgattaacaatcacttgttcgaacctcgtaaacctactgtgtttgatctcttttctctacttcctttactgtttaattgattgcctatcattgttaaaacatcagttcttgttactggtttatctgctactggttttactggttttagttcacagttgtattttttaattttcagttgtttagttctgttcttgatcaaattctttgtattgttttgtttgcgaggtgtttgatcatgcattgatcacatcatatatgatatgtgagtaagcagtacaataagaaaatagtaataatattttggtatttagtttatttatttatttttgcattccttgtctattggctatacttttaatttgagttattttttcatattttaattttggtaatatatatatattatactttggatatatttttttagtttattatggatagggtatatatatataaatatatatatatattcttaaatcagtatttatgtattagaaaattttatgtttatttttaatttattttggatttagtaaaaaatatacatttttacgttttttttatggtattttataaaaacacaagaaaatataaaaaaaccacatgaaattaaataaccgaaaaataataataaaataacatcaaaataaaataaaaaataatatacaaataataaaaaaaataacaagagtacaacacaaaaatacataaagaccgtattttatgtaaataaaatcttaaaaactgtaaaaatatttaaaattttgtataactatatttttgtaattttttttatttttgtatttttttttaaataatcccatacaaaaatgcatgttttggtttttagggtgtattttaagtacatttttgtcactcgttaataagtatgcagtgggttgtgcacttgaaaaccattctttgtaaactaaagacttgtcttttcgtttcaaaaaaaaaaaaaaaaaatctaaagaatgtattttaaagaagaaaaagctttaaggacactaaaaaaaacaataaaaaaaagtgtatatttatgttaaatcttagatatattgaaacatcactccaaagaacaataataagcccatttcgaaaaaagaaaaaagaaacaataataagcttaattttcttgaataaagaaaagtaagcccaagaccaagcccattattatacacgtttaagataggaaattttacactccacaccttatgaggaaaatttttaattatatacgtaaatttaaaattattaacaaatataacattgaacatttaaatgagggtaattgtaccgcatataaagttttttcttgagtaaatactattttggaccctgtgttttgtaaaaattataaattagactttctgttttattaaatgacaaaatagacctatattttttaaaatagta

SEQ ID NO: 326068 - DNA, 1620 bp, Cannabis indica
gtataccataagctataggttttgatgctctcataaaacccttcatactaggaacaagaaatgtacttaagcccattgaatagattgagcatgatttcccatcttatccttgtactttgaaaaatttaggttgctccatatgaatggctaaaccatagttctctaggcttcgaatcttagttccttatttggactatccatgtctttttgaaactaacgatgggtcgtcaacactagtgttatccaacacatactaggttggtcctaaaaaccctcccactatgattgtgtaccgtaataatatatctagcaacttcagtagtatagacctctttagttgtatcaacacaacagaggttatggggcaatcttatataatataagatgatggaatacttttgtatttgaatcaaatggtatcttcacttctttgttactttggttctgagattacatccatgtagtcaacatctcgaaaaataatatttgtgaagaaaaaaaaaacactttctagtcttgatgaccatagtgtagtctacccctagtcactttattatagccaacaaacatgcaaatctcagtatccgaggtgttatggtgttactgcaccacagaaaaaatagtaactagccacactcctttctctctgacctaggaatacgaaacaatgatacctataaaactcacaccaccgtaacactagagactcacctatgactagcacgccaatcatcaattgttggctgagtctctagatgagactggagaaattagaaagaagtctgagctcccccaaggccgcgtatcaaaaaagggttgcccaacactacaagtccttggttgaagataggaaatttaagcttggaggtatcgtgttatgaagtattccagaatacagaagacgcagcaggagggcactcagaccttcttgggaagggcgatatgtcatcattgaagcactagacccaagaatatacaagttagcctgttatgagttccacttgaatccagtgcgcataccaaggtatttgaacaaggtgcatctaagacaatactaccaatgtggcagctatctcaaaaatagctcgctccacagtgagattcaccttgccacatgcaagtgaatccatcctctcttaaactgacttgatgtgacaaagtcatctctaggtcgagaggtccattgccctgttatggcccccacactgctagtcgaataaggcatcggtgtagtggggatcagttaagctaatactgacaaaaatgccaattagcaaacacttgttcttttcaatttagctaatggttatgtttttgtatttaaatttttgtgaataaaaatttttagtaaagtttttttttctacttcattgttattaatcaattacaactcgcatacctgacgatgctctcaaggactgagtaaagcttgtagagttagtcctaaggtaacttcagttatttctttagtgagtcaagcaatacaaacccacgaatcttcaaataagctgatgagtgctcaatatataacaactccttaatattcatgatcaagaaagcctagggagatttggtatggcaagtgaccaatgaaggcacttcttgttggaaatattttac

SEQ ID NO: 326069 - DNA, 651 bp, Cannabis indica
ttggattatgttgtattggtgatcagtcggacccaaattaaagtgaggggggcgtaaataaatttttaaagaaaatataaagtgtagttagtggagtttgaacctttatcctctaacctatttaccaactaccttaaccattacaccaaggttactattatgtctataaatatcatgttttaatacaaatatatgttgtaactaattaaaatacatatacatttttttctcgattttttttttcagggggggcagtcagcccctactgaagcgaatgatgaaagagtagaaagcacgaaacaattggtagcaacaaatgatgcaaatttagaatcaaaacctgagcacgtttcaacaacaaatgatgcatctggccagcgtcgttccaggattcaatatgtccccgatggctccgattctaccgattcgaccttctggcactgggtcttcttcacaggcttctcctcccactcaagacgatgatgacaatagcagcgaggacactattgttgacttgtagttttattttttagataacagtttccagtgtaaataatactaatttttataaactaacgatatatttatttagttttaaaattttatttatttttgtaattatattataaattttagttttataatataatt

SEQ ID NO: 326070 - DNA, 738 bp, Cannabis indica
aaagaatatataatttaataatatagtacacttgttgaaaagattattttgatgtatttgttttgacatttagtaaaaaatttagtttattttttttatgactataatattgtaattatttaaaatcacatgtaaattttaaaaattttttgaataatttataatgtgaaaaataaaatataaatactttatacactttaactattttttttatatatgtggtaaataattttgtaaatattatttttagtaaaaataatatttaaattttacttttaataatataaactgtttacttaaattttgacggtggtgatgtggcaaaaatgatgacacgtgatacgaggacattaggactgaattgatgaagaatgtgtaagtcacaaccgtaagtcatgaccgtaagtcacgaccgtaggtcctgaccgttggaagagaagtctgacagtcatatttctccctagcttgagcaagatgactaccctaggggaacggtggacttaagaccctcataaacaggatgtacgtacaattaccacacatgtacaggaatcaaaccagtctaagggggtatacattaatacccctacctcaaatgtaatggtctactcaaaaggtgatgaggttagtttaggggtaaagctcttatccccctaaaagttagtttaggggtacaccccttatcccctaaggggttagtctaggggtacaccccttattatataaagggtttatcta

SEQ ID NO: 326071 - DNA, 538 bp, Cannabis indica
ttgttatgtgtcacaaagaatatttttgctaccataccataacaattaacttattatgttaatttttcatctgtaatatcattcagattgaaaataaataaataaaaaaggttaaaaattaatcaaataatcttattgtgtagccaaaaataaattctgttaaaaagaaatattttttgtttgcttacaggttgcaccatacaaaaaattgaggagagtaacatttgtaagcagtgtacccaagtcacctgcaggaaagattttgaggagagagctcattcagaatgtccgatccaagatatgaaacttgggccgcttcattgggcctatgattccgttgaaacatgggccataatcaccaccctttaagagctcattactttagaggaaattacgtagaatatggcattttttctttaaatttcataaatatggaaaaattaaagatttacttaacttatggcttttttacaatttaagttagttgtatggaaaaagatttccatatttttaagtttttattaaataaagccacatt

SEQ ID NO: 326072 - DNA, 727 bp, Cannabis indica
aattggaagatcataccaatcaaatatcgattctatggactccggtacgcttccgctattccttaatcttattgtttgattctcttgaattaattagggctatattcagagtttacagtatttctaacaaaatagaatctgaatagtggatttaagtttcaacatcgttgggagaatctgggcagcacgacaagtttgttaataagattttgttttttcattatactattatatccataattcgagtaagcaatatggttacgacaagtatgaagaagctaaacaataaactagctcagcttgtgaaaaaataaatacgcacgattactcacgcaggaaatacaattggtagaaatatttgagtttctccttttaaagataagagcaagttgtaaataacaattatcattttgtaagaccagcgaggtgaagaatcaatacaaaaggtccatctcgggatacatagagtatacaatagaataatagtaagttggaaagggtaaataatgacttctttaaaagcttggaactcattgacccctcatacttgtgagtatgttgaaagattaaggggtttacacaaaatgtgatttatttcaaaataattacatgatgatagtatctcgcgtaggtatactcggtctccctcaacattacagaagagcacgagaaatatttttgaagatcgtgttagactataatatagtgtatgtaatatagcatatac

SEQ ID NO: 326073 - DNA, 737 bp, Cannabis indica
acaatagtacaatttccaaattagagaaaaaatgagtatgttcgactgttgggtatgaaagagaaaaaatggagaggaaaaataggaatggggtccaccaaaatttattcaccgaaaagttgagaccaatatttattcaccgaaaagtggagagaacatgaaagagaagataaatatatgtgaatttactaaattacccttctaataattattaaaattatatgaaaaaataggtatttttatgaaagaaagttgaacaatcactgcattagtaaaattgaacggattggacgaaagtggcatatttcaatagtttgaaaattttgtttgacagtataagaagttcggagggtacgatttaatatatatttatatatttttaaaaacttaattaaccttactattatttatgtatttttatcttttttatttataatatatttattttttaaaataaacaactctccatgcgatcctcaacaaggattcctaaccttgcccggtcgggatgtgggtggggacagaaattaaaataattaggagaattacttcatatactgttttttaacttttttttaaatttatggtttgggtttctaaaatagttgcaataggagtttctatacgattttttgttgcaatttagattgtagcgctagttgcaatagaagtttcgatgtaaaatttcgtaaaaaatgcaaaaaaaaaaaaaaaacaaaaaaaaaaactaaattaaa

SEQ ID NO: 326074 - DNA, 1121 bp, Cannabis indica
ttagttttttttttttttgacaaaaaaatggataacctatcgaaacgcgcaccaaaaattttctgttatatgatgtaatatatgacagcttttgatttttctggtcctccttttataagagaaatagatcggttacataaaagaaaataaaaagttataaattagagggaatgtttcttcatatgggttaaactttaaagtaactcaaaaaagagaataaaaaagtcatactaatgttggttgacttttattgattaatggctgttgttatgcattattgtggctaataatccttttaatctaatgaaaaaaaaaataaaaaataatcctcttaatcttttcatcaatgcatacttataagtattctactttatttatgtataaatgtgtatgcatggctgcatagagcagttctcacggtctcatgtttatgaacaagttacaaaataaaaaaatttaaagtttatgagcaaaatatgaattaatggtgtccagtgaagtttatgagcataatatggattaatggtgtccagtgctattacgaatgaggtggcacctttaggaggaactgttagcattatttggtaataattaaatttaaggctaattagaatttttatttccgaacggttaggtctttgttttgacaatttaattgtcaaaatatttttttattaatgtatatttttattgtgtatttaaattatttttattacattgattttttttatttatttactttttccttctaaggaaaaattctttctccactgttccctttttggtttagaaaacttattgtaagagaatgaattcttttatggaaagttgtctaactttagaataattttggtttcagctttattagaacaaatcaaataaactttatttggcaggtttgtagtccaaattcgtgatgttggttcaactcggaaagtttcctttctggacctgatttgctactgcaaaacccgattctaatgctacaaatcaagaattttttaatggtgcgtttggaagtaactgtgtaattaataggtagggtaattactagggtagtaattacactatattttaaaatgcaaggtatgttcggatatgaggtggtaattacatatgaa

SEQ ID NO: 326075 - DNA, 1480 bp, Cannabis indica
atataataattttgttattttgagactttaatatagtaactttaaaaatttaattttgtaaaaatataataatagaaaatataagtagcatttagttaagtatttatgtaaaccctcccgtctcccctacccaaaaaaaaaaacaaaaattaagaaaaaagataaggaataagttgaggaatatcttttttgtatccattaattaaaaataatctcatattagatttcattaaaatctatccacttttgtgagtgggctgcctaatatatccccgccctccacttaagtatagcacatgatttacattaacctaacgggtagaatagagaatcatttataaaagtgagcatatcttaaagaataataaaaaagtaaaggtaaataattaaaaataaataaaataaaggtgagtatataaatgtaattttactcaaaaaataatagtgaaagaagctcatagagaatctccatatcatctctctatgtttcagaattatataaatatatagatatagattatcaaaatgatacaattgaaaatgaaaaaaacttatttgttttttttattataatatattttcattaaattttgttttttttttaaaaaaaagttgaatattcggacaataggtaataattaattaataaaatacccatgtaaaatataaaatactaacttgttatatagaaatacaattagtaaaaaaatcattatttatatcctacactatatataatataataataatttttaaactatgtaaatttttttataaaaagtgactaagtagtcatatcattcaatatttatttaaaatgagttaaaaaatatatatataaaaattaagaaaaaatttaatagttaaagaagctcatagagaccactacctcatcacttcttttattatttcaaaattatatataaatatataaatagatatatatagataatatttaactccattattctttttttttttttacacaatggtttataatgatcactaaaacaatgataactttgagcattgatttttctcgcattggtggcagtagaaaattgtcgcaaatggaaaatttatctaataaccctaatttcgtaaccaaagattttagcttcgattcataactaacgctaaatacagtttatgttgttgcaaagcgtgtgtaaacaaaaaaaaaaatagatgaacgtaatatttttaaatgtacaaatattttctaaaaattaatagagaggatatataaatatgtgatgtaggttaattaccgaaatgactccgaaaagggcaaagatgattgcagacttcatatcttcaaatattggccaaagatggtttcagaaaaatcttactaattatttgtgtttgtatttttgtggtgacgaaaggttatgaaacttctaacactatttataggaaagtcagtacatgaagtaatatgttcaataataatatgaacctcaataatatgttcaat

SEQ ID NO: 326076 - DNA, 558 bp, Cannabis indica
attatggcttagattctccttttcatatatatgttggagattttctcaacaggggatatggaggttagattacaactatatacacaaaatatagataaatgtatttattaagattacaaaataatttgaaaaaaagaaaaaaagaaaaaagaacactcgaaaacataccattattataaaaaaaaaaattaataaaatttcattcttatgttcagactaataaaaggtcagtgactaaaagtattagtcacaaaaatcaaaatttagtcactacggatgtgtttttagtcataatacttgttgtgactaaaattaaattaatgacaacttatatctaaatactatgttttagtcacaagtaactttttgtattcacatttagtcacaaaaaatttatattgtcactaaaaaattatcactaaagataattattttttatagtgcacaagcttaaccaatgttcaaggaccaagattgccctgaactttagtgagtcttaaaaaaataaaatatttaaacccttattaaaagagtaggtatattttttttaaaaaaaaa

SEQ ID NO: 326077 - DNA, 642 bp, Cannabis indica
aaataaaacttaataataacatggtctagaggtgttatgatcagggtgatttatattattttgcatctgttcatttttgtacgagaacttagcttgaggtttgctattttaaaaataaaaatttatgaaaatagaactaagtattatttaatgttattttattattttacaaaataaaaaatttaatcaataatttttacaaaacattaagttcaaaataattatacaaaaacaagccacgtagtaatagcatgaaattactcaaattactatataacttttgactaaagctatactaccacgttactcaggatatgttcaatgtataacatcgctctaagaaaaacttactattccataatggatttgatctcaaatataagttattttcactagaagaatagaaaaatgtaacttatggtgataatgtgcaaatttttaaatgggttggtcaaaaatgtctttgttagtgttagaaaagcatcgacaattgtggattatgatgataatggtggtggtggtgatgagtgtgttttgtaaaagactaggtagcaagtaccaacacatgttattatagcaaatgagattaataagttgtaggtgaggttgattttattaagttgtaggtgaggttgattttat

SEQ ID NO: 326078 - DNA, 777 bp, Cannabis indica
taattgtttaaatgcattgccttcaaatccataaagtgttgtacatagagtatatgtgatcgctgtctgacctacatgtgggttcgtaggcttagtcctattaaatggatacccagcgaaatatgaggagccagggtaacatagttgagaccggaggtggtcggggaggtcgaaatctcccgaagcctcgtggatgtagcagaggccgtggaaggttttagggtggtagacatgaaaatctacctcaagctcctccagattaggagcaaaggtttgcaaaaatgcaagattgaattctcaaccaagacgaagagattcagaggctgaggcagcagggtcctcttgcagtgcctccgcagaaagcaccggtcgctatggttccagcagtgccagtagaaaaacctgttattggaaatcttatggggccactgtatgagagattttgcaagcaggcacctccagtcatcctgcgaggttcgaatgttatgaaggctgagcagtggatcactattatagaaagaattttgaatttcatgggagtcgttgggaatgaccgagtgacttgcgccactttttagtttcaggaagacgcactcgtgtagtgggagttgttggggattattttaccaaaattcagatttactaccatgtatgttattctcctttagttgattggattcttcacaattttacacactatgattgagtactaactttctatgtgtgggcatgtactttatcactatagggttcaaaattggagagagagagagagag

SEQ ID NO: 326079 - DNA, 1553 bp, Cannabis indica
tctagtctttggcaccctcggcaacaagggccaactccactatctgtgcataagtccaaacaaacccaggttgtttagcagcgacaatcacgtcttgtgcaatgtgctcatccaacccctaaataaatttagcctttttagtggcctcagtagccacatcatctaaagcaaatttttctagttgatcgaatttggtggcatactctatcactgtcatactgccctgagtcagttgtataaactcttccacttttgctgctcgaatagattcattataatatttctcgtaaaacagtgcccaaaaagcttcccaggtcatgttattcaagtcatgaccctgtgaaacaatttcccaccagatgcggacatcttcacgcaacatgtaaatagcacatctgacccgatcagtattctctacccgcatgaaatcaaaattttttgttatcatactcatccattgttcgaccttcagtggatcagcaccaccctcgaacattggcaggttttgcttcctgaaccactcatacaatggcttcaggagatttcccacatcctgtggcactaccaaaggtgtcagaggatcaggattagggtttggagtagcttgaactcgctgctccctcaactctcaaatttgcttgccttgttgctggatggtctcctgcatcatggcatataatttttcccagtttggtggtggtgaaggattctcggcctcaccgccaacctcaaccccagcaaactcgcagttacccctaatagtctgcctcgggtgcataatctatacatatgcggtcacattaccaagtaatgacaatactaataagtatttccatatatatacttttacaacaacctttgttgtaccacaataaaaatattccaaataaattgataatttacaaataagttaacaattaaaatttactaagccgtgagtagagtcttcgcagccaatgtacatatcaaacagtcttcaggatctttaaaccttggttgctctgataccatattgtaacgccctgactctcagggacgccacgtgtgtgcttttacaaacttattaataactaatctattagtttagggaaagtgtggtttaattaaagacctttgattaaatttaaaataaaaactttcatacaaaatgctatcataatacagggatcccctgtttattaaattcttttacaactagttacaaaatcgttattacaaaagtaggttacattttcaatcatagaaaaagaattgatcctacttctcggaagccaagacactatgactgatatgaacactgctgcagataggggtgttcatcaaaccgctcaaaccgcccaaactgccagcaccgcaccacaccgcaaaaaaatgcgatttgaaatactttgcggtgcggtcgcagtctgaattttcctaaatcgcgcggtgcggtgcggtttgcagttttgaattgttattatgcggttcaaactgcaccgcactgcatactataaaaatactaatttttatatttatttaggtccaatatgtgaaggtccaacctaagccca

SEQ ID NO: 326080 - DNA, 932 bp, Cannabis indica
tttaaaaaaaatagaatattataatttttaaaataatttgttttaataaaaggggacgaaatttcatattggtcaaaatttaggggtagaaatactaatttttaacggtcaaagaaacagaacctagcagaaggggcatatgtaactgttatattttaggaagaaattttaacaaaccatatattttaagggacaaaattaggtagtgccgaaaattcaaagggcaaaaatacttattattctaaaaaaaaatagcacacttagctaattagcaagtattgggaaaagtaaaatgtgttgaatactgtttgtcattttataattagtgagacaccattttgagagaccaagtttgacagcaaatttggctcattttaaaaaatgaattattacatgaaaaatataaattgacattttatttataaaaatgtattcataagatatagacaacatttatactttttatgtgtttttaattaccaaaatatctcttttacaatcacttacacaatcaaacaatggttgctgggtggttggccgaaggttgcatcagacgaaggtttcaatcaaacaaaggttgctaggattgctgggtggttggctgaaggttgcatcagacgaagatttcaatcagacgaaataactgttagcaaaatagttatgcaattgtaatgcaactgttatgcaacattaaaaatcagaataatgtttctacgtacataactctatctacatgtctcttcatgatttaatatgaacaaattcaccattagaaatttagaaaataacgaaaatacactaggggcgtttggtataagggatttaaaataatctgattaaggggaatatgattatctgtaaacttattactgtgtttggttattcatggtaatattaattagattattattaattaaattatagtgtttggt

SEQ ID NO: 326081 - DNA, 958 bp, Cannabis indica
ttttacaaattatgtatagttttagattaggatatcaattttaatccctaatatgtatataatttcaaatttccctagcaatattacacctcataagggtgttaggcaccgtggatgccctttaacatttctctaaaaatatacgatgcgcattccatatatatttatatatagtcaaaattaagggcccaaatagggatgcacacgaggcagagaattggtggggagtgctccctccgttcttatttccgttaagaattttaattcctatctctgcttattccctatcaagaatggggcaggaaatctcctaatagggagggggacaaggtgggaatcccctaataaaaaaaaataaagtttattataaaaatttaaatgtataaaaatattaacaacataaaaattaaaatattatacattaattattattcaataaactcattattattatccaaaacacaacttatattcataaaaatgatactaatatactaaaaatattacaaacataaattataaattataaaatattactaaaaatataaaataaaatactaaacgggtccccgtcggagcagggagtgtgatctccgtctctaccccgtttaacattcaaagacaaaaaataattttcgtcattgccctgttccccatttagacggaaaatccctgccctattaggggcgggttcccacaagacccatcaccataaaaaaatgtgcatccctaggcccaaataatattataatttatattacattaattctctgcatggaccaagaagaagaactaatcttaccgtaatttcttttttaccaacaggggccggtcggtaaaaattggtaagagaaaaaatgacaattttttggattaataattaattaatgcacaaaataatttgttatatatatatatagatatggaagatgttttaatggttacatttttattataa

SEQ ID NO: 326082 - DNA, 1597 bp, Cannabis indica
agcacatagaatttaatctagttaattgcatgttatcaatccattcattcaccaccttcgataatcccttatatattcctcaaatattaattttaatgtaatttacttaaaaaaatattgaaatatatataatgccgtacggttggagaactatttgattttatatattttttggtgagaagtaagattgttgtataaatcgatgttcacatttttattattacaaggtaaatatctataataatgatgactactgttgtacttttatgtgtctatttttttagatttacataatttaatatagtaagacgtaagtttaaaaatgtgtgtggatatatgtagccacgtcccaaacctattatttttatagagattgggtgaataactaggacaactcaatggtaaagctgaatcatattcttctttctttctttctttcttttattttcttttttttttttttttattttttaattgtaagaaaaagatagaacatagatgattgaattaaaaaatgaaagaaataacaagtctttatattttatatatatatatattaatttattgtagaattgatatgtatatattatatatgttcgtgaataatattttaccttaaaaaaaaaaaagaaaaagaagataatgcgagatggagcatatttgacctaccaccaacataaaaaacaatgattgataaagttgaagaacactacaattaatatatatatttatatatatatacctagctaaatcttaattaatcatgagatgaaagcatgttttatatatgtgtatgaacggaaaaattattcgtgatgatgaaatgaattttataggtatatgtttggtaaaaagaaaaaaaaatgttaaatgatggaaatcttaattaaagaaggaaccatatgatatggtaataaaagaaaatatatctattttgcattatttagaaacaaattataatttattatgttaatgtgtttattacatgcaaatgtatgtgaaataattagctcatttaaattattcaaaatgtaaaattttcatttctttaatcagatttttttgaaaaaggcgaaattttgaatgtcaattattaaaaataataatgtattaaaacatttttggaaaaaattagggatcaacccccatattatactctatcattgaatatgcccatatattttgaacacgtgacactcttattcttataaaaaactcacacattcttatattttcttagaactcgacagtctacactcgtgtttgccaaaacacaatacaatttttaaaatcacttgcttctgtcattacctaaattgatactgcagctaaatacaatgtttgctacttttactgggtttctttttttcaagaaaaagtaaatgtgaacactaaaattggctcatctacaaaatttaaaaaaaaaaaaaaacaaaacaaaacaaaaatggaaaatttagtcacgtgacactaactcaatgggtcggcaccggctctccactttcgactctcgagtcccgaacaccacgtttactcaatacaatacaaccacgaaacaacgaagaaaatgttacttttttactttaaaaaaaaaaaa

SEQ ID NO: 326083 - DNA, 673 bp, Cannabis indica
gcaagtatcaacattaaatacgagtttgttgtcggttaggtaatttctaatgtcaacactagcattagtagagttattacccgaaggtaatgtgataccttgtctttctacgaggcaaaaaagacataatagagcatattggagtcaaagtattcaaagaattccaataattaaaaaaataaacatacaaatggatcaggatgtaaagaggggaattagctagggccatatgcataagaaagtcacaagtatggatttagattggtttgaaattttgtaataccatacacaagcaagccttttgttttgtttatggtgctacatagttggtaaatgtttagttatacaatatataaatctgattcatctaaaaaagtaaaaagaattgcaatttacaaatcagtaatgctattttactgttatttcttttatttcaaattaaaaataaaaataataatattttttctatatttcgaagtctaatattcaaaatttgttaggagtaataatagtaattttgtgtgtgtattttctacttagggtttgattttttatgcttacatttggttaaaaaattttccctaaacacataataactaatatttgtaggatatgacaacttttctgatatctctaaagtaccccccatttacatcacccccatttacacaat

SEQ ID NO: 326084 - DNA, 1390 bp, Cannabis indica
ttcatgatcatgatgatgagtagggtttggaatatttagggttttgtatttttgttttatggattctataatgttttgtacgctcaagaaagtgtttggtcctgttgcacatccaaaatctgctattcgaataattgttttattataattattcgatgcaagaatattaatgttttcaatgttgaatttctctatgatttcatctttgatctttagccattcaaagtttgcagctatcctctgatgatataaaaaataaaaaagttaatttcaacgttaattaatatttataattaactatatataaatatactttttgatcactttttttacaattcatgtgattaattataattagtagcagtcatttataaatagaacatttcgtgcataacattgtaagtggttagtgattttttatattatttattaaattaaaatgtatggaattgcatttttcttataatcactaaatatattagaattaaatatacttatactaagtattagtaaaattacattaaaaattgctattacttaattataatttacataataaaactaaatttaatacaatttaattaattttttagaatatataaatttaatataattataaatttattaccaaacaataaacagatcaatggatctaatagctaattaaaattttattaagttcatcatctcaactaattaagcaacagaactagatatatatatatatatagatatagtaattgtatatatgtgtatgtacgtacctgaaaagatgagttttcatagtagctgttaatatcatttcctccattcatgggggacaaataagtgacattattattattattattatcatttgtaataatagtaacgttattattacaattaatattattattattagggcaaagaggtggtggttccgggccttccggtggcatattttgcagagttatatatatataaagatatagatatatatatatatagatataggtgctggttggtttttgggagcaaggtaaggtttagtctacaaaatataactcagtttatatagaaaacaaaatttaacaacgtacagtacagctataataacacacaaattatattaaattatttgtaataaaaataattgatttaattaattataataagtactggtgtagctattaggtagctatagctatagcctgatcacaatattatattttggttcttttaatttatatattcggtaaaacatggtggtccaatcaaggcatatgtccttcaaaaaaaaacataaatattgtttagtaataaaagtaactattaaatactatttttgtacttttttatttattttgtgaaatgttaaatttaactttttacttttacaataaaaaaa

SEQ ID NO: 326085 - DNA, 839 bp, Cannabis indica
tatgtgggtttgaagctcaagaatcaatggctggaggtatttcgatccttaagttatatagtgtatatatttatttattccgcattttatatacacatacatatatttcagtttatacatataaattgtctaacataaactcctttttttttcaaaatatataataaattattcaaatattcgtaaaatgttccaaataatcataaatatacacattattataaaaaattaatatcagaatatatatatatatatatataaatatatatatataactaaaataagcaagatgcatgcattatacaccatacaatttttctatacaaaatttacatcacttctaataatttagaatattaatattcaatattattacgagtttgctataaaaatacatacatattattggaggtattataactgtttcatttcattgtttcattaattttgttggtaacgttatttattgtctgatttttatttatttatgtatatatttaaatggcattgttttgtaaatagtattaattacaacttcttattacaatttttagtcaatgtctacatttaaaatcacttacaggaacatttcaaaaaaagaaaaaaaaatcacatacaggaatattttttctcaatattcattagaataataatattgggaccggatttcgtcccgttactgtacggacacggatttcaatccgtgatgtactgtaaccgttggatgggtagttaatttgatccaacggttggggttcatgtaggggtttatgtaggggtaattaggtatcaaaaaatggctaccggttactttttttgaaatttaaatttattaaaaa

SEQ ID NO: 326086 - DNA, 1357 bp, Cannabis indica
tactgacgaaaataaagaaaaattacagctttacaaacattaggtacttataccactaaaaaatcattgggtttatgccgcttacaaactcaaaattttgggtacttatgccgctatttaccctttaaataataataagtttggtagttttaatggagaactaaatttgagtagaggaagacctcatcaaaagaagccatggagcaatataggaagaagtcatagtagaggccctaataaaggaagaaaacaaggcagaggcaggtcaccatccaggggtcccaagaattgaaatggctgctaccactctagaaagtcaggacacttcagaagggattgctactataggaagagaaacgacaagaacaaacttgatggtcaagacaataatacaaaccaaggagagaattacttctcaaaacaaaaggtaataacacataaagtagctctgatgacatggacatcaatgttcgacacgtggcaagaaagaaaatatttcggaattgagtagtttcgaatcttaacaagtcgacttgggtggggtctctagtcctacgcccaggttgacatcgaaaacttcaggatgggtgtttggatcccaataagttatttccaactcactatcttttactattatgtaccatgaagacatagagaaaccaaatctaagcctcggaagctgaaaataaatgaacctacacccctgaagtcaacatgggcacctatggttttaccagtgcccaaggtgacatcctcaactagggtttcagtttccaagactaccttagtgaaaatgggtcaaaattttcattggtgcatcaactagagatccgcagacatatttgagtcatcaaaattagattcagagtaagttcatttttgagcacctggtgctcgggcacccagcgccccggtcgggaatttgtcaatctaggtaccctccaagtatcaaatcgatgatccaactttttcatcatctttgtcttcattgaaaagggggaaataagtactttcagtgaggaaaaacacttcctgggtcccaaaagcaaggcccagcacctaggttgacacttggggctggccctgcgcctagattgatattttgtcaacttgggccaattttgatggtgtttattcaaaactcttatgagcatcttctcaatttttaggaaagattaagattaaactattttggggatcaaatggaactttcaaaggccagaacttggacctagtgcccaggtatcaacctgggctatttccaatcaagttatcaaaaaaatattttgggcattttttctgtcataaaaaataatgaagattcaagaaaactcggtgtaataccctggaattaaga

SEQ ID NO: 326087 - DNA, 625 bp, Cannabis indica
ggcaggtcatatttctatgaatttttatttattttgtattaaagaaattatttcagctgttttccttttctctttactcacacatcaaattatacttgtgtttcttgctagactttagaggtggaatgcatttgtcacttattacagaaattcctcttggctacttgcgcaagttggtttcggaaatccgtatgaaggaatttaagaaagagagctggcagtcatggtataataggaatggctcgggacagttgctacgtcaagcaggcactgcagtgtgtattttgaatgagatgatatttggtatatcagatcagtctaataatagttttgcaaggaggtttcagaagtcacgaaaaaaggaaaatgagattcaagaaattgatgataggttgtctggtactcagcctcataaaagcttgtttactgaatcaaagtggaaagtttcgcatgaaaagggtgtaaggactcatctgatagactgtattggtagaatattacacgaatatcttaccccggaaatctgggatcttccaatagaaaacaaatctgctgttttagaacctgattatgaagatggagatatcagtttatacttctttcgtgatacagctatgctacatca

SEQ ID NO: 326088 - DNA, 1029 bp, Cannabis indica
aactagtaatattattgtgagagggagtttattcaactgtactctatatcccttactatggtcttttttccattgggttttacctagttagttatttttttttttaacagagacataattatatgcaaattatagagtaaactaaggggaagtgttatgaatgactatataggatagatatatagtatactctacatgataaaactataataatataggaatagtattcaacttgtagcagtaaagtttaatgattatatacatatacatgcatgtattctcttatatatatgggtaagttttataaagaattgagagcaaagtgaagagcagaaaagaatacaagtattattacttatatctgtctaaatttataacataaataaattaattaaaaaatgaaaaaataataataaacgaaaaaaaaaaacacatgcaaacttctcttttaattatttactttgaattttgtttggagaaaagtggtccataattttatttatatatataataagggtgaccattgtattacataataaaaagggatatagagagtattgtattttccttttttattatacttttactgttatgtacttattattaagtttttactgccttaatatatattatcaattgagtttgttataaaaaaaaaaattgtgtcatctaattgatatgtgtcagccaagatttattataacctatttttttttatttttttttaaactttgtaaaagtgttcatgtgattattcatgtcacttttgtgataatttttttattaattaaaattgatgattaaaagctgagaaaccatctcatatacttttttattgtgtttttcatcttatttcatattttatctcctctatttattttttttcttcgtgacttttttttattattttttattgtatttgatccatctctcttctattttatctttttttttttgtaggttttttttttgtatttttaaaaatttataggtttatttatctttttttttcaattctctctctctctc

SEQ ID NO: 326089 - DNA, 720 bp, Cannabis indica
caaaagatccaaaagaaacattaacaagaccaaaaatatgatatacagaaactaaaaatccagtagaaaaattgattataaaattaaaaaagaatattctattaaacaatagaatatttgaataaaaaactttaaaaaaagttacttaataaatttttcatctaacatttcatatatagccacattttatatagattttattttatatagatagaataaaaataaatatttctcatctaaccatttcatatttttttaatgaaaattcaaaaaaatttattaaccactgataccaaaaatataatagcaaccatgtgaatgtgatggtttaacaaaaataataaaagtatttctcaaattaaaaaataaatgctcaaaatcatttacgtttaaccattaactatataacaataatgtaatttttaaaggatatacattagatataaccatctaccttttttcttttttctttttttagtggaattatcaataatcccaactgctagctaaaattagttactattgtatgttgttttgaaaaaaaaaaaaattatctgagtttttaatattatatcctgatttttttttgtaaatatatatatataaatcttatagtaaaaccatttgaattatcacttaaaaaaaaccatttgaattatcaaatatcccaactgttcactatccttagttactttttatttttaaaaaaaaaataaatat

SEQ ID NO: 326090 - DNA, 1488 bp, Cannabis indica
tcatctaacctagccctaagtgaagcctatataaagaaagtgatgagaagagagaattaacctaagttttcaatgttagataactcttttctcttctttcttcattattttcaaaaagaataatttacgacataaatacctaagtttatcttccaattacaatttaatacctaagttaatattttggtagcataaataccacccgttacactttcaaacattctgtaggtaccttgctgttatcttgcacactggacaccagatgacatgacacatcatttaaaataatgtcaagtcatcttattaaatcgccacataatattaatcattaaagtaaaaattaagtttgctttaaaaaaaaattatttacataaaaattaatttaataaacttataattaaatctgaaataaaacaattaatacaaaataaaaaataattaatctgaaacattaactaagttctaagtaattttagataaaaaaataattatgtacaaaataaaaataaaaaaccctaaaattatggaagtagagtcggggagagagaaaaaggtggcggctgaacgttcttctccaaccacgagccatcatcgtcatgcgagaccttcttctccgaccacaggatgagccatcagcgtcggggagagagaaagtgttgggtgagaccttcttctctgaccacgacactccaccatcagccttggggagagagaaagtggcgagaccctcttctccgaccacgggaagcagccattgacgggagcagtagattatggccccatttttctcatcctattccctcgatcgatggtcgtggtcggagaagatgaacctcgaacgtaccgtcatcagagaagttaaaatggtcaatgttcgtcgtctgagcaggtagagtggagtcgcccactgtttctcatgatacctactgtgtatctattataggttttcaagtttttatagatttaatttttgttttacagattttaatatatattccttgtattaattttttatttttaagtatttatcaaaaaaaaaaaaactttttctttttaagtttatttattagtttattttaaatttaatttctatgtaatgtgatttgtcatatcttagcttaagaaccttcccaaattccaaacattaagaaaattttttcaaagtctcggtagacgtcaagctcatggggatcaaaacaataatctaaagagtaatttgcggctaaaccctcccaactatcatttcacttgcacttaaccatccaatctcaaattttggtggtaaaaccctccaaactgctaaaccgttattaaatttaaggtgtcatccatttatttcagttaactgctgatatggactgcctatatgtacatcatgtacacgtggcatatttatattagtccacctaatataattatttaaaaattataaaaacatctttttagaatttattttaaaattaaaaaataatttaaatttataaaatt

SEQ ID NO: 326091 - DNA, 629 bp, Cannabis indica
aatttttctatcattttggtagaatgactatttcaattcaaaattaaattgttttgtctattttttacatgcatattaaattttattcttatccctaattttttttttgttgcttgactcttagactcttctagggttcatcactttctttctccctttcgctcgattacagtcgtcgccacccttatcttgaggctctctgttgcccaggtcgagaggagatcgttggttgtggtgcgtgaatgatgggtcgtggttggtgaggttcgacgctatggtaattcaattcttttatttgcttcaacaatgctagtttgcaggtggtcttgctactggagagagcgtctggtgggtcatgggtagtgaaaacagacgcaagggtgaaaagtgttttggcagttttgtccaatgatgaagaagcaaatctggagttctgttggtgtggggctgcttggagtgggcgatagtggctcctccaaccactgtcgtggatgacaaataggtttttggttgctctgccttccctccttagtggttgtggtggtaagtgatgcattgagtctttggattggacatatggatgtgcaatccaaaggtggatatgagtatattgttggaattattttacc

SEQ ID NO: 326092 - DNA, 617 bp, Cannabis indica
aatatcatctaaaactagacccaaataagtaataatagaaacattatttttcagtttaagcacaatattcaaataatcagacaacaataatattttcatacataatggagatgcattgaattagcgccttgcggaaagccaaagctttagctacttcaggaacaaagtagccatccaaatgccaacttgctgaagctacaactattactaattgagtacgaatcaccatacaaaaacaactacaattgcccaaagaactgatggcgacatctgtattgactttgagataaccaagtagaggagctttgaagaggtgctatctgagacagcatcccaccagtagggacgtcaagcgccttctgataggggggacatgtggctgaagtctggttgttacgaaacgtccccaagtaatcacaggcccaatgcacagtaagcacagtagtcaacttaacaaaattaccataagcaattcaattatttccattgaaagggtatcaataaacctatttgttatacccaaaattcggtaagcacatcagaggaagacacgtgttgagctgggaagaacgaagaactcaaacacgcaaacgaaaagtatacttagcatggaacaa

SEQ ID NO: 326093 - DNA, 723 bp, Cannabis indica
agagagaatattgtgagtgtgaggggggtatttttggggttttgaaaaaaaagaatagtttttttaggttttaaatttttggtttagggaaaaatttttttgattttctaagtatagaaaatcaaatttccctttcgctatttgaccattcagtccttaaaaagtttttttttggtaattaagtctttaattttctttttattggatgagtcattaaattttgaaaaccataacaatttagtcttacaagtttttttctaataattaataatttagtcattaattactaacaacagtttaatttttcttgcggataatttaactttttttatgacttatatgaacttttttttgtgtgttttttttttttctctttattgtgttcttatgtttgtttagcctatagataaattataatttttttatagatataaagatatataatatagttatttagaatattaattaatttattatgtcgaaaatataaaataattattttgttatgtgttttataagcagggaaaatttatcaaaataattttcggtaatatgaaattataaatcattagaaatcttataaatattaataaaaacaattactataatatattatatattattattaaaaaaataggattaaaattttaatctgcccaaacaaattagctggaaaacatttttcagcttgaattataaaatttaaaaaaaataataaaaaaa

SEQ ID NO: 326094 - DNA, 996 bp, Cannabis indica
agtacatcctttgatctcaccaaatagagagatggatcgttgcaacagagaagccagtgacctgataagccagttcaattagagaactggtggaagagaccatgatctcattagagatccactccaaagaagactggttgatagatcagggagggtctatcaacaagctgactaaccaggttcttcacgaaccaggaccgatcttcccttactcgagggaggacaggtcatcctacaaaggtctaatggcaagaatagtcagatctcggcaaccaggggcatggggggtcggctagggatctcaggctcaacaacagtccccatcaaccaacctttggctggccaactacctacaagagcacctctagccagccaagggagtacactccctcccgtaggggagcaggccactcaaaggacaaccttcaaccgacaaggacaaggagcggacctaaagtaacaatttgaaaagtgaaacggatcagtttaggtatgtacagatccactaaactctagcaactggtgtgatctacctcctatcaacacaccgacaacatcagccaattgaagaatcacgggcagccaggccctgcctggtagagggttggcctgtcatgtatagctaccaagtgtaggcttggctggccagagctcataaccctactaaagagtggctggccaaggcctgcaacaaaacacaggtctggccgacctccaccgtacactctcctagagtatggcttgccaaaccttggcacatcaaagcctgcaacccctccaaggagggccattcagtcaaatccctacaacaaccgatccttctgtgcaagcacaattggaccaactaagggatatgatccaaggcctagctggtctgaaaccttcaaatcttatgctagaccggtcaaggggatcactattctcggcatacattaatgtcttgcccttgctcaaatttaagatgtcggtatggaagatgttgggattttatgccct

SEQ ID NO: 326095 - DNA, 725 bp, Cannabis indica
atagtgatatatagtctggccctaactctaagctaagctaagctaatcactttcactgtcttctgtgttctgtgttgtgtgttgtgttctgccctatgtgcctatgcactcatcagagaatgtctcacttttctccattttgggtaacgtattttaccctcaaataactctataaacacttttcatttttattatttaccattctttttttaaaaaaatattattattctaaatgccatatagttttgattgatatatatatactatgttttgtaattccacaattattattttataagattattattgttgttattgtaccttttggtatttccaagaacatgagtcaatggttttggtatttttgtcataaaaaaatgagtaatggaatggtcatttattattattattattactattattttggtatattccttctctcttgtatgataatgatgaatatgatagtgtaattgtattgattgttttacactctattcaaattctcttagggtttttttttaaaaaataaataaataaaatttaagttattattttgtattcatttagatacaatatctatccacaaaatttgtcaaaaaaaaatatattatgaattgtattattaacacaattatcactttttttaggattttttactcagttaacaacttaggaaaaaatattggagctttttcatttttacatttttaaaacagtttttt

SEQ ID NO: 326096 - DNA, 814 bp, Cannabis indica
aagaaatgccgttagatagacacttttaatatataaagatatcaataataatatgctaacaatattagaaataagaataaataaagaatgagaataatttacatgaacattacattaaatttaattgtataacttaaactttataaacatatgagttgttcatgaaaaaaaatcatattgtaaaaattgatattttttaaaaatataatatattgtgatttgaactgcgattattaaagtcaaaactgcaaaccgtaccatacagtacagtttgacaaatgtaccacgtgtaaacggtttgatgaatactctaacttaaatcccctttcccgccctggccttgcggcttagtctatggagtctgagacgtatctaatagacaatctccaccaacaattaaccctaaatcctttcattgtcactatgctcagttcaacaactattagtttgcaacatcccaagaagatcgacaatatttccgaaaaagaccataaaggtttggccaatatcttctaaatttattttaaatcaagtgaaattttgtaaattattaatattggttttagaggtgttttttttaagatatatactggctttaaaagaatctattagaattatttattttcatacgatgtagtatattaaatccaaccggctaaaatgaaattgatttattttgtgaacgtggggtgggattacaataaaaatagtataaagtccactgcaaattcaattaagtcaactcgatttaagtcatattataaggccaactgccacgccggccaatacttgtcattgattttttttttttttt

SEQ ID NO: 326097 - DNA, 1199 bp, Cannabis indica
tttttttttgctctgataccatgttagaatttgaggataaaataaatgaggttccatcccaaaaccaattggcaatgggaggagtagctcatttctcttatctattctatcatctttccacatattggcaatgtgggattctctaacaagatttcaagtaattataaataatttcctgtaatcaaaatgcaatgaaattagtattcagcaaaactaaattaattattaaaatataattaaactatgaaagtaagtgagatattatagatcaaataactattttagagattaagagaaaattaaattatgagagagagagatagggagatagaaaattcattacttgtaattgtaatatagtattgaaggaaggcatagtgcttctatatatactactttttgtttatttatataataataataataataataatatatttgagtagataatatgtagtagtattgtaataaaatttggacggttacaactattagtctttattaaaaaaattgttacaattattaatggttacaatgtgttaaatagagatcataataagaaattttgagtttctcattatcttctaaattacattaattatgtaagttaaaaaaataaagtaaattttaaaaaatagaataaaaagctaataaatctaaaaatttaagaaaattatgattaagaggtaaacttgttgccacatggaatggaatgttttaaaccttcttttatataatttttttatatatttatattgatatatatatattgattagagggaaatatagtggaccataaaaaaatactttggggctcttttttcaaaaaaaaatatatattattttttaaaatcaattaaaaaatatataatttcaaaagaaagttttctttttaagtttctggattaggctcaaatagaaatatcaaaccaacaagattacaactctatgacaaataatacaaaggacaaaatcatgaattaaataatgttacaagactaaacaaaacatacacataaaatagagaatatagagagaagagaagaattacaactcaaagcaataagctaaatataaacacaataaataaatagcatatatgtgagagcaatctcaacaccacatacaccacatgtgtataataggagaatcaccaaacttgaacaagattttacacctttgtccaaaagcttatttcc

SEQ ID NO: 326098 - DNA, 1369 bp, Cannabis indica
atttttctcccgaactttaacatgtactaaatcatgcccctgaatatttttggccgttaaaaattctccctgaactattaagatcgttaaatttaaggacttttgtctaattttagtaaagttaattctaatatggatgaaagttcacggggatgatttagtacatatcaaagtttgaggggcataatttaatagatattaaagtctgaggagcatgttttagaacataaacactcactgaaacagtaaaattgaataaaattagacagaagtccttaaatttaacaatctcaatagttcagggggaatttttaacggccaaaaaaattcagggggtatgatttggtatatgtcaaaattcggggaaaaaaactgttaattagccttttaaaaatttaccaaaaattttaaatagctacattacattgtatttgattttgggaaaaaaacaatcaactaaaatgtctactacataaaataattttttttttaaaaaaaatgtaaaccaatattatttatttaaaaaagtaaaaaaacttaatcatttcttctagtaattactaattatttgacaaaattggttaagtgtaggagaccacactataccccaagattttttctatattataatactatattttatacctttaatttctccagatggaaagcttgattgataatccttcgatgtttgacccatttctccccctcataatctgatagaccagtagctaacaaatatacaattggattgacacgtggttttggaaaatcacctaatttcatcaaaatatctttgacgtgttctgggtttgtgatgtttactcttggagtcggtccaatccatatgaatgaatctttacctgaattgatattaattgttaatattattgaattcatcaacatcaacactagtaaaaaattctccatagtcaactcatgatgaggtaatattgcacatgtgacgtataatcatataaatgtgtgtttgtttgtccacttaattatactatatataagcgattattctaaatcgtcgaccgatccttacctgataattttctactaatgcccattaagttctgtgacggtcggcgtcgacagttataataacccacaacaatatcatacccgacagttgggaaattctttttttttagtagtgataaagagaccacgaaaaattatttcgataaattctcttatctatattattgaggagattttttaatttatttttcttcataattctatacattatcaaaaatataattcaaatagtaatttagtatatgtaaaataattatgtgtaaaatatttaaatcttattttttgatactataaattatttgaaatttaaaaaaaaata

SEQ ID NO: 326099 - DNA, 846 bp, Cannabis indica
atataaagtactagtcaaaagaactttaatatacaattcaaagcaaatctatattattttttgaaattaatgtcaacgaacttagcacgcttcatgttgataactcagatcagaacaatctacagattcattttaatttttttattttttattattattgtttttttttgattaaattttttttattttaaatatgaggaaattgtataatgttttggtttataagtaacatggcaattccctcaatcaacgccattcattttggtcgtcttctaagtggcactagaccacgtttcctatttattatcctccactcaatcggcttaaacaactatttcatgaatgattgatttaatattcaattttagatccgaattaacttgcatgttaacgaacccaagatcttaacccactcattgaagtagaaaagaattgatctaattttctgtagtacactccttcaatattacattattaaaggagtgttttagtaaaatgatatttgtttcggcgttaaaaaattgtaattatataagattatttacaaatttttataaaattttaaataatttatcgatcaaaattaaattcaaataattatttatcacacattcaaaaaacaataaatgcacgtacaataaaatatttaaactttattctcaatgttataaattaatcagatttttttgagaatttataaagaaatttgaataactataagaaaggtacacgatcataacaaaaaaatagtgtgaacaactcttttaaataatcgaaacaaaaaaaaaactatttctttttgagagaatgtactatatgccttataatactcaatttctaatcatc

SEQ ID NO: 326100 - DNA, 1370 bp, Cannabis indica
ttcttgtatgtcggttatttcccagaggactactctattagaagcggaagactcattcgacagtggatagctgaaggcttcgtgaaatcaaagagggataagacactggaggtaactgctcaagaatacttggtagaactaataaatagaaatcttattcaagtgtcggaggaaactgttactggaaaagctaagacttgtcgtattcatgatcttctgcgagacattatcctaaaaaatatggcagaattagacttttgtcaaatttttgctagaaatgattcgaactgcaagatattaagtcgacgcatgtcagatatcaatggtggatcttatgaatctattcaaagcaatgctccagaacttgcccaagtgcgagctctttttatatttgatggaggagaattgcctaatagtgttgtatgtgctatctccactaattttaagctcctaaaagttcttgactttgaagatgcgccaaatttagatcaccttccgaagaatatcggaagcctctttcacttgaaatacttgagcattcgtgacacaaaggtcgcagagttaccaaaatcaattggaaagttagaacatttagagactttggatctgaagcggtcactagtggttgagttaccgattgagattaagaagcttaaaaagttgcgacatcttcttgcttaccgtgatgaatatagggatgatgttctgtattttaattcgcaaaaaggagcaaaagttaataaaggaattgggcagttaaaaggtttgcaaaatttatatcgtattgaggttaatgttgttggatttaacatctttgaagagttgaaaaatttgactgggttgagaaagataggcatcactatgttgagaagtgaagataacaatgaattgtgtgattctattcagaagatgattcaccttgaatgcatttcgatccattccaaaagtgaaagtgatataattgatttggaatctctttcttccccacctcaatatcttcaacgcctcttcttatatggacctttgaggaagttacccaattggattacaaaacttaataatactgttaagatttgtctacgatggtcgaaactggaagttgatccactgaatgtgcttcaaagtctttacaatcttctggaattgggactttcatttgatgcatattgtggagagaaacttcagtttgagcaaggagggtttccgaaccttaagaaacttggtctcaagtcattgagtaaattgagtttgatagtaattgaagaagaagcattatgtaatcttgaaacgttggagatcgggtattgcccacaactaaaggaggtgtcatgtggattccaacattacaaagcttaagaatgtttatttga

SEQ ID NO: 326101 - DNA, 1132 bp, Cannabis indica
aaaatgagtagctggaccaagaggattatcatctttctcatacacaacaccatcagaagattttatttctttaccaccacagttaatcgcaaagttaaaatctgcaaacatttagccaaatctttattagaaagtactgtaccaagtattcacaatcatttgtgcatatagtacactaacatgttaggagattgaatgagaggggtgtggaaaatgtatcggaattgagcttaggctcttttcagagttgaggtctctcgaatagttacattgttctcttttcattttattcatctattatcaaatatcaaatatgcctattcatgtctagttattttctcttgcactcagatcctatcataatataattttctaaagtaatacagcttaattcaatccaaagaaataaaatagaaaaactctccaaacttcacttacagagaggacggtcttgattacatggaaaatttctttgaagacaattcaatcctaaaagaagagtactaaaaacaaaccaaaaaataattagatataaaaaaactggagagataactttaaccaagagcagcaatgtgggaagttattttacataacttgagaaaagacaatacctgttatttgaattatctataataaaattgttgccaaccaagttactgcatcagaaaagtgaagtataaaattaatagtactagttttatcttcatataaatacataacacatgagtattaaatatataagctaagtaaagaaaccattttttttttcataaaaatcaaagacatacagttgtaaattttgttgattgttgacccaagaaggaatggttcccactaaattattgtatgatagatctctgaaagcataaaatagtacaagtgtgttaattttagtcattaccatgaataactattaaataagtgaaatatattaacttacattgtgagaagagatgcaattttcctctgaggcaaggtaccatttaggctattatttccaagaaatctaagtaaaagcacaatattacttgctttaatagtgcaatagtagctattatgaagcaaatgatgtaaagcaattaaagagagacagtgatatatattacaaagcagaaagtgaactcatgttgaa

SEQ ID NO: 326102 - DNA, 947 bp, Cannabis indica
atcctaattagcctaaaaaaaattatgaaataataattatcctttaatataagaattgtcacataattttttatataataatttaaaattttagaaaatgaccatacgggtagaaatttttaatcacaatatataatgcccataattaattaagaatttaaatctcccatgactcaaggaaaaaaaattaaaacatgccttttttctattttggctgattgtagaccataaattatatattaatgtaaataaacaataaaagataaatgatattaattggtctcaatcaaataatataaaaatttgtatacgtaaataaattctatcacaatcacaatatcactctctctctcactcttagttgtatcattcaattaaaaaatttaacccacatgatctccctcgactgatcatccttgtcacgacccacatgggctctctcactctcaaacttccctctctaattttcttgtccctctcagtataaccacagtggaccacctccatgccgtcaacaaccccatcgtggtcgaaccccttaactcatgagcctgagtccatgcatcattgtcttcagttgtgaatcactctccggagtcgaagcttgacggatctgttggggtcatgtcgactcttgtttagccaaatgattctctggaacaagatctactcgcagagatctttcaaatcccgtaattaatatttgcttacaccgtacgagatggagctcggacagtacccattatttgcaatgaattctttatatttttcacttagcatttttaatggtcgatgtccgaactccgagtaaatagcagcgacatcggtttaacatgagattgggaaagttttatttttttctttttttaatagagttagggtattttgtaacaaaaatgtaattgtttatttaaaaatttaattttagtgtaataaaatatttgttt

SEQ ID NO: 326103 - DNA, 640 bp, Cannabis indica
acaaattagaaataacaatgtaatccctccttaataaaatgaaagaaacagttgctctcattattgattgctataaaaattagtgtcttagaaagcttgaaaactccagcagaatgaaaatatctaaacattttagaaacaaagaaagaaaaaaacaattgttcaaaaaaaaaaactgaaagaaaaaaacaaaaatgtctcaaccaatcaataagaaacagtaaatctatgaagacaagcaagagcataggccatacacagccacttaaaagggccacgttggccaagtcttataagtccgaaaagaataaatacacactccaagcaactgagccgaatggtggtggtgtttaaaagatcccattttcagtctttgtcctaaaccatagcagttgattattgtgtcctaacaaatacttgtattatctaaaaaagaaaaacaaaacaataatacaaactatataagttgggaggtgtaacaagacagagtatatgtgttgtactgcactgcacgttatttcttcctcttccttccatataaaatcactatttaaatattgagatttttacacctgatgtcatatttcatcatttttttattttttggcattacacggttttctaaacttttttacctttt

SEQ ID NO: 326104 - DNA, 1409 bp, Cannabis indica
atttattgtaaaataaataataaattttagttaagacaaaattgagaaattaattttgagttttaaaacatggcctacacgtgtagtgctataacccacatgtgtaggttgacatataaaagcccatgaatttatttaagttattttattatttaataaaataaattaaaataaataataattatctttttaattatttaattagatattttattggataagatatttaaaatttaaaaaagttattaaaataaagatataattgaaatcagttatagatattattatatttgaatttaaatttcaaataaagaataataatagtagaggtgtacgtcggttggtttgatcggtttatgctacactttattcaacccaatttaaagattagattacaaaatctaagtgcaatccatttaattaagtaaaataaaatagtaacccgcccaatgaaattgattggattggttgagttaactcgtccaaatcgaccattaatatttttttttataattttttatttttacattcaattattatattttagttgattgtaataatgagacaaatatatatagattgaatcccaagttcaaatcaatcaccataaaaaaaacatattagtttaaactttatattttttttaaactttatattttttaaatagtcatataaattatatgatatataaatatatataataaaaatatatatttatatatataaaacctcttaatcgggttggttggattagttcgggttgattgggtgtattggcttatttttaacctgcctaatataaagattgagcggtttatatttttgttagatttttttatttgcatttttcgtcgacttatctcggtttagtttgggcagaatattcgggttggatggtttacaaaagtttatgtacaaccctaaataatatatatttattttattagattaatttaaagacttatgtatatatgatatatacataatataatacgaataaataacttttttagggtcattatatatgatataacttagaaagaaaattaaacgaaagaactttcctaaaaccctaaaaagagtcgcacgaacattatctttcgctctatttctacctcacgcatctctctctctctagagattggtgttatctctcatctcaagtcacattgtctcatgagttaaatacacactataacagaaaattcaatcatcatattaatcttataagcccaatcttatcctaagtgttgaggttgatttggaagatcttagtatgaagtcttcatcaagttcatatggcttttggattggatgcttgataatatatacgaaaagaattgagaataccctgttaggcatcaaaaggtagaattgtttttctcatagtttagatttaatttatgtaa

SEQ ID NO: 326105 - DNA, 812 bp, Cannabis indica
aaagaatccttgtagactggggggtaagtgttaaccccaaaaatcgatagagtagattttcgagattagccaataattagtctcggcagtcgagatacatctcttgtaagagtcagtcgaggaatgacttagaatcaacatgagtgtcccagtgccattaatataaaggatcaatgcttgcaagtctcagggtatatccacacaactcaaaggtcaacctaaagtcattagtagagctagtaagatcaacttactaagttaaaattgttggaggattctcataacgatgcgttcagaattatatattgtcataacataaaatccatagatctctttctcatctttccaatgcattttgaatcgtccaatttcgacatatatcgagagagttatgggcaaaatactacgattactgaattgtgacaatgggtatgcgagcccatgagccattatgcgaacccatgagctgttgtgagaacccatcagccgttggacaatttggggagcatttgggtgagtcgtggagcatttgtgtgaaccgtggagcccttatgtaagtggtggagcatgtgtgtgagccacgataatgaggggcttgtatgcaaggctacgaggctacaagacggtgagacgagggctcacatgtgagccgggtgtgtcaagtgcaagtgtgtgagagtggggggcttggtattgggagccatgggtatatgtgtgttgtgttgtgcattgggggctcgcatgcgagcccatgtgggggcctcgcatatgattcgttgtgtgtgtgtgtgtgtgtgtgtgtgtgtgtgtgt

SEQ ID NO: 326106 - DNA, 522 bp, Cannabis indica
gggcataaaacccaacagttcactcctcgtgacgcggcagtaatagagttacgtctacttcgtatttttatttctcactagaattacaaaaaattgactaagtgttagggcttgaaattctacaaagaaagtagagagatatgctctgacattataggaactttttagagtgtgaaaaataaggtagatgagctctccttctataacgaaagaggtcctgttaaataataattaagaaatacaaaaaatatcaaaaaattagtttgggcagatcttggccattgatgatgattcatgataatccagtgatgaaaattgactcttggtgaaaatcattaatttttacactttgaatctcgtccgtcggatcattttcgggttatctgctagaaaaatcccaactttgctgaggataaattttggacccaaaatctttagaattaggatgtgggtattgttcagaatattttaccaggatctagatttactaacaagtatgttcattaacatcctaaatatgaa

SEQ ID NO: 326107 - DNA, 1051 bp, Cannabis indica
ttttttttgaaaattttattttaatttatctttaaaatatggcttaatttgtggatgaatctgtggttaaactggaattgtgatttagtatgtgttttgtgataaattgtgcaagaaaaatctaggaaaattatgggtttcgtgctgaattttttttcccgattttgtatttttttgcgacattgtgcaatttctgtgcgatattgtgcgattttgaattagtgtttgtgttatgggtatgttcaggatattgtgcgattttgagcgatatataggatgcaatataggttgtgcaattttagcgagattatgcgatttctatgcgattgttatgcgatttacttcacagtaccttataaattttcagatgttgtgttgtattttttagcgattattatgcgattactatgcgatatttatgcgattctagttggcagtagcttataatttttttggttgtcttatgcgattttctacgatgtttgtgcgactttatgagatattcactaattattattttttttttttaaatgcagattgctccagaacttattctcccattgttagagcactttccagggcgtataacttacagaggaacgagtacttcgcttcaataaaggataaatttgaagcttttgacttgactcagaaggtgaaggagacgccctttggagttttttggaatgcccgtgaattgaaattcagtggggttattgtgcatcaactgttactaaggaagaagaaagtgagtgaggtaaaaaatgatgaattgtgattttacatgggtaaaactaaagctagatttgggcggtctgagttcggtttgatcacaagcctaaagatgagcggtggtccttcgtcagaagaattgactacacaatgtgattctgatcggatattgcgagactatctcaacaattcaaaaagggtgacctttaaaaccctttggctaggttttgaggcatgcgatgttgcaaatgatgtatacaagctggggttgtgtgcatttgtcgaaggcgttctgctgtcacgggccgagggtgtgtat

SEQ ID NO: 326108 - DNA, 867 bp, Cannabis indica
atttttctttacttttaattttctagccatgcatgtagccaagggatgaattagcatatactggacataaataaaaatcgaacaatctaaatttaatatgatagcactaattattaaatttctttttaatttgttgtgttgcttcttcatcaattcatacaatttaatttttcactaaacaacatgttgaaaacacctcagactgaaagtgagtctaagcaacaaatgctatatagattcaatattatatgttgtcagcatattaaaaaatgaagatcagtaggtcatatatatattgtaggaaattcaaataccgaaaaaccctacaccacctaaagccaatcaaaagaaacaatggtcaattaagacattttagtacaaactcttgtggcataaagttgcactcccaaaacgatcgtatgccttcgattcaaccctaaccctagcagacgaggcttcgtcttcttcctctcaagctcgatcttgagcttcaaaccctaaccccttgatcctgcaaaacccggccagacacaaaaccaagaaatccaaagctacaaaacaacaacgatctagatcgatttttgttgtggttagagatgaacataaagttagacaatatgcagcagagattttatctcagagatcactccaaactactcgtccataggatagtatgacatttatatatagtattccacattagactgctcacttttgtctaatttgattagtgtcctcctcgtcctcttccatgagaatcatgtccaataacactagtgctctatagtatgggacactactactactgcatgcatgcgcccggccctagggcataggcgggctaggcctgtgcctagggcccaccta

SEQ ID NO: 326109 - DNA, 1102 bp, Cannabis indica
aaaaaaaaaaaaaagaaggcaaatgaccctggttcagaaatggaaaaaatatgctcatcgaaaaatatgtactgagatcaagcaacttatatgccttcattccagtagggtatcctaagaaaatgcatgcaacaaccctcggagaaaattttgatctcccaactcctaatgtggaagcataggccaaacaccaaaatgcttttaaatggtcataacttggagctttggagtttaaaaattcaaaagtggatttgtgtttgagattaggtgtaggggttttatgtataaattatgcagcagtacttattgaatccacccaatagggtaagggaatatgggattgaaaaagaatggccctagcaacatttaagaggtgttgatgctttctctccataacagagttcggttgtggcctttgcacacaagaatggtagtgtatgatgcgtaaagatgagaacaatgtaggaaactgtaattcttttgcattgtcagatctaatacctttgatttgaacattatattgggttttaattagttgtatgaaggctgatacggcatattgagcatcggatttgtttttgatgagatgaatccaagtgattcttgaataatcatcaacagtagctgtaaaatatctaaaaccttcagcagtgggagtgttatagggtccccaaatatcaatgtgtattagatcaaaacaatgattggacaaattatgaatactaatgataggcagtttcttttgcttagcaaaatggcatatagaacagtgaaagtcatgacagtgggaatattaaaaatgtaaactttattcaatggatgtttctttacacaagaagcatgacctaatctataatgccataggttctcattttttattctagaatcagaaatggaacaaacaataggagctttcttctcatatatgtaataaaggtttccaactctctcacccatgcaatcacttgattcttggtgatatcctgaataacacatttatgaggaagaaacaagaatgaatagttagcaaaattggataaggcacacacagaaattagattatgatgaaaattatgttggaagttattttaccaggatctta

SEQ ID NO: 326110 - DNA, 860 bp, Cannabis indica
caatctcagtgctcatcatcatctcttctctttcattgattgatccaaaattaaaatttgtaggttgtctcgttgggctttgaaacacctagaccagagccatcgatggtgaggcttcgacgacgtgggtacatacaaaggtcaaagatcatgaggagagaagaacatcttagccttggtacaaccagatctcgttaccggaggaagaacatccagccgttggcatggtcgccaaccaaagctttggccagatttagtcagatctcatcgccgatggaagaataacccattcctaacacaatacggagaaggggaacaagagagatatttgaggcttttgtgttctcgggcatgggtgttggaattattttaccaggatctagatttactaacaagtatattattaacataaatatgaacttctaaaacgatatgaaataaacacatataaagtataagaaaccttacagtggttgcagcggaatataatgtctccttccactcagatctctaacccttgtattctttctgtagcagagtatcaccaagatctgagttcgaatctccgtctcttgaaattagattcttcacagccttacacacgataattgagtactacttgatgtgtgtgggccctcactctttcacataggctcggtttagaagagaagaagggggagagagagtggtttcggctagggttaggaaggaggctcaaattttatctgaaggaatgagatgcatcctctttttccttatggatattgggtcccactttgcaattttacaattttctcatttttccatcttattttctcaaaaatgccaattttccaatttaaccacttaaatgcaaattc

SEQ ID NO: 326111 - DNA, 640 bp, Cannabis indica
cttaactctatagattttttccctttcattatttatgcatatgtatatttttcttaaatagccttatttagagttagtgagcattttaagttttgaagaaaaaagatatgataaaactaactttcaaaaaggaaaaaacaaagatatagtgagttgctatttagcatttaaaggtactccatatacttggtgattttttattattatttattaaatcaaaaagtaatgagattggataatctaatatatgaagatgttctaatgtaatggatgtagttattttcatcttcaatatcagacaattttatttcttattttgatatcgcatattcatatggatttttttttcctttttaagtttaatcttacttatgttatgtttgacgggagggagaagtggacggatggagaggagagaagagagagatatgggaggagatagcaaatacctttgtttgacaagagggattgaaggagagaaaagagaggtgaaagaataacaaatctattcaaatctctaatttggaatccctccaataataaaaggattggaactctctctttttaattagaggagttatatttacaccccataaaattataaatacacctcattattaaaaaaatataaacttaaata

SEQ ID NO: 326112 - DNA, 853 bp, Cannabis indica
tacctttacgggcgacaaaattgtccctaattaggggcgactgttttgtcactcctaataatacttttaggtgcaaattattagggataattttttaagggcgaattgttgcccttaatagttattaggcgcaatttccaatactatttgtcatcccgaaagcttaaatttgttgcaacagttggaaaaggaatccaagaaagaagaagtgtatttggcaagaggaagatcacccaagaaagtgagttcaaagagtaaacatcatcactctcaatcgagatcaaagtccagattgaaggaaggaagcaagtgtaacttcattggaatatctggtcacttgcaaaatttttgcaagaagtacaaggagcaacaaggatttaataaatctcttaatggagataagaaggacttccaacaccaccatcacgggaaggattatgctgtaatcgtggaagatagtgatgactgctccatggacgaagagttgttctctatctcgaagtctttactgaatagggagtgaattctcaattccagatgcacttatcacatgtgtcaaagtcgagagtcattttttcattacaagtcagttgatagaggtaaagttctaatgggtactgatcattcatgcagggtcattggaactggaaagattgccatcaaacagtatgatgatggaatcaaggtgccgacaaacataaggcacatcctggagcttagacgaaatgtcatatccctgggtgcgcttgaggatgaaggatacagatacaagtttatgcacggaagcttgaggatcaccaaatattctttggtagtgatgaatggtaaaaaaatcaatggtttatatgttctc

SEQ ID NO: 326113 - DNA, 746 bp, Cannabis indica
taatgggttttatttagggcacaaaacccaacaggagtgggagtagtgagaggccaccacttattggcttgggagtgttatcgaatagaacttcagaataggagagccaaccatcaactaatggtaattttgactgaagaaagtgagagggaagaagaagattttgacccaagaattcaagatgaaaataaccagctaaaactaattaaatacttcgaagaagttattttatatccaaacaatcctaaaaaaatgtgtgtacattcgaaagaattcaaactaaaatatcaattaatcatttttctaaaggcaaaccatgatcagttcgtttgaagccactcagatatagtgggaataagtccaaagataatttgccatcatctgaatatcaacctcaattatccagcaaaaagacaaaagcgacaaccatcatatttagagagacaaggtgcactcaaagaagaagttgaaaaattgttagctaatgattttatccgcgaggtgtattatccgtcatggatctcaaatccagtacttgtcccaaaaccaaatggcacttggagaacttgtatagacttttcgcatttaaacaaggcatgtcccaaagattgtttcccactacccaggatcgaccagttaatggatgcaacagcaggacatgagttgatgacttttatggatgcatattctggatataaccagtttaaaatccatgtccatgaccaagagcatacgagctttgtaac

SEQ ID NO: 326114 - DNA, 949 bp, Cannabis indica
tacttatgttgtattaatttttttaaaataaataaaaattttatgactttcaccaattaaaaattatcatgtaacaatttacataataagaattataacttaagtagttatttgcaactgaaaattgttaagtatttatgccaaaagtaatctaaaaaaaactgtcatgagtatctcaaatgagcggagtagccgctttatccacacgcagaaataggcgtggacacaaaacaaaaacgcggaagtgagaagatgttagtgacaaatcgtaagtcactactaaaactcagtaatagtgccatacagctttacactattcaacttatccagcataagtcaacgtagcattcgaattgtgttatgtttcacactacctagtcaacacattgatggtgtatgccttatctcatagtgacgtcagaataagacttcaaactgtctcaccaaaccctatctcaatcatccaattacttgattctcattattatagctacgcatcgtagtacttgtcggccaaaaatttggcccaatttagtttcaaatttgagttcattagatcactttctaagctaacatgaagcaatatttatgatcattatgctcatcctttaatgttcttctaaccatgtcggtgttcctaaatgtaatgtgtccaacttacatatacctaatattttatttttaaactaatacatatcactattgaaaatatatgaccagtttatttaaaatccaaaaatacccctccaatttctcatacttttttagttacaaaaacaataaaaaaaaaaaaaaattaaggtagccgatggggtccgatggtggtccaacaatggtccgatggtcacctgatgctactttgtaagtacaaaacataataataataaaaaaattggtaagcagatctggtccaatggtcacctgatgctattttttttattgtatgaaa

SEQ ID NO: 326115 - DNA, 940 bp, Cannabis indica
taaaaatatcataaaactactacttttgtgtcaaatatagctcaacttttaattttcgattggagatggtcataatttgtaaattagatttgtggagtaatgaaaatactatagctgatttatatataaaaaatcaattaaagtgttaaatttttatgtaaagtatataaaaactctatattaaaaatataaataaaatattaaaaaaaaaattaattacattaatgcgtaaaagagtaaaaaaataatttttattatagtgtaatatttaatctatgttatattttgtattaaattaagcacaatttttgttatgtgtataatttagaccacaagggaaaagggatctttggtttggtttgtttgaaggtgaaatttaatattttattttatttattatcttatctcattttggattgattcaataaattgataattttatttaaaaaaaaaaaattaatggagtatagttttaaaaatttagtagaattactaatatttatataaataaaaaataaagaaaaaaatatactgtaaaacttatgcaaaacactttttactattttttctagtatttttcttaataaaaattttgagtacttagagcacttctaatggagtattataaatgtgatggcgtatatagttattagttcatgtttataaaattgaactctaatattagagcatctccaatgaatagttataaatgtggtatattgttattttttagaattatttttttaaaaattaattctaatgttgatataaaatgtgtgtcaaatttgactaagctaaaaattgtgccaaatttggcacaaaagatagcataaactaaattttagcccacaataaatactatcttctttcaattatacctttttgtcacttattaatactattgactttgaataagatatatttatacaatattaaaata

SEQ ID NO: 326116 - DNA, 1001 bp, Cannabis indica
tttaaaaaaaaaatttacttaaactttgagaattaaatttttgaacttcatctaacaaaaaaaataaaagattgaacttgaatttgattgtacttattatttttgttatgagccaaatttttaagattaaaacaggacattcaaaatgtttaagacggccctattcatagtattgtaaatttatcattctcttaagttttgttacacgtgacaagcaaaatgatgacatggtttgctaattcacattaacgctatgagtataatttaacattaaaaatataaatattaggtatttttaaaaatcattatactaaaaataattaatgaatttagtctccatgaatcaaggaggctttattaaggggaggtttacagggtacaacataatgatttgtcaagatttattaagacactataggaggaagaccaatagaccttcttgcattatcaagttggatttgcagaaggcctatgatactatagaatgggactttcttgaagaaatgatgcagggactcttatttccatctaagttcattaaactcgtgatgacctgtgtgagaaccccaaggttctcactgatgtttaatggaactttacatggatattttgagtcaaaaagagggcttcgacaaggtgacccaatgtctcctcttttattcgtgatgtgaatggaatacctcactcgaataatagggagaataggggaaaaagaagacttttacttccatgacagatgtgcagccacttacctaaatcatttggcctttgctgatgatgtattacttttctgaaatggagatttcaagagtgtgtattacctattaaaagacctcaaattgttctctgagacatctagattgaatccaaatgctacaaagtcagccatgtacagaagtaatatgcctgaggatcatgttagaagaatcatgactatttctggcttccagcatcagtcactgcctttcacttacttgggagttccaattggtgcaaaaaga

SEQ ID NO: 326117 - DNA, 943 bp, Cannabis indica
atacaatacgatgtaatacgtcgtaccaaacgaatcacaaatagtttcaatattaatatgaattaaccattaaatgtctaacataaatttgtaaaaattgactttggattttagtctcacacatcatatggaaagaaataaattgcatgttaatttttttttattgttatttgtaaatgtttattgtttataattttttaattcgatcatcaatgaattaaattaaattaaattgtttgataatttgatatttttttgagagattgatctgaattatgacaatcgtcgatatagaagaactttcagtcaacaagttaattatttagtcaaagatttacaaaatcagaatatgagtcactacaagcaaaacaacttatataagaccaaattatcttggaaatttagacaaaataacttgacactatattcaagaggcatctgatataagcaaccaatttggccataactacccacaaaattaatagatatataaaagtagattaacacaatatacatgctataatgttatgaatttttaaattcaggataaaacacagttattgttgaccgagattttcggcaaccaataaaataataaaagattaaagagctgtaagaaattaagagaaggatttttacatggttggggcgttaatgagccttagtccacgagtctgtgtatttatgagtgtatttaatacagagaatgttcttggtgagtatttactcttcttgcacttatgcaacccaaaaaatctcgaccccattaatgagctttgagggagtatttatagtgttttggtgggctgattcccagaattgtagtacatatatttttgtaactatcaataaagttgggtgttcccaatgaatataccatgggtaatgcatcgtcaaatccctaggtgttgtagggattttatgtggaatgtccttattgcct

SEQ ID NO: 326118 - DNA, 1057 bp, Cannabis indica
aatgatcttgcccacattcattttcttgcctgccacgatagaatacaataagaaaagacgtgtcttactcaatgtggtaccatgggtcatgggcatcaaatagcacttaataaaagcaagacaaacactagcttcgggtcgtaaagacgagtttaacaaagttcggtggccggaaggagagatagaccatgcagaacctgagtgagaaacagtacgaagcacgacgtcaaatgggataaaagctgggttaatcctcaaaatatcgaactcatcctctaggggagctgtcaacccatagatgtcgttaatcacataaggagaaaaggggacactctgacccctcacctgaacaacatcaggattctttggatcaagtgcaacataaaatgcaaggacaatagaggccacagtaggcttggaaaatgcacataacctctcccactggtgctccatagtcaaattcgtaatataggcaagtaaggcttctggggcagggagaaaaccacgttcggccaattgattacgggttcgtaatatctcataatgctcttgagtagggacgggattggctttggctttgggatgagtagtgaggttaggtttaggtggtgggactgtggaagtgatgtgcttaagctttggatgagctttgtaggtggatggagttgctttggtagatggagctttaggtttaggcgctgagacgaaataggtacgagtacgaggtggtgagtgtgtaggtttaggaattggttgtattttagtgggggagggcaaggcaagggtcggtggtattttggtgattggttgttacggtatagaagctagtgaggttttggctgaagctttatgcttaggagattgagtttggtcggatgtcatggcctaatatcacaataataggctcgaaatccttcgaaaggctataaaatatttgctacacatctcaacaatctcaacagaataacaacaaccaaaaagccacactatgttcagcaactaaatatgaatctagatttactaccatatatgtttcattaatatcctaaatatgaat

SEQ ID NO: 326119 - DNA, 958 bp, Cannabis indica
tgactttcgagcttgttccgttctttttgttcttagtgtagttgaagccttgagcattttgtttggcttattccaatttaatgaactcatcagctctattaaggaaatctctcatagtatgggttagttttcgccttgtatcctttcacagccgacttcccaccagaataccccccatgatagcagcccatttactatcgtcacttagattttttactttaattgcctcctgcataaagcgatgaatatagtcttttagtggttcatcgggcttcttcttgatggcgaccaagtcacccaaccattctaaaaggagtgataacaatttaaattaatggctaaaaaaacattccagccattttatggaaatcatttgaatacactattgtaatgctttctttcaagtcattgattgtaaattttgattcaaaattttgtgtgtgtgagctccaaataatttgccgcaaatcaagacctactatttgggtgatgaaaacagagaaatagaaatttgtgaacctcaactactatttagtaaatatttaaaaatcttatctcaatagaaagaatgaaatctaataattaattctcatttctttttctttttctcattatttttttatgtaacaaaagttctctcttcttattatttatttattcattttttttttgaaaaagactctcttctcattatttaaagttgtaaaatctactggttgtttattattctctttaacccatacatttctgcagatattaaaaatcattttgtctgcatgtataaaatatagtagcgtttgataatacttttttaattagttttttgtttttaaaattgtaaaagtgaatattttttaataacatgtttataaaactgttttcacttttcaattttttaattgagaatcaaaattttaaaaataaaaaaaatcacttttaatatttttttaaacagttt

SEQ ID NO: 326120 - DNA, 790 bp, Cannabis indica
acacactagagaaaacagtcacagttttctctctatcaacccgagtacaccccttgttcttgaccctcttcaagaacagaactctcagcttagaaccctaagcaattccctctaatcctctctcttattctctctctgtctttcttatgttctctacctctagaagtgaaaagactagacttatatatagtcctaactcaaacaaggatagcaccaactaactaactaacataactgaaagttagttaagttagttggtttaaatgagttggataataagttagtttagaggatcaatttccacattttgtaattattatttttacttttcataatgtttcgaagttaaagataatagataaatatttttgtaaaagaaataaagaaataaaataagaataaggagtgcacgagggaggcaagaaggagacagatttcttttttttaaaaaataaaataaaaaattgatgattacacgcaagaagagagaaataaaattacaaaaaaattatagaaattattggaaagaattaaaaaagaaaaaaaaaaactactgtggattattagaaagagacaaaaaaaaaaagatttaaataacccaaactgccaaacattgatttgggcatgtaaagggagtagcgccaacagtattttataggcagtgacggagtctgaaatttttctttgtggggatttttattattaaaaaatatttgtacatatattataatcatttttactagatttatttaattttgtggggtttttttttactattttagtctataat

SEQ ID NO: 326121 - DNA, 1093 bp, Cannabis indica
aagaatcatcttctctgagaaactttaacgagtgaatcaaagaaactaataacataaacaagagttcataattactcaagatttaggctgatctactaactgatcatcgttgtaatatgaattgggtctttataataagcgactagtttgataaagatagcttaattacatatcggtcattgttgtatataataaattataatatttattatatacaacactttcatcgagatgtcaatctacatcagtgatccgaatcaagattgcttgcaaataatgggtatcagtaaattatactagcaaccgttgattaaatattccgtaaccttaatatgaagctgactattttatccatggttagtgacattaattctccatataatacaagttataacctcatatatgattaaaaaattcaatatttatatttaaattattaataaataattcaacattcaaacatatttcaaattattcagcttatatttataatcgaaaatttctttataagattttcagggcacaaactctaacatatatacaatagatttagataatcttaaaaagattagtcaatttttttctctcttacaatatattgttcttgcttatgtgtttagaccaaaataagaacataaatagttttgtgaattctattaccccacattaatctttgtatgttaaggttgatttggaagactagtgtgaattgtacaacttagaaatcattcattatacaaaaagatatcaaggaatcttaatagtcatcaaaaggtaattatattgattatttcctaagtcaatatacgatagatttaagaaacccaaaaaagttactctattcttttcctatcctaccatatactcttgctcatatgttgagaccaaaagaagaacataaacagttttatgaattctattagttcacactgatccttgtgtgttgaggctaatttacaagactataaggtgtaagtttctatagcttagaaatgaatcaatatacaaaaagatagcgagaaattttgatagtggtaacttttctgcctatctatttattgttttacatttaatatagggtaaataccatttt

SEQ ID NO: 326122 - DNA, 789 bp, Cannabis indica
gtttctgcgcttgaagacataacgctccatttcacaatcgcagttcttggtgacaaggcaaacttcagtagtcaacatcatttgagtgtccgcttctatctgagagagctgactagatggaattgtggatccaattgaaagatgtctggagctgattagtgaaggtaccatgagtgtgccttcctatagcgagatggatgccttgttattagttatttggatttacttgagcgttatatttagtttgtataatgtgcattataagataagtgccttaatagtcatcatgcctcgtctatgtctcttcatgcgtagcgaggttgatgccttatcttgtactagtggtgtcgtatggtttctcgttactgtatgagccaacgatttgtatatttttatctcgcgtaagaccttacagtcagtaagttgtaaacatactctgtctgttctgcattaaatgagttattcaattttcaaatataaatatcattacatttgttgattcatattctcccagtttgacacgtgtcctcctctgaagtgctagccaaatttcgggtataacaattgccccttaaaaagttccttttaataaaaagtgctttttaatgattacagagggtatatctatcataatcactttcattttaagtagttaatagtctaatatgctggagcagttcattacctgccatgcttttaatttgtgagcagttatcaattctgcctcgcaataacagttataatctgtttcaagcaaacttgaatatacttttaatgattttatcactt

SEQ ID NO: 326123 - DNA, 1246 bp, Cannabis indica
aaatggtaaaaatgttgtagtgatgtatatatggtttaatatttggttccaacttttggatacatatttatttactttaaggacactgatcatatatttatgctctgatctgaataatgaaattaataatgaaaaagaaaccaaaaaaacattataatctatcacttaattaattataggagagatagatgagatatataaaaatatatataagtcgaccactatatataagagcattgctattgggcactagtggtgcctagtaccttctagatgtgtcgccttgcaattagttagcgatactccataaaaattattatattaaactatatgagacccgatacttaattgcaccaatagcgatattaacacgtaagagggtgttaggcaccagtggtgccctttagcgtttctctatatataactaataaaaaaacatttttgactaatttagggttcccatgagtactaaacattatttgtgatttaaaagtaatgttttttttattattattattatttattaaagaagagtacatactgcaacattaattataaatacctagatagattccacttatcatcaatatatatagtttcaaaatatttataaccattaataatagtatacataattaactaaaacaattaataagtgagaagttttgtcttttttaaaaaaaatgtgaaggttttgtttttttcttacaaaaaaaaaaaatgaaggttttttcacatgatgagataattatagtatataaagaatgtttattatagatttagggtggttttcaataatgtaaccccataatacagaactgatgtatattatctacacattataaaaaaaaaaaaaaaaaaattaagtctaatttttttacaattttatacgttaaaattatttaaaatatcttacataatttaaataaataaaacatcctataaatttttgagaaattaaaaataatttataattaatataaatttcatgttgaaataatttatttcatatataaaataaaaaaattacacatatataaataaaatactatttaaatcttatttttaaccaattaaattttttgaatttctcgaacttttagcgagcgtctaaaataaatacaaacgtacggtaataaacaaaggcatgtttactaataagtaatgggaatcaatagtaaggtaatcattcccttacatttgtttacttgcattattaaaattaggaaagggagaagttgattaa

SEQ ID NO: 326124 - DNA, 2030 bp, Cannabis indica
ctattgaccgaagatttggccaattaacaacggagtcgtatttaatgttgatgattgtcacgtgttacacaacaagaacaataaagtaaatgaacacatgattttatagaggttcggcccccttagttagcgggtaatgacttactctccttttaattttattgataccgagagataatactactcagattactgtagatgggatctgaagtagctctctaaagattacaatgtaagaatcaaagttgacaaatctcaagtatgagaagagcagtagtaggtgtgtgagagaaatatgtgttatcagacttagagctaggtttttgaacttagggttttagggtttgattatggccctttatataggatagcttaaaccctttaaatctctcaaaaacagataaaaaaataataagctaatatttacacattaaattagtaaaatatgaatgactataatgccccttaaaaatagatatttttcctcctttttcatggtttgctaatgcccaattaacaatctggcttgttgtccacgtgtgaagctgtgcaccaaaatcctatcaggccaatgtctggcccaccaagcacctgtagcatgcatgctcgatggccctatgatgtctagaacctggcctacctatgctggccatagggttggctaggggtggccggctagcctccttgaggtggctggtttgtcatttgtcgtcctgcttgagtgctcagacttctcgttagttgaagtgttgagtagatgacttgtataggactgttccttaagtggccatgaagatggctttaggtttctccatcaggagggtgaagcgggtaaagttctcctccttgttcttctggttttgtggcgtgggagaagtgttatacttccccttttttccactctttcttccagagttgctataattatgcttgctcctattgttcttgccactggaggtttggacagatttgctagtgcctgcatgtgcacttggtagattgtagggttgcaggatgccctgagactacctatttctaacttgccctatctgagcttgtcagatagcttcttctatcttgacaaagctccttcatgttgttagttgagatccttcggatatctttctagaagtcactcagtggaaggatgcccctcagtatagccgtatatcagccgtcttctgtaaagcctttgaccttggtggtctcggccatgaaccttcaaatataatcatttaaaggttctccttgtcattgtttgactttgacaaggtcttctagctgggatggtataagccttgaggataagaactatgtgtagaaatcttgggaaaactcattccaggaattgaaccttcttagggccagcttaaagtaccattgttgagctgtttctgacaaagttgccaagaatatgtgacaccgcacatcactagtgatcttttggagattgagttggattttgaagtacttgatgtgtgccaatgggtcttgtcgctcggtatactctatcgtaccagcatcttgaacttgggaaagggtaaggcatttatgtatgccgagaatggtgatcctcttaacctatcaagttcaaggtctgaaggttttggaccagctaggcccttgatcatgtcccttatttggtcaaattgtgcttgcacaaaaggatctgtgtctatagggacttggctgactggccctccttggatgggctatagactcaaatgtgctaagatccggccggccatgctctaggagagtgtatggttgatgctagctagccatgtgcttggttactagccctagtcggccactaccagatagggagattggtcttggccgaccaagcctatgttgggtaactgctcatgggcaaccagccctgtgctaagtagggtctagttccctgtgatcccccggttggctggtgcagccagtgtgttgataggaggtaaattgcaccagttgctggagttaggtggatctagataccagaagtgattagtctcacttctcaaattgttgttttg

SEQ ID NO: 326125 - DNA, 2276 bp, Cannabis indica
accagagatgtactttcagataggttattgtcagtcttggttattcgtctgggaataagcgcttgtacaaatccaaaagaattgtgagtattatagttcctggatggtttgtactaaaagtgcaacctttcaagctgacgaggattattgttgctggggatgagctggatgttaacctgggccctgggcccaggacaacctacagtaaaatggccataagtcaatcaatattgatctgatttatgcaatttaactttcattttaaagctatttaatttttctatcaagtcatgtctcactcctcaatcataattttgaagctattgactccaaattttaccccaaagggagttacgaatttaagctgtaaattacctagagtgggtcccgctggcgcgactcgaactctaaaaattgatcatcaactttagaagttaagtttgattgttagatcatcatctacaatcaaaaatagcctaagtatattttttcatatttttttggattattttattcccatttaatagggcctccttcacctataaaaggatagctacactagcacatttttaagttaaaaaatgtagccataaggtcagagcctttctctctataaattagagcatctagactcagacatttttctataattcattttgtgagaaataaaactcgaagtagacgcagctccattactgtcacaatgcagagaatgaattactataaattgatgtgtttctctacgtatacttgactcataattcattctcgtcaatctaacaggcgggtgtgacccagatatctgtgtctaaatttttgagtcaacatgtctaaatcgagtagagacatctggtctatttagtttctcagcgtgttcatgaatttctcattgttttcctcaagttttgttttaaggatttcaagatttttttgtagggtaaagtgggaaaaaagtgaatttcatgatctaaaaattctagattttcaggttcggagtcagacaaaaacatttccttttgaaaaatgagaatgtgtcgaaaaaactccaaaaaatttgaaaaaagctgagttataaaaatcttaaaaatccctaaaaacctaaattaagtcaaaccaaattaaaaaacctagcaaaatcatagattcaggaaagaagtatatcatataagtctaagtcaagggaagaagaaaacatactgtgattagagattaatgatgaactagatgaggttttcttttgagctcgacgaatctaagggtcaggaatatagcgtttcctgggtttttgagaaaatagttgcaaaattttcaaagaaatagcaaagagggcatacacagataattggaaggaggaagggggatttcggtctctacacttcctctttttagttgattatggcaaaactgactttaaaagatttaaatacaaatataatatctaccttataagcaccgtacgatcaaataaaattaaattaaggtgattaactcaagattcagttgaaaagacaagcatttattgttaaagcttataatcaaatgcttccatcacaagaagcacaagagatacaagttgaaaaagattgcatataaggattgacaaaaattatccaaaatctcatttggggtaaatccttacgagaagaatgttcaacagaccactctaaatacgagaagcatcccggtgggtatatgtcaattcatgtgattcacaaggaagaaaagacgataaataacagaagataagatcaaatgtggaggttatttaatcttattcatattaaaaatgtttaacataactatttccacatgtaaaaataacatgaaacgcgagaaacgttcatgtttcatgaactatcatttaggtaagatcataaagaataactgtcataggaaactcttataaatagtggaaaaaaccatcgtaaaggagatgattagttctctcctgagagaatttatgctaagttgtattttgtaatcagaaaattgaaaagtaagagcgactcgtggagtatgtagattttaactacaaaattacataaaaatttgttgctttcatagatattatttatttcctaatcataattattttagatcattatctattaagagcctcatttaggtcaacaaaattttgagttaacacaagtaaacaaagtactatagatattatagtaaatattatattacaccccacaaaatgaaaagtacactacaatatttaaaaaaaattaaacttaaactaatttttaaaaataactcttaatattttt

SEQ ID NO: 326126 - DNA, 632 bp, Cannabis indica
aacaagaaaagagccatcgatattatcgagaaacaaaaaattgtaatataaaattggccttaatttgaaaaaaagaaaaacacatcgaaaaattggttttatttattttaaattttattcaaagaaggaagtagtttactttagtttttatttttttgctgaacgaagggagtagtttacccaataaaaaaaaaaaaaaaaaaggaatagttaaatttgttagtaaagtcaacttgttagctttcacatttgtctcaatattgtttatttattttatttcattgtaattaggttgtctcaatattatttgttttcaaaagtttgaaactttgcaagaccaattaaaacataggaaaaaattaagaaaatcatttaggaaaaaagtaaaaataaaatcaataaaatatatcttagttcatttttcaagttcagaaaagaaaacaaatcgatgcataaacaatgatggcataattacatttttttttaaaaaaatgatggcataattacattaataatttaaattaatgcaaaattctaattttatacatatcatatttgcaggcatagatcttatcaatgttaataaaataaatatgatatgaagttaagcaaaaaataataaataaataaat

SEQ ID NO: 326127 - DNA, 763 bp, Cannabis indica
acaagtcagttgttttgtttgtttggtttctgttcttagctttttctgttattatcatttattatatatgatgtttctactacttgttttctttctttatatggttcgttgagttcgtgtaattactacttaccattatagtttgtctaagcttaatatatcatctgatgtacttttgaggatgaaatggaactggcaagcatttacccatcttaccactcttgttattcaaggtaatgaagaagatatgagttcatttccggagaaagggcttctgcctaccactattacctctcttagtatctctgaattttcttttatttttatttaatttcttttctaatgaatgtgttctgttgtgttttgtttttttacatctctatgtttttgctgtttttcttctgcatattataatttagacctttgcttgcagtgcccattttttcaactaaaatttcttggttacaaatttcaatggtaagttgaaaccttctgccaaatcatgttttatgcagggaggtcttttaggaaggcatgaaagaggtagcttccacaacatgaaacaaacaatattcgtgttagattgcaatttggttgttttagtattcgtgtcgtgtaatattttgatgtttgagatgttttttttatcgtcgtgtaaccacggttttcctcggctataagtgagggctatgaataaatttgggaggagatcactcatggacatgtgaccttcatctcttcctattgtctgcaacaaaagcta

SEQ ID NO: 326128 - DNA, 1361 bp, Cannabis indica
aacataattcttgcacttgagtcccatttttaaaaagaaaaaatgctcctctggggtcaaaatttccgggtcatgggttgtctcagatgactcactaggttcaatctttttaagagcttcaacatatcttgcctccttcttttgagcctgggatacaacaagaaagaaagaaagataaactatactataactataagctaaagtagcaaaaatgaaacttaatcatctaaacactaaaaagcttagatgacctttctcaatttgtagagtattttttcttctggtgtcattctctcataatctttcttcttcttccacctaaagaactttagccacctcacaactgctcttttccctttgagcttcatcctcttcatcttaatactaccaaccccatcatcaacagcagcattaatttcagtgcaatttgttggctccacaaccttgtcaaccatgcgtaggcatgaagctgagtgaaaccattgttgcccatctaagagaaaccttctattactaccatggaggtatccaaaagcaggctcctgaacaataaccttgcatagaaaaccatccaaactattcttccgtgagtaagacacaaatatctattgttgcaatgaaaatctctaattacatgaaattgaattctataacttcaaatacattaaaaaaaaagtataagaggagttcaagcttttctacagtaaagtaccatcattttatttcttcaacaattattcagtttccatcaagaaatttgaaaactttaatggtgaaaaataaagctccatctcaattcatgatgaaccgcacacacacacacacatatatataaatatatttgaatggtaagatacagataagagaaactgcagtattattgtactaaattaagctagagaagaaagaggtacctgattctgtaaaagatgggtttgcacaaaagaatcttaaactgtttgtgggatctccgtagtgagagtgaagccaaggccctcatcgccatagctccaatcaaaacccttaaaattggaaattttggtatgaactaagactctatctgatctgccatggctactgaatatgggcctgggccagtggaaatgggccagaagcttgggtgccctttgattaatgtgaggaaattacactatactctttttatattgttttttttttaagatttatcattttcatttttttttaacattatatcaattttatccatctcactttaaaatactttctatgggactctctcaaagtatttaggtacaataagtataaaaagagatatgtttcaattaaaatataaaaattagaaaataaatttaattaattaattaataaaattagtattt

SEQ ID NO: 326129 - DNA, 1429 bp, Cannabis indica
aatttcttcatcaagaaactgatttctctgtcaagaagctggttttttaatcaagaaactagtttcttaatcaagataaatccaattttgaccttataaaaagataatatgacaaacttataataaaaaaaaaaaaacaaaacacaataaaaaaaaatgaagtaacccaattacagtaaagcagaggtgctggaaaaaatacaaaaatcaaactaatatctagccacacaagatttttttctctctcctgctattcaattgcttagtttctcatgccatcaaaatcaatcaccaaagatctttcaccaagaaactaatttttttcatcaagaaattggtttcttcatcagtaaattggtttcttcatcaaaaaattgattttaattatattaaagtaaaatttataataataataaaaaagacaaaacacaataaaaaaatgaagcaaacccattgcagtaaaactgacgtactcgaaaattacttaaaattaccttataaaactgcttaaaaataaataaaaacatttaatatgagctttgaaaatttaatatatatatatatatatatatggtatatcaaatactataaaaataacttaaaaaaaatatcatataaagtaaaaaaaaaatattatatttaaataaataacttttaaaatcccaccacattgagtataaattcctcttaaagggaaacttgacccaacttaaatctttatacaccaatacataagtaaaatagaaattaaaaattaaaaaatatagtaaaagtacctattgtatagtcttttaaaaatgtacaataaacaaatataaaataataataaaaaagattatatatttaaaggtttttccgtatgctgaaaaagaaaagtttttggtaaagtttctattgcaataacaatattaattgataattattaggaacacaaacttaatctttggttatcattcctccaagtctctctcatttgtataataactaaataattaatgtttataattaacttggtacttcattggtggcagtagcaaattctcatatagcatgtcccatctcaattatacatattttgaaatgagcaagagaatgattgattgacttattcgattcagcgatgtgaaatatttatttttaactgtccacagtgaaagtccacctacttaatatttttttatttattttttgaataaaacccgcttacttaatttacaaaataaaactaaataaatgagttaattctcattattggagtttgtaaatattaaatccccaatcatcaataatcagagcaaaaattaccaattaagcgacattatccgtaactaggggtgggcattatccaatccaatccaattgaaccgaaccgatctaatccaatccaattacaaaaagttggattacaattggattggattggatgcta

SEQ ID NO: 326130 - DNA, 932 bp, Cannabis indica
ccagcccaggagaggaaaaagttgacacgcaaagaatcccgcctgggcacactacctgaatgaacaaaggcttaatggtcacccagacacatgtgatcccatgtggaatctaaagggtctaggggcagcttaattcgtcttccggacagatgttctagtgaaacccttctcacagaatcccaccgaatccaaaaaaatgtttcctttgtcttgtttgaggaaagagcttagacaaaatgtaggatcaccatagggattgaaatgatcactattctaacacaacagtttccccatataaaatggggaccatgcgcatcctgactcgtaggtgttaggttgtatggttccatgagctggataaaattaaattgaagtatgttattgaactgaaattctggattgttatgcataaataaaaaatttcatattcatattattgagtctacttgaaagttactcatgttctggagattgacttgtttaacttttatttttttcattttaatgttttactcgacgacgagtaaatgtttagtttgggggaatttgttaagttatttttagtattaattttaggtcaatttttagtgtgtgtttaatttagttctactgttgtttggagcaattttatatttttttatctttcattttcgcaaatttaaaatagaagaagatttgaaataaggagttttggtttttaaataagcgggccgcagcccgtgtgctcctttgcccacgtgtgagatgcttaatatctttttcttctagtcaggattccgattttccacattgatatttttctgcgatcatctttttctgttgatatttttcaaatctatatatataaaggagaagtatgaggtagtgacgtgacagtttaaaatctctccaaaactatttttcttttttctccttaattctctcgatttttt

SEQ ID NO: 326131 - DNA, 1058 bp, Cannabis indica
gaaataaggtttatcttctagtagaaaaagatcattgagctttcatatgacaaaaaaagcttaaaataattatacataattgtcattagtgcatatatttcatacagtagattaacaaaagctctactccctttctctttaaaaaaaattaaattaacacaagctctactgtaaataataattattgacagcagaccatcaggcaattgtaaataataattattgtaaacataaaagcaaaactgggcctaccgatgataaaaatcacaatctcgatcttctcttgacatggcatgcagaaggttgtacatttgtagcatcattttcctcggcaactatcataaacatattgtcaggtaaggtgaaagcacatcctgaaataatttcaacagcatgcacatacattctatatataatattaaaggggagagagagagtaaacaaaattttaatttcagttaccttctctgagaaaagattaacacgaacgaatgaacaaaagagatccataaacgcgtgcagtataagtgcattttgatggggctgcaaaatactgtgccaagttattagaggtatcatgtataatctacaattagttaattttcccaataattcacaaccaaaaacaaggcaatgatttatcattccttctaatattcgtattgcatatgtccattaacctatctttatggaacacaataatcaaaaggccccggaaaggcaacatatagatattgatttccatctacaaattaaatctaaatgaacaaattaataagtttttttttttttggaagcagagaaacaattttattcaaccacaaccaccaaactacaaagcaagctgccaagaacagcagacactaaaatgttaattaaagacaaaacatcagcttctcttttgctgagatgagaaaataaacaacccttaactctagccttgacaatcaacttgatctggttacttagcactttagcaaagctacaaacaaactcaaagatacatctatttctattacacaaaatagcaatatatagtagcagcaactaaagtagtt

SEQ ID NO: 326132 - DNA, 1314 bp, Cannabis indica
tgcttacaatgtctatagttggtaagaacacatattacatatttagaatacatagattgtgggatttggacagcttgccatatctttgagatacaatcacagacttatagggattgcttttgtgcttcatgatgcaagtcttagaattgcttagtgttgatacgctgttcaaattatttacgcccaccctgctcggccggaaagacattgtccgtgcaggtgtaggctgagctttgttctgaacattccttcagtcagatgtaagaaataaggtccacgtgtcatcagcatgtgatgccacgtcatagtgcgaaaaataggataacatctaataagataatataatataatatcttaattaaaaaaaatgaatatctctaatgttatatttctaatcttataatttaataaattaaatataacaaaataaacaaaattaaaaataagatattttgatggttaggatattatcaattttatttaataattaaataaaacaaaatatcctaagtttgaaaattttatggttaccaaaccctaaaatttctattcaaaccaaaattaacaaacttttcaaaatttcatgttattttgccaaaataaaattttaattaaaataaatatctaataagataaaatgttaaaactaacatttttctaatcttataatttaatttaataaaatatatttcaaaaataacaaattttaaaaatctgatatggttagcaaatttgaaactttaactagattatttctaaattttattaatattttaatatcaaaataagatcatttcaaatttaataataaaataagtaatatctgatcttataattaaaataaataaaattaatcaaaaatttcaaaattaaccataaggctagtttgtggaaaaatcaaaattttaaattcaaaggctactaatatctaaaactaatttttaattaattaaaaaattaataaaaattaattttattctgattattagatttttatttaaaaatttagattttacccaaaattatactaaaatttgaattttatttcaatgaaaaatgatttttgaaagtcaaaatatcacaaaaacaagatttgggcaaaggggtatgcaaagtgggcatctggccgagccacgaggctgcgtgcagcctccatgggcgagaatcctcggtcaggtgggggggatgcctcatacacacccacgtctaaaggggttttgtccgagagaaccgcacgtgacacggtcgtgtcccctccatgcgcgcgcataggctagaaaccctagcctagatatttttccaacttcaaaaaat

SEQ ID NO: 326133 - DNA, 576 bp, Cannabis indica
cttgtactcacaattttcaactccaagctattggaggagaagtaagtatataaatatatatatataaaaatgttttcaactcatttgtatttagttttaaaattaaataaaaaaaaaaaaaaaaaaaaaaaaaccaatcacgtgtgactaaaaaacatatatatatttttgaaagtaattaataacaaaagatatattacagaatttgaaccacatgtagaggatttccttttttggtgagagctttaattttacttttattgtttttaatatatatagaaaaattataattattttttttttatatatataaatggtgtgtattaatgtatagttgttctgtttttgaaattttttgaataatttaaagtggtgaaaatatgattcaaaatttctacaatagatataacaatattatatatatttatatataaaaaaatagaatatgatttttgtatgaaaatagaaaatacctctacaatagaaacaaaagtgacgtttctacctaaaaagctccatatatatatatattagaataattagcctttttagtccctgtacttatgatactatact

SEQ ID NO: 326134 - DNA, 1352 bp, Cannabis indica
cttcatacattttaccacacacaacatatttcactttcccaaccacacacttctaaattctactatcgtatcagagtcaaataaactttaacgagaatctgatctaaatttagtaacctgtctgaaaagataagccaaaagagttactagtaatttggaaatagtgagccaaaaagagtcgttgtgagctaaaagtaccgacaatccaaaaatacgagttaaaagagctgcttctaattcaataagccaaaagctccatttatgattgagttatcgaaaataagtgagcaaaaaatagacactatcttgaaaggatgttaaagaatgtcacattggtaatgtatgaaaagataataccttatataaagtacatgggctacttctgttattgctaattaattttaatatggaacctcatacatcttaccatataaatatcctattctactttctcaacaatatacccttcttaattttgatatctttctattgtgaatatctgaatatgttagatgttgatcttctctctaatgttgtactaaggatgtgttattagtgtagagtttgagaatgtgaaagagaaatgacactttcttttattgattcaagaaaagaactacaacagtttatatacaagctgagccaactataatgcacaactaatagacttagagttactaaaaaataaccaccagctaactaaactgatccgttaacaaaaatagttaggaggcacatctcagcttggtagctatatactaataggcccctaaacttattgtggtggagcaaaccataccaaaaaagaaaatttagagttgaagataggctttgtgagtgagtcggcaagtttatgatcagaaggaacatggtggataagaatctttttgcataaaactttatcccatacaaagtagagatcaatctctgtgttttgttcatgcatgaagaacaaaattggcaatgaggagtgtggtgttaatttttacggtccatatcagagttgaaagcgaaaacagtggttttatataaaaatatgttattacataaattaaatctaaattacgagaaaaagaattttacctttggattcctattagggtatcctcgattctttttgtatatattcccgatcatctaatccaaaagcaatatgaacttgatgaagacttcacaccaaggtcttccaaactagcctcaaaacttaagattacagtgggtctatatgattgattgaatggatgaattttttgttgcaatgtgtactcaactcattagatactataacctgagatgcaggaaaacaccaatcctctagagagagtgtgtgtggtgagagagagagagagaga

SEQ ID NO: 326135 - DNA, 616 bp, Cannabis indica
gttttacggttgttttgccatgatttatttatttgacatcaattacactgttcgtgctccatcttgccagaattaatggttgtttttcaagtattctcgagttgatgtggtggttccatacatgtgtgtagaagataaatgctataaatatatttatacttccttctatatgactatttttgtgtttttttattctaattctcttataaatacatttgacaaactcattgttaattttttttttgaatggtatgcttcttttaaatttttttagtggttacatctgtttcaacgttgttttacatttgtttttgtataattttagtagttttttattctaattttttaggactggactggtaaatatagcttctattatatctagtattgaggttgtacagaagatggttagcttttttttaatcatttttttcttttgtttttttaatttgttttagtgttgtttcacagttgttttgtcatgattatttatttgatgtcgatttctctatttttggttccatcttgctagaattaatggttgttctcaagtgttctcgtattgttggggtagagttctgtatgtgggtatagaagatagaggcttggtatgtga

SEQ ID NO: 326136 - DNA, 586 bp, Cannabis indica
actttttaagggcaattgttctctctctctctctctctctgccgtaaccccaatctccattgacgccaaccgtaccacctcattctaccccaatcgcaactctctctctctctgtctgccccaaaacccaaccccaatccccattgacgccgaccgcaccactctctctctctcctccgttctcgattttcctctgttgctccgccgggctgcaagctcctcctaaaaggtggtaagaagatttttatatatataaacacagaggagactatgttgaagctcctctattaaagtttcaattttaattatcttcacaaattcagatgtgggttttggtatttattcctttttcgcaaatgggtttagagaattttcttttagtgttatgtgtaaagaaagcttctcttgactttgagctggtgtttttgctcaatttcttatatggtttgttgggtttgtcttaattttctctcacattctttcttttgactctcttatatcacaattttttttgtgacattgttaaatgatatatattctagatagttatttctatactagttattatttctaatattaaatagga

SEQ ID NO: 326137 - DNA, 713 bp, Cannabis indica
taatctacacaaaagaggtcactttggcgacatattgtttcaattaatttattcaaaatattagtcataaccaacaccaaagtttgaattaaattgtttgaaccaaaatttataatataaataaataaatacataaataaataaataaactggatgtataattttgagagacaaacaaatgtaattgtgtatctcacaattaaacattgtatgtaatgataccaaaaaaactgaagccacacaaaatatatgtatatatcttaaattaaccgtaagaaaaaaaaaatgcaactggaaaaagtgaatatcaatatacttatatgtacacactgagatcaatgcataactctggcaattattcaatatatatgatatgtatatgcagccgaagagggctgaagccaataaacccacgaaaacatagaaaaatcacatatacgtgaattcataaatatattcatatatttattcggctggacctttatacatttaagatctatgaattcatatatgtgattagagaaaaactcagctgccgtacatgatgcatgctttttttcaaaataaattgcttttataaacaacatatacaaacatcatacataaacatatatgccattgatctgaacgcatataaagacaaaacgcatatatcaatatattcattgaaactaaaatccaaaatattgcagcacaatattattcaaagaaaa

SEQ ID NO: 326138 - DNA, 2257 bp, Cannabis indica
ccaaatcacctataggattacatatgagtattctactgctcacttaatttattttcttatcataagaagttttccctcgctttttgggccaccattctatgcgcccacttggtgtctgaacccaccaattttctccaagcttcaaaaatgcctcaatggctgaaagctatggacaagtgttgaggcacttcttgccaataaaacatggattgttttatctctccccctggccaccactttattggttgcaaatgggtttataaaatcaaatacaaagccaatggtgaggttgagcgattcaaagcttgcttagtagccaaaggctacaatcaacaacaaggcatcgactacctcgaaacctttgccccagttgcaaagttcaataccttaaaagtcattctttcccttgttgccatttagaattggcaactatatcaaatggacatcaacaatgccttcttacatggccacttagatgaggaagtctatatgtcttttcctttgtggtacaaacacaaaggggatcttcctcccaatgtcatttcaactaaataaaagtctctatggtcttaaccaagcatcgagacaatggtatgcaaagctaagctaaactttaattaatgatggatatacacaatcaccttctgaccattctttattcattcagtctactaatgatgctttccttgcaatgttgatttatgtggatgacatcatcatagctagcaacaacaccagcgatgccaatacatataaaagataccttgactccaaatttaaactaaaggacctttgtccactacggttcttccttggcttaaaagttggtcagtctactaatggcatatctgtctctcaaagaccctttaccttacaacttctaactaatacaagttacataggtgccaaggccatttccgctccaatggaacccaatattcgtctcagcaaggacaccgaccccctcaaggcagaccccacctcctgtagaagcttaattggtaagctcattcatctcactatcactcaacctgatatctcttttgcagtcaacaggcttagtcaattttttaagcaccccgtcaacctcacctacacgctgaagggcacacctggccaaggtctcttcttctacagcagctctcacctcaactcaaggcctatgctaaaactagccttgttgccaatgatgtccaacttaaggtcttcttcgatgttgattggggcacttgtcctgacactcgaagatccgtcacaggctattgcattttcttgagacagtctctcatctcgtggaaatcaaagaaacaaaacataatctctcgctcctctgttgaagtagagtatcatgccatggccaacactacttgcgagctcatatggcttctagatctcctcaaagattttggtatccaacacatggcacctgcccttatgtactgcgactacaaggctgccatccacttatctaaaaatactatcttccatgaacgcacaaaacacgtcgacattgattgccacattgttcgagaacgagttcaaagtggtcagctcaaacttctccacataaacactaagcacaaccttgccaatctactcaccaagcctcttttctctcccaattcaaggagttactctccaagatgaaagttacaaatacgtatcttctatcttgagggggcatattagaaccaattgatctgtttggctataggattagctatccctgcttggttatatgtttattcaggtataagggttttaccctacgtgtaccatatctatagaataatattgtaagagctgaccataacacacattttcttaatttcttttggtaataaagaacttttctctttctttcttaagaatactttataaattcagtttttattttttttaaaaaatatatatgcataaattttgaaagctaattaggatttttttcccccgaactttaacatgtaccaaagcatgccccccctgaacttttttggccattaaaaattctccctgaactattgagattgttagatttaaggacttttgtgtaatttcattcaattttactatttcattgattgtttatgtactaaatcatgctcctcagactttgatatctaccaaatcatgtccctcaaactttgatatgcactaaatcatgctctctgaactttcatccatgttagaacttttttactgaaattagacaaaagtctttaaatctaacaatctcaatagttcaggggatttttaa

SEQ ID NO: 326139 - DNA, 974 bp, Cannabis indica
tttcatttattccgttacatttctccattaatttattccgattctgattactgtatagtaaacgtgccatcatttaatctttcttatcttccaccttaagccatggtccaaaaccatgtgtgggatcaccagtctcagctgcaacccttcggattggttccatacagaccctcatctcatgaccaatacaaccacaattaaaacacatgaaaggcaaacgatcgtacctgaagggaagccagattgaatttccttcatgcggaaagaggaaccccgggcagatgggtttgtccagatcacaccacaccttgaaggtaaagaatccctttgtggagattttggcaacatcggcttgttgtacttcaattacttcacccgctaaaccagcaagacgagctaaattcctttgagtaatcgacctaggcggcacagataggattcgacctctcaactgaatcctagaaagagtcttctcccaatttgtaggaatctccgtcattcgatccaagattagagtaccatgattcaagaaccaagggctctttaagagaatgcgattcaaatcctgagtcgatttgaaggaaaacaccaagaaagtaaaattcttcgtggaaagtttgatttcgactccccagcttctctctgataatccccacatacgccccagaatggttttgtagcaaagatcgattcattgtttgattagagcagagtctccccatagcgcagaacttccccaattctgatcccccatcttcattaatttcccatccatcatcgtcgataacagtaagcttgtccgttttcgcgaacaactcatccatggaattcacaggcttttgcagctgaccttccggcaggctcttctcgggagagagcataatgtcaatgtgatctaaaatagttttattattattattattattttgtaataataattgttgtaaacctgggggaaagagtggaaatagtga

SEQ ID NO: 326140 - DNA, 1808 bp, Cannabis indica
acttatttttttaagagacgatctttattccatgtataactactatctttttaataaaaatttcctagttaaaaaatagtgtctcatctcatactaatattaagcaaatctaattgtgacaaagtcaattaacttaatttatatttaaaacatgctaactacttttgttgactctttttacttaaaaaatttattgacgtatcaaaacttagaattgtttaacacattatgaaatactacttttccggggatcttgattaattttctgttttgtagggacaaaataaaattatacatatttacttttaaaaaaaataaaatttgcggcacaaatacgtaaattcaaaatattgcggcaaaagtgtcaaaatttttcaaaataaatggtttgattaataactaaattaacatatcttttagttgctttaaaagtgtcacatatcaaacaacaatttgttcacattataatttttcaaaataataaaattaaaaaaaatatatgttttaaatttaataaacattaaaccactacaagaaaggagattttttattccacttttaaagtttaataaaaacaaaaaatagaataaaaattatattcatacattttataccacttttagatttggttttgaaatatacagttaaactttttcagacaagaccctttttagtagaacattaaaaaaatatcaaaggtcaaaaataagttcaagactcaatttttagggataaattacggtaatactctccaaaaacttagacttcatgcagattagttttccaacctcaaaaattggcagtaataatccctaaggtcaagctttttgtaagtccgttggtccctctttctaacttgtagaaacccaaataaaataccacgtatgtcaaattttcattactccaaataataattttaattaaaaatttaaaataatataaaaaaaataataaaaaatatatattttaaaatcattaaaataacttttttttttcttttcttttttcctttgtcttctacctctcgccactccccgacccccacctaagatttctctttcagccgcaccccattcttacccatccgtagattttcctatatgtaataaatccaaatatatgttagtgtagaaaaaaatatagtaaagagtaaaaatagtctaaagtaattgaatcaccaataaatatatcatttttccatttagtaccttcaaaaaatctctcccatcaaaacctctaacaataacacaaataaactaaacacaaatagttaacatctcacaaaccccaaaaaattataatagaaagaaaaactaagaaaaaatcaaaatggaaaattaagctcccattcctaataaatccaaacctagatcttaactcacacatcaaaaacaaaataaaactatacccgaattgaaatctttgtcttcatcttcttcttctccatctagttctcttttcaaaaccttcaatcccattaggagagagacgaaagagtatttgggcttcaatggtctcgatctaatcaccgtcggggaccaatttgtgaagatgctctataaacgttgttggtgagggtcgattggcttatcgtggatgggattgaggatgatgacgggaagtcataagctcaaagcgtggtctgggttttttatgaaagaattgtctgtgtgtaatgaccgctttagtagtttggattagaaaaggcaattagcactaatttctgatatttttataatcatttatgaatttaattatttgtgggccccattattagaaatgggcattagagttataattcctcaatt

SEQ ID NO: 326141 - DNA, 893 bp, Cannabis indica
tcctactacgaatacgattctatatcctattttctatttggtttatatattttggctagttttttgtctcttacgttgagtacaatttctttttgaagcatgtgaaacatttcactatgaaaaaggcaaacaataatagtggtctggggctcaccctcttatttctattaggggctacgtgtttgttagttgtgaaacataaaaaagttaatcggccatattgtctaacttaaaccttagtgcaattattttaataaaatatgtgacgttctcaatattaaataactaccttaaaatatcttataacaatattactcatttgttttacatagattttgtaaatcagatgtgatttttaaccaataataatagcatttagataaatcggtttttattatgtaaatagttatattggtcaagtttttaaggatatatacatttaaattatgatattataagatcgaaactattgtctattttatttatatgtacatatataaataataaatccttgtggggatagaatactatatctcattgtgacaacactaatgtagcactggctcattatcgatttatttatgtatctggccaattaaaaaagattgcccagaattttcatatgaggcttttgtatattttcattaatatattagctagttttgttgttgattagcacttttagaagagtttagttaggtaaatgtcacttagcttttgatacccccaatctaaccaacatatgcatacttctccttgttaatttgtgggagcaattgtgtgagagtgatagatcacatcgagtgtgcatgtggttcttgtttgtattagagttagtcccacattgctaatgtgtggaaatgaattgtgatatataagatgaatgggctact

SEQ ID NO: 326142 - DNA, 703 bp, Cannabis indica
ttataaaattgaaaagtaaaaacaattttatagaacatgtttttgaaaaatatttcacttttctacttttaaaaatagaaaactgattaaaaaagtgttaccaaacgccacctaaataaattaataactaaatgagttggcaagagtaagctacagattcactgaggtttaaatagtgaaaattttacatggaatgtatcatctgcgaatgagttgcaagtacagaactcaccaatgcaggtacagaactcatgagtggttttcagcccctttcagctggacgaggactgaggaagaccaagcccctggagaaggtggacgatgattgaggaagaccaagcccctttaggttttctagcgagggttttctggtatgaaaagaggatttcgggttatgtgggtttggagaagacaaagcggctgaaaaataaaaagaaataaaaatgtcctcattaaaactaataccgaggacatgtccacagtacaaaaacttaaccccaaaaaaatcgcaaaattttctcgttggtgcgaaaatactaataacgatgacatgtcttcaatataagtgtccttgttacagacccagttttttgtagtataccctcatatacacacatatgtacacatacatacatctatatacatacatacatacatacatacatatacacctacatatgtatatatacacatacatacatat

SEQ ID NO: 326143 - DNA, 1105 bp, Cannabis indica
agtggttcttggagagatgaaggtgtaatttcttcaggtgatggttttacctcaaaggataatttaccaaactatacaaagaaggcgaatttgatgaataatattgtgattgaccccaacactcttatggatgtccctataacttatgatactggtagtgaatctttgaaaaagattgaaggcccttctaaacggcgaaaggtgatccctaaaagaagcaagattaacaagggtattggtccgaatgatgctaatgtgaggaaaactactacaacagagatggaaggaagtgcaaaggaaatttctatggttgatttgacctttgctatgaatttggaagcggcgaactcagcgagtctgggtcgccgagaacaatgatggccctgttttggaatgtccaagggcttgggaacccttggactttaaacaccttaaaatcccacgtcaaagactatcatcccgggatgattttcttgtccgaaactcgattaaatagcacccgtatggaatttattcgaattcaacttggtgttaagcacaaatttcacatttagaatattaaaaataaatgcaaaacacaatttcacctatgccaaaattatagcataagagtttattaatttaagttcgacccatccaagattataagaataatcatctgttaattacaatccttttatttaaaggaaataccctttgattccaattacaatgacattaaataattaaaataaatttgggaaattttggggtaaatttggaattgcagctgaactcagtccatttaattaaccgagctgcctacataccttctttgtgaaggatcaagccacttgtagttcagaatacggtattttagaatttggatataaggattccggtagatgaccactttcaggaatcctgtgctattttgagaatttggaaaaattcctaggtgtatgaccttttatggaattttgagagttgtgttttataccattttgcggtatcggggactgcacttagtcttagcaactaagttgcctacgtatccttttataggaatcaagtcaaacgtagttccgaatttttaattttttatgaggtgaatgacctctctttt

SEQ ID NO: 326144 - DNA, 1435 bp, Cannabis indica
ctagaggtagcccgatctttacttttttcatcccatgttctaaaaagatgatggggtgaagcagttctcacatctacctatctcataaatagaatgccatcacaggtattaaaattcaaaactcagctgcaaatcttcctagaagcatatcctcactcacatcttgtgtctcaaattccatttagtgtctttggttctgttgcatttgtccatgttcactcctcacatcgcagcaaacttgatgctctagccactaaatgtattcttcttggctactcatctaataaaaaaggctacaaatgttactctccaatttcatgttcaacttcatcaatgtcactttctttgaagaagagtcttattatcccaaatttgcagtttaggggaagaatcatagtcaagaactacaaaattgggactttgtttcactcattgatactcattcttcttcttcttctgacaacaccattgcttcaaaaactcctcattcatctgttactcatactccaaactattcagtcaaatcacatgaaccaagaaattctcatccaatcccttccttaagtcttgtccctatcaacgaggaccaacccaaccattcagccaattcacatgagccaaaaactcctccaatcttttcaaatcctgcctgtccacaacccaaacacagaaattcgggtttactcaaggagaaagaagaatctagcaaacaatgaacaagctaccactcaaactcagctaagtcaagcatacaatctgattccattcattctagaacaggaagatgctcgagttgaacctatcgtggaagaaaatgtgcttaacgatctaagcattcccattgctcttaggaaaaggattcgctcttgcactcaaacatcccattcacaactatttgagttactcaagcttatctcctacctatagagcttttatcaccgctctggaccaagttcagattcccatttcggtccaggaagctttacagaatcccaattggaatgttgccacaatggaggaactaagagcactcgaaaagaataaaacatggatcatcacagatctacctaacggcaaacgcacagttgttgtaaatagatcttcttagttaagtataaggctgatgggagcattgaaagatccaaagtccgattagaggctaaagggtccacccaatcatatggcaatgattaccaagagacatttgctactgttgttaagttaaacaccatccgagttctcttatctattgcagtaaacaatgaatggcctttatactaccttgatgtaaaggatgcttttctcaatggcaactttgtagaagaagtatacatgaacattcctccaagatttgaagaccgattctcaaggaaaagtgtgcaaactaaaaaaaactctctacggcctcaagcaatcccctcgagcctggtttgac

SEQ ID NO: 326145 - DNA, 1581 bp, Cannabis indica
aaaattattgtgtactgtgttaactaagtttacactgctattttttagttgttctattgttatttttaattattctattttgttattttataaaaaaataatattattataaaaaaaatttgtatggcaataaaatttggtatttttataaaagttccatattctaatcacccatgtattattcataggatcacaaccgaagggagttggaataatttttgttctcatcagctattaaaaaaaattaataaaaaggtgcaagttacaactgaaccacccctagattacttgtaatctatataaatatattattcaggaaaatatatatgagtatatatttatttatttctgtcaccaaaattaaatttctttaaaagaaaaataacaaaacaagaaggtaaaatacgagagagaacagacaaaaaggtataggtcacagactcacaggtagatttttctattttgcattgttgaaagggggcacatttgggtaggctcctccacggcccactctcagacgctccaaccctctaatttagcccactcaatttccaatagtccccttttaagacaaaaatgtaataatgcattacttttgaattttgaaatttcaaatacaatttaccttatcacattatcctataccaatttctctatatactataaattttcatccaaaatataaaaaaatcttaacaaaacgattaaacacatgaataatagatctcaaataaattgtatgtaaaaaatattacaaaaaaacatgatgaagattagatttataatagtttaccctctttcgacgaagataatagactgattcaattagtactattattgatgttaatgctaaaacatagttctctaaagttatgttatctatgaattaattctacttctaaatgagtttttttgttcttgttacaaataatgaactatttataagtataaattttttaactcaaaaagatatttacaaacaaaataaacatttaaataatactcacaactagaggtaaaaaaattaaacttaaatttaaactactcctaaaataaattagatagttagattacttaacttcttatgcgacatctaaaatcttctaggagctttcttcatcttgtggaattttgacaatatgtcatagtcacatctgagcctcatagctaaagattgctccatgaaccacttgatttcatattttgtatgtaagaaatttagctctaatacataggaattaacctctataattctagtttcaagatcacacttaaacaaataaaagttagatcaaaacaaatcaagaattaaatcagttaacacatatcaaactagaaatataaacacgataaatctagatagcttctagatacaacacacgagaattatactggttccgatcctaagttcaatatgaacttggtcatactccaatttgaaagcagtgtcaccaatctttattgataatgagaattagagatatcaatcgttggagctacaagaaaataatcacagtaagtcatccatagtgtaatctctcaacattcattaactcattaacctgagccaacataatcaac

SEQ ID NO: 326146 - DNA, 857 bp, Cannabis indica
ccagtgtagaccttaggcttgaatattccagccttcgatctggtataccatcggatgagatgagattttgggagcagcaacctgatctgaaacttcagtaggaatgtcaccttacaactatgaactatttgatttacttctgaccaaagtatgactgcctgaactgtgctgaaaactagcagtagtcatgtcaacagaaccagaagaatctaaagatatatcagtttgtgatacctggttttgatcatgagaacctgattgtattgcagtagcttcttcaggaacttgagatgttgttgctcaatcctcaggttgttgtgagtttgatgaaaagaaaggtttctgtgactgaaataaggctgaccagaaagggacacttacatagacttcttgttcagattgatagttgtttagaaaacctgtcttaaatggaaaatcttcctcattgaatattacatttctagaaatatacaatcttcctgtggaagtaagacatttatagcctttatgggaatcactataccctaaatttacacatttaatagagtggaattgaaacttgtgagtttgatagtgtctaatgcaaggatagcaagcaactccaaagaccttgagaaatttataatcaagtttctttttgtaaacaacttcataaggtgactgattttgcacaacaagtgtaggcagtctatttattaagtagacagccatttgaaaagcatcccactagaaggcatttgagcttgtgcaagaagtgtcaaacacatctcaacaatatgcctatgtttcctctctgctcgaccattttgagcagaggtatgggggcaagaatgttgaaagtctattccattttgaat

SEQ ID NO: 326147 - DNA, 958 bp, Cannabis indica
tatatatatatatacactatagctctatcacgagtccaatcaattaaaaagagtcttaattcaaaaactcaaatatcacctgcagagatctattctgctgtttctaagacggtgaatataaatgtttttaaaaattattaactgctaattttttatttaactttattttaatttttttttgtcaaataattaggaaattagacaatagattaatttgacttattttttaacattataatcctacttgtgtttactaataaaaaaaatgtcctaattaaattgtaaattattattttaactaagagtattgctattagtcactagtagtgtctagcactttcttgatatgtcgcattgcgattggtcagctatattctttaaaagttattatattaaattatatgggatccgatacttaattagaccaataacgatattgacatataagaaagtactaggcactactggtgccctttaacatttctctttaactacaaattactattaataaatttacataatttctttaaaaaaataaataaaaactcaaatatcttgtatatatataaaaacaatcactctttttattttaataattatggtctcaacaatatacacaagctgtttttagtttcatatatgtatatatatggtaattaaaggcaacaaaacaacaaataaaataggcagaaagtttggattttcagttctggtaggtagtgtcggtatatatatattaccacttaaaatacttctgtatatggtaatcacgtgatcgagctctatataatgccataaactggaccatttttcaattattttttccttaaaatttcatattcataaaattaactaaaaaccctttttaattaaagaaaaaaaatagccatatccaaccccaaaaatttaatttttcttagtttttttttaaagggattaattttcttttttttttttt

SEQ ID NO: 326148 - DNA, 1216 bp, Cannabis indica
atcacacactttgaaattcaaactcataaccgtcatggatgatatgtaactcatgcacacaccttaactaccatagcattaagaatttctaattaaaatgtgtaacacctttttacacacttaatattggtgataatgtggaggttacaaaatgtaagtaactccacctcttatgttacaatttatgtgaatattagatgtatgtaactcccaaacacattatatacattaatctcatatcaatatataatatgttacattttaatattttaatctatcttatattataacaatataatataacatagtgctcaccatcagatcgacgctcaatgctcctcggtggacgggtgctctcatgtgcctctaaatacatacttaatgactattaactatcctattatgattattgacaaaataaacacatacttaatgattatgaaatatggtatattatgtctatgattatattataagtctacattctaacctcgactgaaaaaaatggcaaataagtattagagagatcaagagaagtaaagcaaagcataaagtagtatctagtctagaaatgaacttaaattaatgattattttatagatctttaaatttgaataaaaaaaatcatagattgcatgaagatattaaagtgaaagagaaataaagaaacacacctagacaaggataatcgtaattgcggaactcttacgtaccagtgtagttgtcttagcttcatgatttgttgagttttaattctaaattcccaccaaatcaaacatctcatattaattgttattaaaacatgaatacatacatattataagttactacaatcacaccacatatattaattatcaaaacatgaatataatatataattaaaaagatgtagtagtactagtaatactatcaaaaaaccctccagctgctgatgatgaggcattattattctctaaaatttgatcatcagctactaattcctcctcttcattattaatttgttgaccaccacctccatcaccaatgcctcctaacttctgaagctcatttttaacttctctcatcgtaggtcgatcatttccgctggcccttaagcattttcgtgcaagctcagcaacacttaagatatcccttttttgcgcagttttcacaacttcactctcaataatctcaaacacgctattctcattctttattcactacaacaatattggat

SEQ ID NO: 326149 - DNA, 919 bp, Cannabis indica
attataacattataatataacatcctaagtatgcatatacaaaaatactgaatttgaacacgttaatgttggttttttgtactaaattaggtacggaacggaagaattagttctgattatcatcatacaatatgccaaagatcaccatatatatattaaactaaagttaaatagatgaaaataatatttacctcttgatgcctatcaggtatccttgattctttttgcaagtgttattctcaaaacggtaatgacaaaactcacaccttgatcttctagacattttgctacacagaaggactagtgtcggctggttggataatagtgtatatgaagttcttgatttattctcaacacatgagcaagaactaattcgtttgtgataaagagaaaaaggtttattgataaaatattttttagactttctagaaaagttacgtgaaaaaattctatatcaaaaacttgtacaaaactttattttacggtatatttaaataaatccaatgaatgttttatttaattaattatttattttcaaatctatttattaaatcatatttaattatttgaatacataatatgactaaattcggttatagatatttacatcttataaccgattgagagaatctctcatccacttgagagaatatctcacctacttttcaaattcaaaaatttatctattgatttaattaattaaaccaaaaggtaaaactaatagagacaccctacatagtactgcgcatgcactgtgtctagacaaagtgcatgtgggacatccttctgtctaaattaagacaagggatgtgccttgtgtcctgatgacttttatcttgtcaaattttgtctttttcctatataattaatttaaaaataaattattttttataaaaataaataattactattttgataa

SEQ ID NO: 326150 - DNA, 879 bp, Cannabis indica
taacaattttaaaagaaggagaattagataatgaaatatatctatcaacttagagctttattattgattagtaatttctctgtgtttactaaattcaaaaagagttttaacaatagttcatggcaatgattgttatatttacaaatcaagtttgtaaatttttaaaaaaatctaaataatttacaatatcaatatcatagttcccgatattttaatttatcatgcgtgttcaaaaattttaaacctcatgaaagttttattatatttttaaaaagacattataaaccaataataaaaatttaacactaaaaaaaaattcaataataatttacaattatttttcactaaacaaagtttctcttacataaactcaaatttcttaagtcaaccactttctaagcaaacaaacacataaataaaaaaagaaaaacaaagattcaagaattattacacaaaacaaactctatacaaaatatactgaaaaataaacttaattctaatgaataaacatacaaaaaaaagtactttaacagttggtgttcactcataaaatttagaaatacaaaaactctttgaatctcttcaccatctatatgtgactcctaattttgtcccagccccagccccaaaagttaaaacacaaaaaaaaaaagaaatgttaacataatgatattaatacatataacacttttaagcagtttgtgttagggtttataaaacacttaagaaatatataaatcacagatccaaacatattcctaaaagtgatttaatatagaaaaccctaaatcataaatctataaagcctttgctaaattaaagaagaagaagatgataaaatatgagcggaagcactaacctgaagccattgttggagat

SEQ ID NO: 326151 - DNA, 799 bp, Cannabis indica
ttagttattatgctattaggaatatatggaatgtgatctctttttgtcttttttttttagataatcatccgatctataattaatatgatgggagagcattatgggtggcatacatatataagcaagaaataagagggaacacattactatcacacatgttgtgtttgtcttctaaagcatttaaagcattagaaaaaagctacgtgaagtggctatggggcaaataaattagacttcttaagcccagctgctacctcatctacccgtagtgaccgacattaatatttcattcaattgatttagctaaaggttaacttatattttcatccccgcgcgcagaaaaaaaaaaattcattacttatatatttggagaatttttattttgatggattttttatatcttggaaaagtgagcaaatatgatttttttttcttttgatcaacaagaaaaaactttcattaatcaaccaacactattacaactaacaacatccacaagccacataaagagattacatacatctcaaattcagcaaaatccttctctcatgatctctcatcttcctattcaataacatgtgatgttactagggcccatttgaaaagcccaattaacttgcactctaagaccattcatgagagagtgagcagttgggaaaaagaaaataacccatcaccacaagcaattgaaaaagacaccaacagcagcaaagatgaaaccagcaagacaaaatgaggaagcagagcaaagaatacaaggaagcacactaggccacgttggctgaaggattacataatg

SEQ ID NO: 326152 - DNA, 687 bp, Cannabis indica
aaaaaaaaaaacaaaaagaaacccataatcacttaactttatttatttatgctataaaaaagtaaactcttaaaattttttcatattttgagtaatttttacttttgtatttggttttaggaaaagagaaatggggtggttaggataaaactgccgttttctcttctaaagaaatttccaatcccaactaatttggacaaaaaaaataaagcaaagcccaccaaaatagaatttggagtaaccaagttttctagaaagaaatatggtacttaattgttatcgttgatcactatcttaaaatatttatgtaaatgtatataaatattttttatatatataacctatataaaagtgagtgctcatttatgccttctaatattaaattacaaaaatatttttgattttcccttaattatcataaaatttttctactatttaattataagagtgctcacatacttttattcaaatattatttttgtatatagaaaacgattttgtgaccatatattaaattattagtcaatttgttgaagaagtattataaaggaagataaataagtttttttttatacattaaatactattttattgtcattaaatccatcaaaaaaaagatatagaaatttttatattttttgtcccgtgaattattactataatagagtagttttgctcttctttttt

SEQ ID NO: 326153 - DNA, 1307 bp, Cannabis indica
ttgtaatattttgtaaaatatttttgggatcccgaaacatgtaatttttgattgtaaagttataattattacaagttttatcttgattctggtttcgtttaaagtttaaattttcctccgcttatcttactagtaatctcgtttaggggattggggtttcttaatcacctcgggtagcgtgtctaattgttagggcgttacactaatagttttaagactttagatgactgtaatatttgtaatttttgatggatatgtttatgatagaacttttgattttctttactttaggtgacaatttgataatatttaaatcaaattctttttagttatggaataagggttataacccaaattaacccaacccaacccataaaagaaaatgagttgggttataaaaaattcaaaatgttaatgagttaaaaatttctagaccaatatcattggattaggtcattaaaatacttttaacctggtaaggccaacccaacccatgctcaaccctacactcaactgttacatttctagtccttcatgtaaatatgtaagactaattcatactaaaaaatacatgtatatatgggtgcactcttaatgggtattacccatgaatgggtaaattttagtttttaagcttcatttttctatctaattagtttaatctcttatttttacattatatgggtcgaggttgttccatcgggtggaacaaaaattaagaaaaaaagtttgtcggcaaaaaaaaggataaaaaataaaagttgagtttgacttatatattttgtatctaaacatatttttgatatagtgtaaaaatagatatttttttttatttttttaaattatgcaactaaactaagcatagatatttaaatttctcttttattattcgtcattggatcaaaatctaataatttaatatttttaaaattaatatttatagttaaatttgtttagtaatgttagtgttattattttgtgacagtgtttgttctgttcaatgtctagtcgtatctggatttttagtctgttatatctgcactaacgtttgtttacgagagtctcatttaagtgttagttagtgccagctggacttattttgtggatatatatatagtcagtttctgttagtaaagtggttatccattaaatcgttcagacagttatttcggttgtttgtgtagagagagtcgtatcttgtttcttgttgttgtgattacaggtcagatcttggagcttgagagtgttcatcaatggcggaatgatctgaatctggaattgttgagttcaaactgaagggatttcag

SEQ ID NO: 326154 - DNA, 1038 bp, Cannabis indica
acaaccaaaaaaagtaaaacctaatcaagcaattaattagcaatcaaaaaatagggcttgttggtctcctcgagacaagagttaaggctcggaacttgggagccttatatgtaaggatgttcaatggatggtatttcactactaatagtgcttggcataaaggtggtaggattattgttagttggaatcttaactcctttattgtcaatattgtaaagtgtactagccaaatgattcacctctttattgagaccatagataaaaaaacaaagttctttgtgacttttgtttatggtttcaatgatgaggatgggagaaaggatttatggagggatttaagggaccttaataatggaaatgcatggatggttcttagtgactttaatgacattcttgccaaggatgaacgaattgggagcagggtcagatttacaagttctactgcatttcgagagtgtgtggaggactgcagctttgaagatgttaagtttgttggcaatttctatacttggtgcaataaatagcagggagatgagagaatatattccaagttagatagggttcttgctaatcttgcttggctgaataatcacccagctgctgaagtgttttttcaaaatgagggactatttgatcattccccagctgtgataactattcatgaggcattaccaggaggaaaaaaaccattttgttattttaggatgcggtcttctcatcctaactatatgaacatggttttagagagatgacaacaagaagagaaaggcacaaagatgttccaagtcataacaaagctgaaaggggtaaaagctattttcaaacagctcaattcatagcattttgctgatctacctactgcaacagatagagcaaagatcaagggagatgaatgtcaaagtgcattgtaccaggatccctttgatgagtctttgcagatacaggaggctgaggcttggggtcagtatgcatctctacaggcaacttgtcttttttgtagtcagaaggctaagcttttgtggctcaaagatggggata

SEQ ID NO: 326155 - DNA, 957 bp, Cannabis indica
ttggaaaaaatttcttttgaagtttcaaagagaaaaatctcagtgaaaactaaaaataagagggaaaatgaagtgtgatcaattcatatcccacgtgtttaaatacgaatcaacctcactgttaggatctcaacatgtgtcattcgaaaaccaaaggtcacttaatccaatggttatctcaaaccatgcctgcacaaacctcgaagggttcgatgacatgtggcatcttacgaaaataaggaaataaatatgattgtcttttaagaccctcgacaagacaaccgaaaatcattgtcatgtgacagaatgactcgcttgtccctcgtggataatttcactatttgacaaacagttgtcatcgcaaaactaggaacatgtgttatagtgaaaatttattacctagacatacaagtacagactcgtaaatagctaacacgcggaccgagttcccgatggaaaaggaggacgtgttaataaaatagctccagtagagctaatctcgcttgatgtaaacttgtgcgaagatgcgaccgacacatggtctagtcgcatactatgccccgcatagtcaaaagaataagcaggactgagaggagttaatgttggttgcccatatactgattatatgcattgaccaagtaggcctctcctgcaactaatgaagattatttctctacatagttttgtcggaatgactaatgtgtttgacgactcatcatggactcacatgttccacgttgtcaacgcataatgtccgacaatgcgatcaaagatgaacgcagacattcagacaattggcccaaagaccatccttcgagtataaacaccgtagagcctactgttgcgattttatatcctaaattaaaccaatttcaatctaatctgatttgttatcaataaaagattagaagtcatttatgtttacatgtttatggtttaatatatacaaaataatgt

SEQ ID NO: 326156 - DNA, 1900 bp, Cannabis indica
ctaaatatcggctaaatttgaaccaatctgataaatatacaagaaatacatataatggataaaaccgatctaatccaacatcaagtgaatgttgaatcgatcggataactgaaattaattagatcggatcagataataaaatctaaaatccaatatataattggatcagatctgaataggcttaaaaatattaaatgtgatccaataaatacccttagatccgatattgaaatataccaatagcagtgtatcacgtcttgtggtgcttggcaccttaaggtacccttaagtatttcttttattttatgagcattgctatttggcactttaaggtgcctaatactatactgatgtgacaccctataattggttaacagtttatcatattatttatcaaattaacatgtgtaaaacttgatattaaaatacaccaataacgatataatatatcaggtgtgcttggtactttaggtggtccttaacctttctcatattttattatgtatgttaggtaggtagtggtggatataacaatttatttcatgtggcccaataagatgctatatattgctatatatatatataggtaatatccaaattaataaaaagaaaaagtatcataattgagtgtagattttgaattatggaattgggagatttggttgaatatcttgagaacaagaccattttaatcactggaggagctggcttcgttgccaaaagtagtacatatacatacatgcataccctacttcaattcttattagttgaataaaaaagcatgcatatatatatatatatataatatattgatgatagttttgtgtgtgaatgaatgaatgaatatggcaatatgcacatgcagtgtttgtggagaaaattctaaggactcagccaaatgtgaagaagctctatgttcttttaagaccttcacaatgcaactcaccaccccaacgtttccaaactcaggtaattaatccaaattaattaaatgttaattactttttttattatgtattaataataataaatgctaattaaataattacatatgaattggttattattgtaaattattaggtgatggagaaggaattgtttaggttactaagggcaaaatggggaaaggagtttgattcatttatatgggaaagagtggaagctgtgggtggtgacattagtgatgaaaacttaggcataaaagatgccattttgagagaccatatgttcaaacatattgactttattgtcaattgtgctgcaacaactgatttctttgagaggtacaactacaacaaattactattatattatttaagaataataatatatatatatatttattaccctcaaccatatcttactattataaatttggcttgttgatgtgataattgatgactaatttgtcctcacaaatttaatatatattacaagtctatttcttttgtccttactctcacacattgcttttgtttttaccctcacacacattgaactcaaactttttaaattacactacactaatcactttcttgtgttgccaattatatataaatgataattgatgaccaatttaccctcacaaatttaatatatattacaagtctatttcgtttgtttacctcacacattgcttttgtttttaccctcacacaccttgaagtcaagctttttaaattacactatactaatcactttcttgtgttgctaattatatataaaagtccttttgatattgaaaatttatgtctattatacatatattataattcatagatataactaagtacatttataataattttgataccaagtggctaaaaaaaatatttgattccaagtattattaataattagatattttttttaaaaaaatgaaaataaaaaccaagtatta

SEQ ID NO: 326157 - DNA, 1528 bp, Cannabis indica
gggaaaaacccaacaaactcccacttgcacttatataaaactgatagtgcatttcaattaatctcaaaccttgatatccaaatcaagtgtagtacgcagtattatctctataataggatctaacaggttgtattcgatacaacctttctccattattacatctccttaatcacaaaatccttaatattgtgaaattcttctcaacatgcttactcgtcttggggtactagattccttactatttggaaactatatctgtattaatcaagaagtaacactagtggttaatccatgattggaataatgccaaagtagtatagaacttttcataggctaagtaattatctagtagccttcttagccagtttaacattgagcctcactagtagagttagagactctggattggtttttacacttctccaaaatcactgctctactcacggagtaaacaccatctcataagtagactttctagcataaatgcaagtctagaaaccttattttggtgtagtctaagagtattaaaataccacccttatcgactgtaatcccaaattttatctacctaatgtggcctatcccattaagccaaagatagagtacaggtggagtaaatccccgccgatagcaaaatagagcctccgtacgagatatagcaaaatcatgaagcagcaactgaagggagtaaatcgagctcacaaggagcagtactaacatccttggccaacaagggtgagcctataagctagccaggatctgtacataagttagccagccaagaagtgactttcgtacccaaggacactctgttcgaccaagggagacttacattttcaaggaaataatgtagaaagttttcctcaacttgcaaaaggctatccaccacactcaaaggttagccttttcttggtgaagctctagtgacctaccagaccctgcaggccttgtcttgcaaggtctttgcaggaccatggctggccaggattgacctgacaggaccatggccgactaggattccttgaaggcctatggatgacaaagattgagttggcaagattccatgtacaactctacacgtggaccaaaccatgggctgcgaattcggccctaaaagcccaacaaacaggcggagaagtatctagaatctaagggcatttttatcttatgtaaatgtcgagctaactatcctagtctcaacggatttaagttgtaaaacaaacaggcagagaagtatctagaatctaagggcattgttagtcgaggcaaacttggcactcgcatgatcttttataaaactaagcatgcctattacgaaaaaaaaaaaaaaaaaaacaatacacatgctagaaaaccatccaatatggaagatacccatagcagcatgcctccaaacaaaaaccttgcaaaaaagtagggaaaagggggatagttgttgggtgttcaatcctagacaacgtaatgcacatattgttggaatattttttaccaggatcttagatctactcacaagtatgttgtttaaaca

SEQ ID NO: 326158 - DNA, 995 bp, Cannabis indica
gtggctggttgacttcgtgcatggcagggtccatgggctcaagctcgcatgcgtggtgatgtacaaccaggattcaaagcgaatccgtgctctgtatcatgagcattacaacgtaaaacttttacgtaaaattattttcgtaaaataaattacaaaaatcctatgcccctttatggcgtgcataattttttagaaaatttaaagtaaaacctaaacccaatattaccatataattaacaattcatcatctcatagacattcacaatattataagtatccattcacatacatatcttatatatatatgcataaaactcacacaatatttaacatatatacataatagaatcagctctagtaatatttattggtattgtggtactaaattaggtactcagtgaaagtatttatttagactatcattgtaccacactccaagaatctttatatgtacatatattaaacctaaaataaaaaatgaaaggatttatttatctcttgtagcgaatcaggaaatccttgaatcttttcgtaagttgtatccatgagatgctgatgtcgaactcacacattgatcttttagatcaaccaccacacacatagattagtgtgggctaagaggatataactatatttgtgttcttgagtttacctcaacacataagtaagaacttttccttcactgagtgaataatgatgcgattaactttttttaggcttcttaaattatatgtgcatatagatttaagatataccaatatattaatttaaactaataaaataataataacaattttatctaataagatatttattatttcaaatgttaaaataataatattcaaaataaacatcctttcctctagctttgaccgacactaactcgccattgccaactttaagctttaactctcctcgaagcaaattttcccaagtttcaagcaactgcggtgaagaacatacatagttagtagaccaagaatcaacaatccaga

SEQ ID NO: 326159 - DNA, 945 bp, Cannabis indica
aaataaaaaaaaaatagaaaaaataattggtatataaaattggtacggttgctctattacatacatggtaactcattagtctcgaaaataaattttaaagctaccattttaaaattataagctaccataatataacttaaaaataattaattacttactaagatgtatacaaataagttttggagccaaccaaaatatatctcaaattatatgatataaaataaatttttttatgtaaagataacgaattggtttcttatcaacacttttaataaccaaaaagttacttttaaaaatgcataaattttttttttttttaaaaaaaaagtcacaagtgttagaaaatattagatttagtttacatagcacgtcaataaaagtagtatcgttattattataaattagatgcaagaaaatatacataattgtaaacttcctaaaatttagtcaacaaaatatattataggcaggtccggccctggacataaacgggctaggcctgtgcctaaggcgcacatagcctaagggctcaaaaaaaattcttttaaatatatacaatatgtttactaattttgaaaaataccaaattttttctaaataagagctcaaaaatagttttttttttctatgacctactaaattttagcgtcggccataattataggatagttcttaataagtggtcttccatcctttaaaaaaaatggtttttcgtttctaccgaccggtaggggtgtacattggtcaatttggtcagtttacgttacattttattcaacccaacataaaaatctggttataaaaatctaagtgcaacacgtccaattaagaaaaaataaatcttcaacccacctaatgaattggtcggtttggtcttggtaacccgtccaaactaagcactaattttttttttttttacattcaattgttatattttaattaatt

SEQ ID NO: 326160 - DNA, 963 bp, Cannabis indica
acacattatttacataaataaataaatctttaaattttaaaaataatacatatatctctaaaattcttaataactctaaaaatagatctgaaattaaaaaaaaaaaaatatgaagaataaaatatatgtatactacacaaaaattaatttaaatatactaaaatatacacaaactaatatatgtatactcaaatgccttgttggtgtgtggtggtactcggtagtggtggtggagaactcgatagtggtagtggtggttgtgttactcggtggtggtggtagagaagggttaagagagagagatggctgaaaaagattgaaaagttgggagtaaaaatagggataatgggtcggttgggagtatttatagacttattagtggcaaggccagctgctaatgccccgctgcaaatgtaacaccctaactattttaggcatgttaaggtaatttttaacttactgtgcagctcattgctagtcaacgaggttattaaaaatcgtgattaattaaaattttgcgtaagtaattataaacataaaaataacatacatataaaattctaggatcttgtttacaaaagcattttcataagtttcactatacaaatacaaaagtctatcgcctagcgactataccaaataagccctgatgtccaaaagatcatacgctccaagcctaactactgcgacatgtacaatctccatctgctcgctatcacggcttctcagccttagccttgcccttacctacacatggaaatagcaataacctgaattatgatcagccacccatacccccaatcataaccctatccctatgtccaacacggtgctgagtttagaacgtttgtaagacagtaatattgaccataatatcagcctaacacctggtacgctagttacactctaggcgtactgatgtgatactgtcgagagtacataagcctgttggaaattatttta

SEQ ID NO: 326161 - DNA, 1083 bp, Cannabis indica
agttgaagagggcttaaatggattgattggtactacctatatcaataaggtgcatcttattttttggtagtccatcacgaaagaactccacggttaagcgtgcttgacttagggcaatttcaggatgggtgacctcttgggaaaacttcccaagaagtgtgcgagtgaggacaaagcacactggaagcactcgtgttggtttgtagggccagtcatcattccaagaagcacccagagtgatgtactcgtgtataagagccatccttccatgggtgtaatggcccaatggagccttgaagcgaggacgttacacggttgttggaattagtcaaagattatgactgtgagattttatatcatcacaggatagacaatgtagtggcggattcttttagcaaaaaaggtcccgggcaagtttttagtaccacagagatagcatcccagttggcctcagatatgattaaggctggacttgagtttgtgattgggaaattacataacctaacacttcaatcaaattttttgaaaagaattagaaagacataattagaagaccctgagttagtttaaattcgagatgaggtattggcgggtcgacctaaggacttttcgatcttgaattatggaatgctactttacatggcttgggtttgggtttccaaaaagtaatgagctcaaaaaagtgatacttgatgaggctcatactacaccttatttgttccacctgggtactaccaaaatataccaatacttgaaaccctattattggtggcgtggaatgaagaaagatgtagtggaatacgtgtctaaatgtttaacatgtcaggaaatcaaggaagaacataaaaaaccagtagggttattgcaaccactagcacttcctgaattgaagtgggaggatattacgatagacttcgtagttggttttcccagaacaacgagaatgtatgactcagtatgggtcatagtagaccatttaatgaagtcagcacatttttttctagtaaaaacaacctatacagtggatcagtatgcatagttgtatgtgaaggagatagttcgtctccatggagctccaaaatc

SEQ ID NO: 326162 - DNA, 1818 bp, Cannabis indica
tggtcgtcttctcaagtaaagtcgccagaagtaatggtggttttcaatctgtttgaatttttatttcaattatgttgggttgctgcatagttgtgcgatggttgcgcgatagttgccgaggaagcatggatcctaggatgaaggtgtgtgtaagtagtatttgtgtattttttttttatttgggctgtatatttgtttatttgatcaagtggaagtatttttgtaatattgttacttttttttagttaaaattgaaaaaagcccaaattattatttaaaaaaaaaaactatgaacaatatttaacccttaattaatgttaaactaataatgataataattaataatattgtgatcattttttttcttcttgtatgcatgtattgtatgatacaattagaacatgtctattttttttttttttgatatacaattacaacacatattaatcccctaacttcatatatctaatttctaatcttaccacaaggagccaataacatcttgacaatcaatcaccacgagcaatgacttgttacaagtataaatcacattatgagctagtttggtacaattatattttgagaaaaaaataattatagaagtgagaaaaaacaaatgtaactaagttagaaaaaaaaatattgataatgtttaataaattatagattttaaagtattataaatgattaagattctaattataataaaaataatattataattttagtttattcaaataaaaaaaatatatattttatgcatttgatagttacaaaagttaaatcaagtttattagagttagtctcacattgctaatgtgtagaaataaattatcacatataagatgaatgtgttactcctctcattgctaaatgctaattggttttgagatggaatcccatacatcttattccaaattctaatatggtattagaatcgcttgtgatccgttgtgagccaaaaaatatctatggtctaaaaagacaagccataaaagagccgtttatgatctattgttagcccaaagtatcgctcgtccataaagacgaggaaaacttaagaactttcccgctttccctttaaacttctatttggaacctttcggtcaatgtgccagtttcaagtgttacgatctttgacctatttcaaaatccataaatttctcacactttttaaacccgaacgtgagaatggtgtattagagttagtctcacattgctaatatataaattgtcatatataagataaatgagctactcctctcattgccaattagttttgagatggaatcacatgtaccttagccacttttattccaaattctaacatggtatcagagccgcttgtgatctgttgtgagtccaaatgtctgctggtctaaaaagacgagccataaaagagtcatttgtgatccattgtgagcctaaaatatcgtcagtctaaaaaacaagccaaacttaaaaacttttgttgtctcccctttaacctccatttgagacttttcagccaatgtgtgccaatttacagtattagagtctttcacttgtttaaaaatctacaaatttcctgacacgtacacacctgcaaattctcgatatttggccttgagagattccttcaaatgttacgtttgaccatgtggtctcttaaaggtcgttcatttcattatacccacgcttttcaagctaaacgcgaggagggtgtattagagtcagtctcacattgttaatgtgtgaaaataaattaccatatataagatgaatgaactactccttctattgccaattggttttgagataaaacctcattcatcttat

SEQ ID NO: 326163 - DNA, 1231 bp, Cannabis indica
cgaaaagttattttgtataagacagttaacttttgtaaagcttttttgtaaatgggatcccacagtattttgtataatattttataagtttaattgaaaagaaaaaattttaattaatcacgatttctataaacctcgtttgattagcaacgagttgaacaatacgtttaaaaattattgtaatacacctatgctagttagggtgttacaatgatggtggtcttccatgtggtagtgtcgatagtgagtggcagtttgatcttgccacacagagcaatgtcgactccggtaaaacaatacataagttgtttgtcatggttccaggtcttctaaggtcaaacccattatgattagggcatgttggaataggatgtttgagaatgctttgtcgtcaatcaccacctttaccaccatcatacatgctatttgaacctcaacaaccaagggatagtcgtgagggtggctgacacgataggagttcgattcttcgaatgtgataggaccacacccataacgttgagactttggaggacattctaaaacctcatgtacttcggcttttagttcatgttggaaggatcttgcatacctttataaggccttccttgtatttccagctaggtgagggcctttaaatacattctccgacctacctggaactagcgcaggctggagaggtgcattacccccagttaaagcttcaagtcatacatactgctgaagagaagcatgtttctatctaataagataatttctcttgtcccgcaactgattacactcattagtctcatgatcgtaattattgtgctagtgacaaaatttgttcatatccctcttccctgactctttgaagggaagaggtttgcgacacgatactgttgactatgtggccgtatagatctcctttcttagggccaagagaatagagtaggtggtaaagtgaggctcatactcttgtaaggacctacccccagtcttaggcttctttccactaggggagtttcctgtcttaccatcattattggctctcttccctccgtttgttcctcctttcttcccattgtcttgcacctcattagcaagggtttggagtttggttacttattcttgccacctttttagcccttagctccggtgacgacttcttctcaattgataaagccatccgctctatcgaggaagtcgttcatggtgtaaacagtcttgagacaaaggtcaaaccacagaggac

SEQ ID NO: 326164 - DNA, 1599 bp, Cannabis indica
agcatcataattaaaaaattgtttttattcttaatttctaaaaataattttttgaaaacaataccaaatatgctctaagggtctccattttactcttattattagataaatactaagagcatttctaatgttactcttattttttttagctaaaataactaaaaatttaaaataaaaattatgtttattattattgttgctccaagctctctactacttagaatttaattattttaataataatttataatttaaatttgttaaatataaattaattttagaaaacattaaaaaaataatagtatttttaattaaaataatatttaaaaaaatagtaaaaaaagtaaggaacttccctaggtttagaaaactctagctctattctctattatagagaactattttttatatagttgagactcattttttaagtctaactccttattttaattaagaagtatttaaagagtataattggagatgttctaaaagtgtctaacactaatactaaaaggtaccagacgtagcaccacctaaagtaatgtgctattaatataactaaatatcaagtgtcatataatttaatataattatttttataaattatttataaatctctatcatgttaagtattacttgtgctttagaaagtgtgaccttatgcgtgtccagtccgaattccaaacttgactttagaatattcttctcaataacctaatttttacaacttgtcatatatcatggcatgaacaaaaacttgcagctaagtaatggacaagtaaagaaaaccttgatttatttattttatttttctttttgacaagaataaatatcaagaagatcttactaacttttagtgatcgttgaatacacaagattagattcaataattagatacgttaattcatccaattcagtgttttagcatgctgaaagtttagataactaaatcaagtaatctcatctacactaaaacaaataaaaaaaacaaaagaaaacaaataattaaaaaaactaaccatcttctgcacaacttcaatactagatgcaatagaaactatatatgcaagcaagttctagaaaatcagaataaaaaaaactatactgttatattttctcaaaaatgtgaactaaaaacttcaaaaactaaataaaaaaaaaaatgaagaagaagaactgaacaaagaaaaaaaataaaaaaattatatgttaatggagaaaaataaagagaacttgaggaagtagaaagtgaaaaaaaaaacggaagaaaatgatgaataggaagagtgaataatgaggaagtgggattaaagtgaaagaaatggatattaaatatacggtatcacatttttcatcatcaattttaattaaaagaaaataaaaaaaaaaatatcactaacgtgacaacacaagtcaaatcacacgtttatatcacttaaaatatatttaattttaattaaaagaatttttttttttaaaaaaagaaatatttaaatttttattaatttatatataatatatatatggctaattagaaattccccccccccccgaactttgacatatattaaatcatgccccctgaacttttttggccgt

SEQ ID NO: 326165 - DNA, 1880 bp, Cannabis indica
atttattggtctggtttggttttcaatattcaaaaaactgttatactggtttggttcaaaaagtataaaaattcagaccaaatcaatccgtgaacaacccctactttgacaagtgagttgtgtgctgaaattgagtacccaaagagttaagcccatgccgacaactttacacaaactagaaaaaatgcaagccaccattggcaataataaatgttatctttaaaatcccgtgttacaaagataataagtatcggaataaaataagcgccaaaaaatattaaactaattaagttctaaagtcaccaagatacataataaactaagttatatatacttaaaaaaatttaaaggtgtgaaaaagacttgttagtcctaactaataagtactccacgacaagtggacatatacaaacccacacatgtggtcccaacatcaatgcataaccaaaaagtgtataagaagaacaagagaattcaactctgttaacgacaaaccttacttgccaaccaacttgagcaagagatttaactctattgaaggatgagtttgagaaagggatataactgtactcaatgctcaaaacataagcaagagatttcaaaactccctaaaagtttcaaattcaagaaagagatgtaactctactctaaattaaaaaacttaagcaaaatgttttaaaaccttgcaaaagttctaaaatcgagcaagagacataactctactcgactaccatatgagatataagctataactcggctcacattctaaggagaagccacgtgctttaagaactccacacatataattctaaagatattggtcctgcccatgcacacccctttacaataattaagaacattggttgtgcatatgcatacctcttcacaacaattaaggacattggttgtatccatgcacacatctctagaagagaagtaacatacaaagaagtattttttgcgcaagccttgggaaaagtgcaaaaatcgttacttgaaggcttacagacaaatacatttggggggcaaatgttatacctaatttttgtaaaaaataaaataaaatggctaatcttgcagaagggcccacatgccaagagtaccttgaagacactcaagtcaatccggtgactttgaccgagacttataaatgcaaaataagttaagaaatcctacttgagggccccatggtacctctagaagacttgaaaacattgaccaaccatttggtgttgggactcacacacccacgtgtgcccaaactagggtttatgggcccgcgtgagcgttttcaccctagagacctcaatcagacaaggagaccaacaaggacttaactcatttaggcataaaaagtcttagacttgaacataaagtcaaaattgcacaagaattccatgcaacatggcctatgtgaccactgccacatgaagatggcagtgctctccagtttttagagaacactaccacaaggagatgaaagtgctcgccactcattaaataccaaagggaacttgtaaaaatgtgttccctcaacacctaggactgcaacacaagtgaaagaaaccattccttaccaaataacaaggttggccgaccactgccatctttgtggcacaaattgtggcagtggtaggccacatttaatgggaacaagatttttcgccagaagtattttttaatcaataacatgtcaaaactaagtgagaaaagccaccaagtggtatagaaactgttggaattattttaccaggatctagatttactaacaagtatgttattaacatcctaaatatgaacttctaaaacaatatgaaataaacacatataaagtatcaggaaccttacagttcttgtagcggaatataatgtctcattcc

SEQ ID NO: 326166 - DNA, 1311 bp, Cannabis indica
aaaaaaaaaaaaaaaaacacaatactatatcaaaaatttcgtcaattctttttttaatctatgttaacagttgtataagaagacacataataattaataaatataagttataatattgtcattatttgttataatcactgcaagaattatagttaataccgacaccactattactaacgctaaaaagtcctcattaaaaatgatggtatcaataacgacacttaattgtcgttggcaagttttttcaattgttttttttttgtaaaatactcaatcaataacgacatgtacttcaataacgacaatgtcgttattgataaaagcttcaataatgacattgtcgttggggcttttttttttttgaaaagtgtccgttagacaaggaaatagaattttatttcttactatgccaagaaaccaaactgtttccaggaaagaagcaacctccactcgtactcttgcgattattagcatttcctgtccaatctgcatcactaaaacaagccaagttagaattagtatctttagaatacaagaattccaaagtcgagagtactattaacatatcgaataatcctttttactgcagatacatgagactcccggattactttgatatcgagcacaaactctcacactataactaatatcaggacgactagcagtcaaatacaataaactacaaatcatatttataccttttggtcttcgaaccaaaatctgaatcttgttgcggacaaactgattaagttcttcttgcattgtattgagccattcttcaaaagtcatagcttcctttacattttttggttcaaattgtgaaacaacacaaagaaaactaatcaaattaagataccttcttcttgttaccatgctttcttcaagatttccaggaattagatctttaggatgattcagttttactctggtgcttggttccttctagattgaatcagtaatgatgtttggatgaatcgagataggttgttcgggttcacctgcctcagttgcaacagcagatttgtcatttgcatcttcagaattcaattttgctacatcacaatctacatatgctgcatctagtagggtatccagaaagctatctaactcggcttctatggaaaattctgaaaaatctttataatcatcaacaaccacattagcagattctaaaacagtttgaattctcatgttgtaaacacgataggctctactacttaaggattatccaatgaagacacgaacatcacttttagcatcaaatttttcaatatgctcacgatctctagaaacatagcaaacacatccaaa

SEQ ID NO: 326167 - DNA, 1318 bp, Cannabis indica
gataagattacagccaataaatagaacatactcccctccctgtgaaacgcctgtcatcaacatagctagcctattcgacattaaagtaagctccaatggacaagcgaggaacaagccgaagaagaagaccttcatagatagttctctttagataccgaagtaggcatttacatgcttcccaatgaacaaaaatagtatgaataagttgaaagagtttatcaataatgaaagcaacatcaggcctcataagagaaatattgcaaagcacccaaaatactattgtttttatgccgtaaataaaatcatattttaatatatcttaatttttattaataaagtttagaaattatattttggcattgtcatatgctttgttcacatagctgccttcatgattatatatttaacatataatttctattaaatcatgaacgtatagttattcacaattatagtgatgtcatcacagtaaaaaaatatttataattatatgcgttaaatttatttagtcccaaaatttatcaatgcatcgaatttacactaacctgataatcatcgatttggtttacttacactaaggcaaatgaaatgtatttttcaagacattagtaaaataaacttgtatcagatgtatagagtttacatcagactgaaccgatattgatagtggaaaaaatattataaacttatcgttatatctattctaattcgatataacttagatgatcacagatcaattaatttatatatcttaataataagatggttaagttttaagttaattgtacagtttgaggtttttgacttgttcgttactagcttacctgtcagtctagctcatactaacatcctgggaacttagtagttcaattgtcagtctagcttaccaggtcaacttgggagctgggtgcccaggtgtctcaaacgggaagtgtttcgagtgtgattctggtgcctctagcatgtttgtgataaatcttaatttatgtctacgtgcaagatttgagcaatcttcactaagatagacatcgaaaactgaaaccctagtccaaatgtcaacttaggcgctgtgtgaaacctttatctctcgagttcgcttctaaatgtcaaatcgacatctttcaattccaaggcttcagacttggagtcttcctgacttgttggctcataatactaaaggatggttatttgaaaacaacttggcgggattcaaatatccatttcggagctccgagagtcaacctgggtcggcgcagggatagggacccttcccagagttgactactataacttgggacaattaactccatgaatattt

SEQ ID NO: 326168 - DNA, 1218 bp, Cannabis indica
attaaaaagaactagtacataatattttaggaagttgtaattaagacatgttgacttgtaaaaaaatagaattggtaatcagtagtctaaaatataataatatttatttagtacccattactttaaaattatatttattttatattttagagtcaaatttaattaattatatttaaattgcatttactttatacaaattttaatgtcaaatttaattatctttataattatataggaaaaaataacacaaaaaatacaaaactaacttttattacaaatattccttcacacagttaaataaacttttgtaatttttttaatgttttatttactaataaacattttgcacatgcaataaggatttttgcccagctcccccactaaatccaactgtcattgaagctccattgtacaattttatttttttttgctttttttacttatatcaatttccatatcaatagttattacatgttccttttcttcttcatctccttttgtgaaagaacccagtgtttctaaatatgcaacaatgggtgtgaaattgttgagcaaaaaaggcaaagataaacgaattattgtggaagaatatgactctaacgaaaattttatttaaccagcaacaaaacatgaaggtcgtcctttgaagaaattgaagaggaacgaaggtgataaaagttctataccagaagttaagaagggaaagaagaatgtcgatgaaatacctaaggttttgttttagtttcttttctattttgccctaatttagaaattttgtctttattctttttagtgtttttacatgtgatttcggttctagggtttcatacattttatttgttttattgttatattagtggtaggttaactgatttagaatattgttcgatttaggttattttttagttttttcgtcataaatagttgttcattgttgtatttttttcattcattttagactttattttgtaatgagtattgtagatgcactcagttgaaacatttggcctttaaagttgacgagtcaataatcacctgcaaatctacagtcttaatcgggttcagtggtgagcagaagcactcgattggagaggtcaacttgcatgtttgggtagaaagagtaactctctaaaccaagttcatcgttgttgattgtccttcttcatataatgccatccttggtcgaccatggtgttggaatttattttaccaggatct

SEQ ID NO: 326169 - DNA, 638 bp, Cannabis indica
aatcttcgcaggcgattggaacaaggtgttatgaagctaagtggtactcgaccaatatgtcgatgattttggtttcagagattgagatggtaatggtcggcgaagaaggttgatcgtgaaagtagaaaagatgtgaagtttcttgttattcatcatagtttatttggttaagttgtttgagattaatagaagaaacaagccagctctaattggggaatgataattaatttcatatgatatttcattgtttatattttttgatgttaaaaggtgatcaagcagctgcggagctaggattaaatgttaggatgggctaaaatatttgtaattagtataaattcaatgatttttcttagcaacacaagtaataaaattttaattttcgttcaatctttaattttttttattattgattttgttagtgttttaaattgatacatgtaaggttcaaattctaaatgattgtgtttggacgaaaacatatagtgtaagttacttccaaatactttttgaacaaattgataaactaagtttgattacaaatttaagacactaattaatgagatttttacactagatactaaatttggcctcttttttttttactatttttatttccagtttagcttttttaaact

SEQ ID NO: 326170 - DNA, 509 bp, Cannabis indica
taaaataaatttccaacaatatcgacaatgttgctcctgaaattgctgaaatttgtggtattaaagaggccctaagttggacaaagagtaagtcttggcataacgtgacacttgaaactgactcattgttggttgtacaaggcatcaataacagttcacaaatgccatctgcctttgggatggttgcttgggattgtaagaaactattgtttgaattgggtagtattttcttaaaatttgttaagcattttgctaacaaggctgcgcatttctttgtgcgtagtgcttgttattcaccagttggcatttttcacaataataactctcctgaggagttattaaacattgtaacggctgattcaagttaaataaaattgccatatttccattaaaaaaaaacaaagtaaaagtagcagtatgcttagcttgttacaccattaaatttatgagcaatttgtaataaaatctcaaaaaaaaaaaattgtaataatatgagagagagagagaga

SEQ ID NO: 326171 - DNA, 513 bp, Cannabis indica
ttttttacaaaaatactatctttaccttaattttttttatactgtacataccacaaaacacatacgaagcctctattttcaacacctataatctgaaccacaaaagaaatactagaacaactattattctactcagaatgtaagtatttaagattctaatcctaaaactaatataaaaatactacctaaaatagttgtaaaacaacagtaaaactataaaataaaataaccaaataaaatcacaaaagaaaaatactatacctcaataattcttttgctagtagagactttcataacatcacgagaatgaattttcaccttgaaaaatttctcattaccctaaatacattggaaaataattcagaacaactaaaaaataatcgttaaaaaatataaaaatcaagtatataatgctaaacactgaataacacatacaaaacaataaaacacaaaaaatttaacaaaatcagagaatgatgaacaaaatcctaaaattgatatctgagattgaac

SEQ ID NO: 326172 - DNA, 1957 bp, Cannabis indica
taatataaaactaaaagtgcatttcaattaatctcaataccttgatatcgagatcaagtgtagtatgtagtattctctctgtaataggatctggcaggttgtatttaatacaatctttcctctaccattacatctccttagtcacaaaatccttgatattgtaaaatttctccctatatgtctactcctctaagaatactggattcatatatacatatttatattatatatgtgtgtagaggcatatttatgttgtacctctagttttttttttcaagaaacaaaataaatttcttaaagaaaatatataatttatagaaattaactattcacctttggttctaaaaaaaactaatctatttacaacaattcattccacattttatcctccttactaactttttttgtcaaaaacaatctacttctatatttgacatcattcttcactctttttataattgtatcaactatataacactttgaattccaccggtttttatttcgtttttgccataattggtagactaacgctgcaatggcagcagccatcaccctcctttggctctttgagagctttgatcgggccaaccacctgaagagatgtgaaatgctacctgcccttgtattccatgctagccaatttttgatttctgttagacattttaagctgaaactacactcaaaaaataagtgttcagttgattcctcatacatctcacatattacacattttgtatccatcacaacattaaacttttttagtctagtctttgtttggagacggtttagcaccgaaatccatagaattaaactatgcttcggtacattaagtttattccaaacaacatttgcccaatggacctttagttggtttccaaccagcattaataaagtctatcaaatgttgtatgcacctgttataagtggttgaaagttggtgtctttgagatgatctttgacaaccccaatacgcttccgataccaactccccaagggtgggactttgtaatcccaccaatctcttccttttaagaacacactatgtatccatctcacccatagattgtcttgtttgaatgagattgcccaaacatgtttcccaatagcagctgtgttccaagttataatcttcctaaagtcgagcgccccttctttttttggcttgcatacttctcccaatgcgacataacctaggcctgcatgttctgaatcgcctttccaaaggaatgcccgaaacatggcattaactcttttcaagtgttgtttagatagaatcatgatccgtgcccaatatgtgtgaatagaaatcaatacagaattaatcaaggtaactctacccgcaaatgagatgtttcttgagctccaatgctgattctattcgtcatcttttctaccaaaattttagttttagcacttgaaagtctcctggcagcaatgggaatgccaagatatctaaatggcagcttgctccttacaaaacccaaagcatttaaaactctttgaatttcaaaatcatccatcccgctaaagtaaaaagtttatttagaatcatttggttgaagtccagagatgttggcaaacaacttgagaccttgaagtaagaaatagatggatttaaaatccccatgacaaaagagttacacatcatctacgaagctcaaatgattcaattgaagatccttgcatccttcatgaaactgaaatcattctcttcccaatcttaaccatgatacgggaaaggtattccatacccgaaacaaagagaggggacaaaggatctccttgtcttagactcctctttacttaaaaaaagccatgtaaagatccattaagaggaatgctaaatctttgagtgcgaatacaaaccatgattagtttgatgaagcttttcgagaagtcaaaagcttgtaacatctcctcaagaaagtcccatcctattatgtcgtatgctttcctc

SEQ ID NO: 326173 - DNA, 1093 bp, Cannabis indica
tgaacaaacaaacatatagaacaaaactagaaaagtgggcttgggctgttgaaagtggacccaccaaggaagcttcatcatccattaacacaaacgcaatagtttccctttcttttcttttttctttttgataaatacaataaatagtttccattcttgctccaagacattgtacttgaaaacaatcatggcttgtatattgattaacctaagaaattgcattgattgaaaatatcaatagcagctctaataccatacagtgataaatcttgttaccaatattatatttatttttcttaaaagaataatatattttaataatgctactattaggaagttgtatgattgtcatttttattaattgagtattgtacttgagagataacaagctttttttaaaaataaataaataaataaataaagcatttttataaagttaaactaaattaaatctcatggtcattacaatactaaacactaagtacgatttttattttagcatagtgtacgagccctatattagctctagtatggtaaattacactcgaagcaacgtagatcacacaattttcagatgtgtgtgctatgaatgtattttgagcattcttcatctacattataattttacggcacttatttactttgagttgatactccttaacgaaacaataagggaaatttaaattaatattcatgcatttggacaaaattggtacactaaacttaagtatatcaaagttagttagataggtcacttttttattaaatccaaaaatacccctcataactcacccatcatctctctccccttctttattctctctatctcttttgctctcttattctcacgcacacgaagatattatcaacccatggctgccaaccaccgcgcctctaaccgaagaccaccgacgactaccaacccaagacccaagatctttgaaccacgaccaccacgccatgaatgtaagtttccaattttattgtattttgtgtgatttagggtttgagtgtatgattttatttataggtttattgatttaagaataaattacatgattaagagttgatgttagatttaaggtcgaaaatg

SEQ ID NO: 326174 - DNA, 987 bp, Cannabis indica
acaagaatattatctaggatggaattattgataaaaagatcgataagaaactaatgagaaaagattcgttgataattgatggatttataattgtaaactagtcaacttgttaataatcatttgtgaattgcatatagatacatgtaattcgttcatatatatacttaagatttgtatgaaaattaatataataatagataagtggaatgtattcaatgtaattggaactactaattaattgtcatatataattgttccctaataagtaggttagaaatgtgcacaatgtaaacatatggaaataatatctaatagttatttaattaattacttgtatttatgtaacattttgatattattagttcccttcacgacaaaaatgattccacacacaattcacatcaattcaatccatgagactaattaagggacattaaaaaaaatggaactattctttattcaactagtattatatttaacaattaaagctccatgagaaaaatatatgtttcaattaaagtgacaataccattccactaatgctccacattttgtcaataatattaataataataaggatctaattctacaatggataaaactatacattgtttctttcacccaaattaactaattatttttgatatattaagtataattttttttctcataaatttgattatggtttgcgttagtactcccacgttttccttaatgattaatgggttgatgcatgagttctttaaatcaaaaagagggttaaagcaaaaatgatttgatatcttttgtttttggtgttaaaaatgaaataactatcaaggatccttgcagttaatagtagctcagaattttaatttctaattttattgaaagtgtttgaagctgaaattaactcatttgcgtctactacaaaaaacagctacttttagtgacaattttttagtcacaacataaattttttgtgactaaatgtgacttttggtcaca

SEQ ID NO: 326175 - DNA, 1167 bp, Cannabis indica
aaaaaaaattaatcatatcgtctatattttcagaacctagagcaatattgtatccctataccctagtgtcatataaaaaaatgtgtaagtgaataataatctatatctctatattatcattataccttcccttcattaaatctcactctaaaaataatcctaaatattacacctctcgatttcacaatttaaaaccattcggttacctagttcaatgcttatctctcgatctcacaccacctaagttgatctacctgatgcctgattgtttaaaagtttctctctcgagtaataaatctcacaatctatataatagccttaattatgatcacataaagtaaaactatacataaatcataatcatgacaataattaaacaatgtagaatcacataaagcatattggactaaactaaactttacataaaatcaaagtcataattagagatctatctagccctaacaactaagaaaactagccacacatagtgtggtttatcatctcaaaatattgtttagaatctgaataataattgacaaataaagaagaaagaagaagaataaacgaaaactcttgaatgcagcttcaaattgcttacttgatctcttagacttgtttctctcttcaaagttgcgctttctgtctctccagtcgtcctctccttctggagtcgaagttataatgttctttttacatactaagaaaaatgaaaaaataacttttgaaaatcaggtttaaatttaaattccatacagtcagtagtatggcacctaagatacatcgagatgccaccaagtgagattccccaaggttttatttttgtccaaaaaaaaagtaatttctcagttctggccctgtagcaccacgccaaaagctatttttttgtcatttttaactgtttcgatcttgcttagtaaaatatgcataattttcgcgtctgggttcaaaatgagatgatataacatattttggaaaactgagaaagaggtctatcattttgtatttcacaaactctttaaaaaaatgaaggaaacatggtcaaaattatcttaaagatctcagtccatcacaaaatcgtcttttaagcacaatcctacacacttagagaaaacacattaaatttagggaatatgtgttacgaattttatgtttattacgcaagtatac

SEQ ID NO: 326176 - DNA, 1058 bp, Cannabis indica
attggaggaaggttcaaagtgccttgatgtcaaaggagactaaaaagaaagtcagaaggaagaaaaatttggtgaagtgttggtgtttgtatgaggaagaacagacagaagaggaaacaaggcaatggggaactctcatggacaatcaagaggtaagtttaattctagtgctcaatataagacaaaatgctatatctgtcataaaactaaccatctcaaaaaagaatgtcctgaactaaagaaacaagatttcaagaagcatggcaatgttgacatagcttcagaaggcagtgacttcgatggatacaaaagtgcaggtgtaatggttgcctctaaagactactctggtgttgattgggttatagactcaggatgctcctttcacatttgtccaaacaaggatcaattcttggagtacaagagagttgatagaggattcgtaagacttcagaacaatagagcatgtgagatcattggaattgggtctgtaaggctgcaattaacaagagtcaatacacatgaattgcagaatgttagacatattcccaacataaagagaaatttaatttctgtaactatgttggacaaggagggatgctcagtcaaggtggaatcaagggttttaatggtgcaaaaaggtcagtggtattgatgttatgatcaatggggttatgttcttcaaggaaattccaccagcaattttgcatctatggcctcaaaaagcatgatcaattcaactatactatggcatagaaggcttgttcatgtgggtctcaaagggcttgagattcttgacaaacaagggttacttggaatgaatatggtgccagatttggaattctctgaacaatgtgcccttggaaatccaacaaagatcaaatttggcattggaatacacactaccaaagtaacactggattatgtgcactcagatgtttggggaccatctagaatcatttcaaggagatgaactagatattcagaacatgtgaaataatagaaggatcaattccaaccatatccgcatgtgaccaggcaaaaacgtctaggtttgctct

SEQ ID NO: 326177 - DNA, 1319 bp, Cannabis indica
tgaatctcagcgtgattgttgttttaccgatgtgagcgatcggtaatcttaagttgttggctatcaccactacacaaccacctttatattccgccatgttctgcagcttctctttgtcttctatcatatggtttgagcagtcgaattcaactatccaaacattattatagttgatctttcctagaataatagatgctagagctaattcttcttcctctaccgcgaatgattcttctgcatcccatccttcgtcacttgtcttttttacatttgatgtgaatgtattaccttctgcaattttcttctcgaaccaataatttttaatcatgtgatcatacttttcacatttaaagtattttcatcaaatatagtgttattctttgatcagccaccatgtttgtctttcttttgagatctccctatttgggagcttccatgatgactatcattgttatcatattttttagaataagtactagcattggttggggacgacctttcttatcactacttaagagtgctctttcgtcactctttaatggttgcttagctaattcttcttggtcagctagcaagttttctaatttaataagagaggttggcttggccaaccttatattgcagcaataaaagttttatattccgaccttaatccatgaataataatacttctaattctagcatctgacaactagtagcagaatttaatgcaaaaattcgacaaagagattttaccttagtgaagtattagttgatcgtcatattgcactgcctcattgagagaagcgttctccaaattttacaaccttgtatcattcttcttggtgaataatgatgcaaaagtatctcatcgtataagatctatagtactaaaccacacacgatcactctaagaaactcaacaaaggactcttttagaatgaacctaatacgactctgataccacttgttgatcaccacaggtccacaacacataaaaacgtaattacttttattaagtaattacaccaagacttgaatagtatttactagatcacactacacaaagcactcacacttttattttactactagacacctttactacacatttgtatacaattcacactttcaaaaaattttatctttatattggaatactttagaacacacacttatgtatacaaaacttagcacaaactaggacttcacttaatttgggatacaccttagatttatatatatatacttttcataatcaagttagtgacttcatttaattagaattttgtaggcgaaatttacatggcatactaacgtttgccctttttttacaaaaa

SEQ ID NO: 326178 - DNA, 730 bp, Cannabis indica
gagagagagagagagagacgaggacgatggtcgtggtggtggaccggcgtcgacgatggatgggctcgtggaccgttgtctacgagaaagagaaatgaggccagagtggctcatatggtggttcagtcacagacagagggtagaacgagaagagagagcgagagacgtttgaatgagatctgagcaagattagggttttatattaataggggaatccttaaaagttttaaatcgtcgggatgccctttaaaacctcatttctttttttgttttgtatctcttttattaaactatcgaaaaaagtacacaagtgtttaaaattgtgggaataatctactatagctataactgacagttttaaacactcaatcaattttatatgcaactttcaaaagaattgaaataaaaatgcatacaaattaaaagttcaattgtaaaattcataagtagttgagtaataagataatattagcaatctctgtaattattaagataaagattagaaaagtttgtaactataaatttaaataattgttgagtcgattgagtataaccgactcatattattttttggctaattagtaatatttcccctgaactttgacatgtagtaaatcgtgtcccctgaatttttttggccattaaaaattcccacgaactattgacattgttaaatttaaggacttttatctaatttcattcaattttactgtttcagtgattgtttatg

SEQ ID NO: 326179 - DNA, 562 bp, Cannabis indica
aatttattgtagcttagtatattcgaatgtaacataaaagttgctataaaaattaaaaataaaaagttacgtacatgtatcttgatcaacaatattatgtaactaaaatataaaataacgtaaatatactttgatcgacaacattatattatctcaaaataaaatttattaaaacaaaaccaactaatatcttattagtaatatttttaataacatctactaaattttaatatatttcttttgttaacaaaatataatataaatgttgtctttcattttaaatatctgataatagttaaaaactatatgtttccaacacattaaaatggactacataaaaactaaagtgtgatggtacagttcttagtcctaaataattatgatggaactataattttttttaaaattatagtaaaaaaaacttaaagttgctgacacaaataaataaaagaaagaaaaataaaactttctcaaaaagaataaaaataaaaactaaaaaagagagaaatgttagggtttataaatacttaagaaatatataaatcacagatctaaacatatt

SEQ ID NO: 326180 - DNA, 1206 bp, Cannabis indica
aatttagagagacaaaatttataataatagggttgcatctacttcgagttgtaattacaacaatagactaattatcaaacactctaaaatctagagagagatgtctagagagataagctctcatattgtgggtagttttttgaatgtaaaaaatgagctaagggagctctccatttataggtgaaggaggctcacaaaaacaggagtaaaataaaaataatttgtgttctactgttgatgatgatttaacgataaaaattagcttctggtgatgatggccaatttttggtgaccgatgagtcccactgcagattacacggagcttattttcataactccctttgggtaaattttgacaacgatatcgttagaattatgtatgaagtgtgagagaagacatgatagagcgcttaagtagcttcaaaatacaagttgaatcacgtcaatcagataaaaattgagtgagttatggccgttttactaaaggcaattcaagtccaagcgcctaggttgacattcccgtgcccaagttgacatatgacgtcaatctggatgttctataagtgtagaaacgtccaaggggtgttctttgagatgcccaagtgatagtttaacaccacttagttcatttatatgttctggcaaaattgttcaccagttcttaaagatgttactgttttactgaaacggaagactcaaaacttacgatttctgagtgagtcaatttgtgaaaaaattgaagttatgaatttgattattctaaattcatggattattgcacttgtgaaaaactagattgttggtcaaaataacatcagattcggataaacagaacctaacgaacaaagctatttgttgacctaggcaatgggccctttaaactgagcttttgggattctattttttatacttccaaggcttctaaacttgaggatagggtctctttccctgttttcgaccatgctagatttaacggtcgcatcagatttgacttttgagcaatcaaaggcagcatcccaagttgattgacaacctaggcgatggcccaacaccaggtcaaccttggtgctgggccctaattccaggaactcggttttgtggttttctccctgagtttactcgaatattcattatttttaatgacgatgataatgcccaaaacactttttcactactacaaaactagcctttagaggcgcttttttc

SEQ ID NO: 326181 - DNA, 1002 bp, Cannabis indica
gtccagtccaatcctttttagtccaattcagtccaatcctacgtactaaacggactctaaaagaataaaattctccttttatttaaacaccattaacaacaaagatattgcaataatttaaataataaacattaataattatattttctaaggtttgttactatatacatatactttgagcaacaataatgagtaactatgttatttaattagttattaatagtgaatatacttatttagacttcatcaacttaatgatgtattatgtttgttcttcacgtacttccttgttctcatgttttatgtaagagatcttcccaccatactaaaataaaaattattagacgaattaattatgatatgtaatatgataaaatttaaataataaataaaattaaattctatttgcattgtaagacttgattgacaaaggccattactattttttgtactcacattgaaaattttagctagaagagaaatgcgccaattactagtcctaggccttggttgccttttgcttcaacaaaaatatatatctttagtcatttttcaataataccaatcatatatgtcactcccaaataattctacaatacatacattacataatacaactatcataaccctatgcacacacacaatataatcttaaaattatccacttaaatttcaaagaaatgaccttttatttttatccaaatgaaatatcacttaataccaagaattgttactgcacaaattatatacaagtattgaaattcaaaaaaataaaatacaaaaatctaactatcagtcccaaatttgaatgttctattaaaagcccacaacatcaactctaaaaaaaattaataaccccaaagttagaaaccacataaatcactttattgcattaggttaaagaaagagtatcaagcaagaaaataaaataaaacatcatgattgtaaattttgacagagtcaaaaaatatatatatacataataataaataataataaaaa

SEQ ID NO: 326182 - DNA, 528 bp, Cannabis indica
actgcaaatgtacgctggtaaaactttgatctctttgccagcgctgtttgcgaaatgcgccgataaaagttacttttaccagcgcagtagcgaattgtgctggtaaaagtgacatttcttgtagtgcaatggtttatggatccaatccaatgacgttatctgtgtctattattggatcttgaatatataaactgtaatttaaaaaaaaaaacagttataaataatagatatatataatatatggttatctaattttttattaattattattaattgtaattactattttttttttcataatctctaaatttgtgactcacttacttatgtaaataggtgatcaccttattaaaataaatcactaagaatactctctcattcgatgagtctcatctgctctcttataacaattcagcaattcaaaattcatagacatatctttatatattaaaagtgcctatctaacggcaattcttggtttaacgattcttttttatttagccttacacgattaacttaacagactgt

SEQ ID NO: 326183 - DNA, 984 bp, Cannabis indica
cttgatttgagtttttaaactcacgattggacctttaatggtgattttttatttacaagcttgatgatggatttttcagttggtatacgttgtttatgactcaattaggtgttctagagcatttggtgaaatttgggttagaattcgttgagatatgagattttttgtgtttctgcagtaaaatacagcaaaccattttccagaaacggtctattgattttggcagtcagagactcaaaaaacaacttgccgtttttaggaaacggtctgctgttttttgtggtattttccaaagaatctcattttcagcattttctcgatatatttagtttattttcatgctatgtattgatagaaaacttttagttttgagtctaagtccccgaaaattgatttagcgtattacttatcatttttacgtatattgtggcttaggggtctgtaaaccgtcgagcaacagtttccactcaggttgatcggcaatactttaattcagaatcaaggtaagattagtataataatatcatatgtgattacatgtttagcgtgcatgtttataaatgtctagtagataacataccagtaatggcaatattagtgagcatagagttacactaaataccaataaatatatgtttggcatagtattgattggcgttatcacatcggtacgagtagagtaccaagtataagctgatattatggtaaatagtaatatcttacaaatattctagacttagtagtggaatgcgggataggattgcaattggatgtatgggcgcctagttataatttggtttatttatgttacaattatgcttttcttactgagtttgttaactcagatatattgttatatgtataggtaaagccaaagctaaggctgaagagtagtgagcacgagcggatgaagattgtacatatcaaggcagttagacctagagtgttcgatcttcgagacaacatgctttattttgatagtcg

SEQ ID NO: 326184 - DNA, 781 bp, Cannabis indica
actctgcccgagggccgcccaaattctgctgctacaggcagacctgttgctaattttggtgtgaccattgccagacacacttctgataaaattatatctgagcataggatgatggcacaaactaagaagactgttaggaaatcttcactgaacaacctacacatcgcccgtttagccactctacccagggcagaacaaacctgtcctaacgaggaagatactgatggggacattaaagtccaagaagtggaggaccagggcgaggtccaccctgctactccttcaaatgctgaaggtgatgaggaagaggggtagcccgagtgctgccctttagcggctacaatgatgaaggaaagccagtatctgaggcaggcaatgttctagaggctggctaggactatgttgttaaggagtatactgaggctcatcctttgagaaggaaaagtccaccagaagatcgatggatttctccaccatccgtggcgaccacgaagaagatgaccaatctgtttgatcgtggtctcttggggattgttgaatgcttccttccctcccctggcaaactggctactgaccctggagaaggttattgtgcttggtcaggagctcacaccaagcagggtgcaatgctacccttgctcccatacttcaagaagattgctaattattaccacatcagtctgaaccaatttactcctaaggacctcaagtatttttttgccctgtttgtactctattcctcacgaggatggggtgagcaatctgttgggaatattttacc

SEQ ID NO: 326185 - DNA, 673 bp, Cannabis indica
agatgtctcgattggattacagaatattattttatctaattgttataaataaaattattttataaaaatatattattttaaaagaaccaaaattttaaattttatagtttaattatcattaaataaaatataactacaataaagtgtaatttgtttttagttaattgtaatcaacatcctaaaatgaaatactttattatttgacttattttccaaaaagttatggaaagcgcggtttatttcgaaatgagttttttacgattaaattcttttaattattatttcacttgtatttaattttccaagctcaaattttgacagtaaaactttctaaactaccgaactgttagtaaatttaagttgttatctatgtttcacagttaactgccaacattgactgttaatgtgtttatattggtacacatagtattattatttaaaaattacaaaaattttacattatttgtatttttttataattttatttaattttaaaatggcttataaaaaaatatttggtctaccaatataaacttgtcaagtgtacaaaaatatacacataagcagttcatagtgacaattaacctgataacaccttaaattttctaacataatttagaagattttaccatcaaaatcttaacttgaaaaattaagtacaagtaaaacaata

SEQ ID NO: 326186 - DNA, 772 bp, Cannabis indica
gtcgacggcgtgggtgggtcggggttgagcatcgacgaagcacggtggggacggggtcgagcttcggttgaaaaaatggtggttgtgaggagtgggtactggggctgccggctgtgcgagaggaagagagaggatgagagggaggggtttgaaatgggaggggtagtttaggaaaattaggaaagttgtcatatagtaccaattttaataactatgtagttagggaaaaattatagggcattttaagcatggaatttcaaatttccctttacaaattaataaatttttcatttatcttcaaaaaaaaaatacactactatttggttttaattaagggtgtgatgtagtggtagaaaaacatttcttttaggctagtcatcttgtttggcaactcgttcaaaatgtcactacaacattttagggctgtggttttaacattagttgtaataaaagttttgagcatttctacatgattatctcaaatgcactgtgcactatctaaagaaagtgttaatttgcagaaaacatgaacaaatgttatatttaccatagtttatgaaattgtacacctatacacaataacattttataattaaaaaaatatatatagtcacttattaatatttaatgacactaatataaataaatatttattgtatattaaatttaataaaatgttatatttaatttgtattaaatttaacacaattttttattgtttgccaaatttaatacatttgtagtatactattagagatttttttttttattt

SEQ ID NO: 326187 - DNA, 1551 bp, Cannabis indica
gattttatgttgttttcgtgttatcttttagaaaaccgtaaaaatagtaaaaaaacattctttgaacgtaaaaatataaatattttacaaaaatggtgtcttatgtaattattccatatttctatttataaaatagaaaaatctcatactaaacaagaaaatgtaaaagattatcatttttattaaaacattatctcataccaaataaaaaataaactttaaaaatacacatatatattttttaagaaaataataaattataaataccattattcttataaatagggctaaaaaaatttatgattaacattctagggaaatttttatggtataagaagagtgcttttgacattcacataattttagtttcaatacattgttatatgaatgtgtataacgtgatcattttaagatattttgtaaattttaagaaattaaaaaaaaaattagcaaaataaatttagcaaaaataaaatttaaacagtttgttgtacactgttacataaaacaaactatgactaaatctggatgtagaaaatacaaaaagggtgcataatacacctctcttttcgggagtgtattgttaaagtaccctaattaatatagatatttttcaatcaagaataatttaattatcattataagttaattaagtatataaatgtagctaatataagctaatgctttagttgagaattgaatttaagaattttatattcatatatgtaataatattatttttcttcgtataatatataggctaattaagatttttatctcccgaattttgatatgtactaaattatactttctaaatttttttagctattaaaaattccccctaaattattgagattgttagatttaagcacttttgtccaatttaagtaaagaaagtctaacctgaccgaagtattagtaaaatttaacgaatggtaaaaactgcctaaatttatcagtaaaatagtggtatgctaaattagctctaattgttcatgtaatgtcgggagcgacggcgggtggtgcctctggtggggctgtttgagactttgggtttgagtgatgttaatatgtttgtagatacaggaattaatgaggagtaagggtgtgtgggacttggggcagtggtgattgcctgggaaggggtggttttgtgctcctcaagttcatcagcgatagatttcttttatcctcatgtggcggaggcaacaactctcttaaataggttattgttgtgttgtcgtttggggtacaataccatcatcactattttcttagatagctttcatcttgttcaaactattaataggaatgataagcgtcaaactgagtttggcattattattcatgatattttacatgtttggcaatctttttgttctattttatctttttcattgtaaaatggctcaaaatattatgactcaggtacaattagcgcttactgtcttgtctataatctttgctttttgaattaatcttttaattttttcgactcggtgccttttaatgaaattttctttagttcaaaaaatagtggtatgttactat

SEQ ID NO: 326188 - DNA, 558 bp, Cannabis indica
tttaaggcataaaatcccaacagctatttcattagtattatagatcattattcaagaaaagtgtgggtgtttattttgaaaagcaaatattcccagatgcaaaattttgaaattgaaaacatacaatagttggaaatattgctcaaactagtttgatgacttttccaaagagcaggaaatagctagacatttaactgtatgagacacacctcagcaaaatggacttcctgggaggatgaatagtactctcataaaaagagtgaggtgaatgctcaaaggagcaagtattgaaagatcattttggggagaagctatcaaaacagtttattatttggtgaatagatatcattttgccctattgaatttcaagtttccaccagagttgtggatagtttaagtacctaagttggaacattgaatagtgtttggatgcactgcctatgctcatattaggtaggacaagatttagctttaagcactaagatgcttgtttctaggctatccagatggtgtgagtgttgggttttatgccctaaatgaaactcatttcaatataat

SEQ ID NO: 326189 - DNA, 507 bp, Cannabis indica
tgtatgttgcgaagccccaaaccgccagtagatttgggtctacatatgtattcccatgccacaagccctggtccagtcccctcttgagtacccttccatagaaaagatctgcaagttgcctcaatgtcattcgagagtttcttgggcaagataaaaagctgagcccaatatgtatgtatagccaacaaaaccgaatttatcaaggtaactctgcccatgtaagatagattttttgaactccaacacctgattctgctagtcatcttctctagtaaacattgacattctgctctagaaattttccttgagcaaatcggcacacccaggtaacgaaatggcaaggaacttctcttgaaatttgatgcttccaggaccctattaacttcaaaatcagccattcccgagcagtatatagctgttttctggtcatttggcattaatcccgatgtagatgagagtaattttaggcctttaagcaaaagcattatggatatgaagtcaccattg

SEQ ID NO: 326190 - DNA, 919 bp, Cannabis indica
caccaaaaactaacaataatgaagagaataaaaaataaagatcggtttgaacgggttaacccgaccaaactgacgaaaatcattgggtgggttacacttgttttattttttcattggacgggttacaattagatatttataacccgaaatttatattgggttgataaaaatacactataacccgaccaaactgaccgatgtacacccctaatacaaccatctcattgacctagcagggaacctccgggtagaaacatacctggcagatctacataaggggaacattcatgagttggccaaaatgtcctctgcagaatatggccggatacttaacctgtcgaccagataaaatgggagccaagtattaagggatctgaccggatgaccaacatgccgatcagatctagcattgccagggatgctgaacagagatatgcaatccttgattttgcccttagcaagcttccaaaaatatcaacaactaaaccctacgaactcggaaccaacaaatctatccgagaaaataggagctttatcatatcataagtgtatcctaaaaaatagggatgtttactattctgtttactccttttatagagccatatgtaacaactctccccctataaatagtgagagcattcacaaggggaggggaccgaaaaatagagagagagctatactcatacttacgcatctgagaacactttgctgagagatatatgtaaacacttcgagagacatagctagaaaccaccttgtcttccttggtgatttgcccaatattatctcacaagtaatacaactaaagaggagtaggtcattacccatcactactacaaaaatagttttttctgacgtttttaaacagtcgtttaaagtattcccgtcggtttctataacagtcgcctatacgaccgtc

SEQ ID NO: 326191 - DNA, 590 bp, Cannabis indica
gagtatgggaccgaaaaatcacatcaaactttgcatgtttatataaataaaggtaagaaaatagaaagaaataatatttattctaccatacaatacacacaaaattactcaattatatttaagcttctttactatataatgtcaatctttaattatttcaaaacttgtgtatcagagaagtaaatctaaaattgctggggtcacatacagaaaatggataaacatatagatatatatggactatagtcctactcttcacagtgatctacttatggttaaaataattaagaaatgacatctcacaaatttgacatgacaaccaaatttataacaataaaaagaaagaaaaaaaaaatcttagatttcatggttgatataatatatgttagaaaatttgattttgtgtatcttgggattatccactatatctttatgtttgtatcaaattaataataaagttgttccttacatatatatattttaaccaatggtcattcacaaacacaaaaataaataaatgataaaaaagacaatcatttgatagtataattaacatggaaagttgatctctctttttgtgttgtggtagg

SEQ ID NO: 326192 - DNA, 1028 bp, Cannabis indica
agggtttaattatgaaaattattatggatatttaaataattatttatgttaatttatttgaattcagaatgcatttttatgtcatatagtgaaattttataattttgtattttcggtgcccggcaacatggaacgcggtgtatggctcagtagaatcacaatttagtattttagtatagtgggacggtttatttaggcattgggaatgtcgggattagtcgggaatttaaagtttcccaaaatacccttaagtactttttaacccttttagtgttggaagggcaaaatagttattttgcctttatgagttttgtcttttgtggattttattaaagatgattaatatgatttttagttaagtggtatgttgattttttagtaaagaaaaatcatttactttctcatttttattgaaaaataaaaaattagacaaaaagtttgcatttctctctctcaagtgctccctctctttcgaaccctcaaaaccagccgggattgctgggtgttttctccattttcttgttgattcaagcagattttaagggaaatttaagctctaggtatagctcttgctctctctctttagtttttgtaatttaaggaagaaaattttgcatgcatggtgattttgctatggtggttgctgtagttgtttgttgttgcattcagaagcttatttatgtttaattgaatggattagaactggttttgttgttagttgttggttttatccatgtgtgaggctttaaatcaaaactttggattttaatggtgaaatggcgtttttgctactgtgatcattgtgtatgtttgagtttggtttctggatgttttatatgttgttttaggttgattttaggtagttgtgatggctggttatggtgttagccaagctttgagctttgaagctcaaacttggagctcacatggtggtttttgtttctgtgcatgctgggttattttgttgcttttgaaatattatttggggtatttggagcaggtctagagagttttaggtggtttggggt

SEQ ID NO: 326193 - DNA, 730 bp, Cannabis indica
cttatttctttcagagaaaaactgagcctcctagccgccaccctcttcttctctttacccaatgtaaggtttcctaaactttatatgtgtttatttcattgttttagaattcatattaggatgttaatgaaacatacatggtattaaatctagatcctggtaaaatatatccaacagtccactaaatgacaaaaccaaaatagggcaaaaacaccaaaatgcccttggcgacactaaataatcataaaacaacttaagggtatttttgtgcactctaaaatctcgactattcccgacattcccaatgtctaactatactaccatactatactaaaatactaggatgtgattctaatagctaaacaccgcgttccaatgttaccgggcataaaacatgccaaattatgaaattctatatacgacatataaaatgcattctgaattcaaataaatcatcataattaaataattcaaaacaaataaacaagtttcataattaagccctagttatctgctaatttctaaattaaaggtaagcggtctttacatgaacaatcaaagaaagctaagattaaagaacctccaatatgtttttagaagaagacacaaatcacgtgaggtacccacatgttgacccactcgtgattacaatctagctctccaagaaaaggataaaaagggtgttggtggataatggaagttcagtgaatatcctttacaaggaaacact

SEQ ID NO: 326194 - DNA, 590 bp, Cannabis indica
aagttaaataatgatatagattataaatgattattcttttcgatggaaataacgcttgatcctaaataattatttaacaaattgtattattccttttgtcttcttttaccaaccgttccatttgaatattttcattttcatcaataagtagccaatgagatcataattccaagcaacgctcatacatatggtattatatttgttggaattttaataaaatcaattaagagaaaaatcaaaatgttaagtgttttttttgaacaaaaagatggtagattcaattgcaaagttaaataatgatatagattaaaataattttaaataattatttttttcgatagaaacaacagcttgatcctaaataattatataacaaattgtattattcattttgtcttcttttaccagttccatttggatattttcatttcagttaactaagatttttttctcctaaattttgacatctatcaaattatgcccccgaattttaagatcgttaaaaatgctccctaaactattaagattgttgaatttaagaatttttgtctaattttagttaaaaaaattctaacatagatcaaagttta

SEQ ID NO: 326195 - DNA, 765 bp, Cannabis indica
aaaattttgagaaattcagaataatttacaatatagaaaacaatgttcaaagagtctattttacacacgtataaaataaaatagtcacgagtgcaacacactgtttgaacgtatttttcggcgtgctaaacttttccaaatttcttaaaattttgcaggatatcttaaataactataacgtacatgactatgaaaaaaaaatttgactaaaaaattatttcgggtgctaaaacatacatcaatctatctattttaagggggtgcatattgtagaattttctaataatattaatacttttatgtatatttataaaagtaattaatctaccataaccataaaatttaacaaagatgtgtagaagaagtaagtgaagatacaacatttattaaaataataaaaaatttgacattttttcacgttaaaattacaagtctctaaaatttattacaaatatatatattttaattaaaaaggtcactttcccatgcaaaaccatgaaattcaaaacctaactgaaattcggcgccgatcccgggagttacttaacactttcacttttttgcattaaatgccccatctctaattttctttacttttatacccttctcctcttcttttcttctttattttcagacacatttattaccccaaaaaatattaataatagaaggttaaaatcagaagaaagaacacgcctaacccagctgtagctaaacatagatatatcacatagatatatagatacatatatatatatagagaga

SEQ ID NO: 326196 - DNA, 991 bp, Cannabis indica
tttagaaaatagtgtattcttggaagatcaaaaccttctctgcaatctccaacaatggcttcaggttagtgcttccgctcatattttatcatcttcttcttctttaatttagcaaaggctttatagatttatgatttagggttttctatattaaagcacttttaggaatatgtttagatctgtgatttatatatttcttaagtgttttataaaccctaacaatcgcacactccacattccgattattctccttggcaacgccaccgtaagagctgaccggcaccgccgctggatccactcctttccgagaagaaacgttagttgtgtcggtggaggaggaggggacggggttaggtcggcagagatagaagcagaagaagatgactgagactaaagctgtggagagaacgaggatcaccagtaccatcgatgaatccatggttaccaaatgaggcggcggtggcggtggcgctggtggttgtgattcggtgacgaaaggtgcatcgtcgtttactgggtatagctttcgattattaatggtttggtgtttatttttaagcattgagaaattttgattgaattttggtcaagtgagttctttagtgtttatccacttctctctctctctctctttaattttttattttcaaataaaatttttgtataacatcaacctcttttcttcatcatcgtcatcatcttcaagtagaaaggtttgtttgttggtaataaagtttgtgactctctagtcaacaaactatctgtctaaatatcatcgaaaaacgacatctcttttcataaaacgcagtaggttgttaaaacgacactcattataatgtgtgtttggtgaaaatagaatgcaccctttaaagaagtggatcaatgcaacctttacaataatttaccatatagaaataaatgttataactgtgttaactttttttaaaattttatattatattttaaataattataatataaaaataaatat

SEQ ID NO: 326197 - DNA, 937 bp, Cannabis indica
attgtaatggattttatttagggcacaaaacccaacacctgctccttgtgaaatcacttggccacgctctttgtgaagtcactcggcatgcaccttgacaaagtcactcgatgtgcacgttgacaaagttactcggcatgaccttaagaaagtcactcagcatgaaccttgaaaaagtcacccagcatgcacattgaaaaagtcattcaacatgcaccttaacaaagccactcagcatgcacctttacaaagtcactcagaatgcaccttgacaaagtcactcggcatgcaacatgataaagtcactcgacattcgccataaaaaagtaactcggcatgcaccatgacaaagtcaatcggcatgtaccatgaaaaagtcaatcgacatgcaccatgacaaagtcactcggcatgcatctctctcacacacttgacatgcacatctcaagagctcactcgacatgcatcatgcacaactcactcggcatgcatttcatgcataccactcggcctacaacttccacaatgacgttgctatacttagtgaaatttttataaatgtgtgaaattaaggtagcaagagtatggccacaaccacaccgtctacaagctctaaaagtaagggggtacgagtagtggaggcaccaaacttgcaaggcgtgacagccaacgaagggtacacgaccttcaccactcctacaactccgaaccacctaacaccagagaaaggtacaaggtgtaagaaaacttcctaccaccagcattttgcagaccatgtgtaacgccctaaataattaggcacgctacccaaattacttacgaaaccctaatcccgtaaacgggattactaatcaaaattagcgtagaatttaaactttaatgacaataagaatgaaaataaacttgtaataatttaaagtttataaactaaaagtta

SEQ ID NO: 326198 - DNA, 1512 bp, Cannabis indica
tagcgacggtttcccaaaaaaaaagtgtttttaaaatcgtcgggaatactcttttttgtagtagtgccacttattggcgaccaaaagttgtttgttcacctcgcccagcttcgccctcgtgtactcagcctcctttttggttgcatccacctccttctgcaagttgttggtggtggttatggttcctaaggccatggacttagctcaggagtaagtgtaggccatcttcaagttgagctggacaaagaaaggtcaaaacctgcacgggcaaaagaatgagataaaaaccaaaggaaaagtacttactcgggttacctcctttaggagcccgcccatcagtagctccacggacatctcatctcctccgaccagctactcatttacctcggagagtaaccgatcctagtaaaattagagcatctctttgcccttcctggtctcagggttcagcacaacagtagaacctgaagacttgggcggtccggatctgttcgtgctccccccttggcacttttagactttgagctcttcttagctagtggaagatccacctcagacactgcctcctcaaaaatctctattggagacttagtgaaactcttctccttgggcggaactccctccacccttggccatttaactggagatatctggtcagagccatctcctgacctcttcttcaaggcttgaagtacctacttagacatagctgcatatgaacaaaataagaaggttaaaaacgaatacaatttaagtaaatgcaaatggaatttaaatggaagttaaagtatcctgcacgtaggcaggagaattttcccgaacaagtagagaatgtgcatcatcatcatctgaggaatcctcctattcctgctccacaaggatgacctttccctttccagccattggggcagatggcctagaaactctttctaggttttctttaatcctaatagatcgctcaacaggtacttggctttttggaggggcctccctcttcttcttcttcttcttgctcagagcctcctgttcggacacaatctcttctaatgccggaacctttggcacgaaattaaatggaaacagtttgtacatgacaaaattagcctcggtggccaagagagaaatgttctgttcagtagaagaaagttgaagaatcttctaagccctctttctaagttccagtatgaacggggggagtagtaagacaaaatttgctgaaagctagtgtggcggtgtccatccctttaacaaaatagtactcgtcaacaaagcctcctatctttgtcacctttgtggctgtcgtgcccgtcaaccataatgtaagaaccagtattatgtccagttgcatttgggattcgtagtgttttgtctggagttcatacttaagtgttagtccacgtcatcaaaaatattttgggttttaattatttagatggtaacaactgtctatttcgagtttcttggtcttgctaggtataaatacaacttctgggtattatgttgaggaacctt

SEQ ID NO: 326199 - DNA, 889 bp, Cannabis indica
agagatttcttaatagctaagaaatgataagataactattatcagtaaagtttttattaataatatattaacattattcttaatattattaatattttgatattttattaatatatatattaagtttaaaagaaaacaatacggacaaaatgaaatcttcttctgttctctgtgcgacaaaactctcatcctcctctgctcattttccttaactttcaacccataacctagagacttaagctccgataatagcgagataataaatcattgaagagggaaagcttaaggcaaggattggttttgttttaaatttaaaacgattggttttatatagtgactttgaatttagagtaagattaatttgctagagaggttatacagttttagaatgatttcttccctttccttaaatgagaatattgattgatttaatgagattattgtaggattaacaaatacatatcacaaagttgatcaagaaagtcaggccataattttgctgagatagcttccaatcccatatcaagaagtcaaggctgttatcaagtatggcagagacatgattgcattgaaggatgttgtaatatcccaataagtttaatggtaaataattagggtttatatttatattatgagttaatcaggtaataagtgggattatgatcctactaatttatttcaacataaaatttaaattttgctataagtgagtaaataatcgtaatttgttaattacggagatttatatagcatgtgtgaatgtaatatgagctatatgtggaataaaaatattttcaggttcgggaccctggagactcaataagtggatatataagcgtaatttgttaattacggggatttatttgaaatacgtggatataatatgagt

SEQ ID NO: 326200 - DNA, 886 bp, Cannabis indica
ccttaaaggtttaggaggcataatttaatacatgtcaaagttcgggggaagaaattcctaattagcctttattgtatctaaatatacttagtaagaaaatttttgtgacgttacttatgtaagtataactatagaaggttatgtgaaactaaaagcgaagtgatgatgaaatattcatctttagggacaatagagaaacaaatacaattaaggatattcaagttatgattaaagactagttattttttgaatttaaaaaaaatgcttatacagtatcatcacctggatgacatttggtcttagttctatttgaataaattaagtcattattattcatttagaatttcaaaatatataatcttttctaatattccaatattgtttctattagtttcttatttataaatttattgaaatttttgtcacatgaggaaaccttattaattttttgtacggtacaaaataaaaataaattatgagaattctatcatactttgatgtaaatgttaagatcatatctcccaaaagagaatgcaatgaattatttttgatagaattcttgacctttgatttaataaattttagattttacaaaggagtaacaaacaaatataaataaataaggtgattaaagagaatttcattgtcttagaatttatgtataatatattttagtggatcttctcctatagtttcatggaatgatcaacatgattttattgtattcaaagatgactaatgaaacacatattttattcataagggtatcaatctttagacattgtttctgttaaatttttaaaacaacagttgccaaattaactaggcaaaaaaattaaattcgtctaaactaactatggtggttaatgttaaaaatattttacca

SEQ ID NO: 326201 - DNA, 1788 bp, Cannabis indica
ggtggtttggatgtacagtttctttttatagttgtgcagatcgaagccaaacctcaaatctcatggcaggaattacaaaacactctcatcggtttcgatagcaggcttgagagactcacgggtctttccaactcaaacaagatgaatggctctgttggaggaccctctgccaactatgcgtagaaacctccacacaataacactcctcggttctctaactctcagcaacaaggtggcagaggaaactcctctcattcaggaacaagaggaagagggagttacagaggacgaggaagaggaggccgttttggaggaggacctaaaccgacatgccaggtgtgtggaaaatacgggcattcagcagccatctgctacaatcggtatgatgaaagtttgatgggacagcagccttctgcaccagctgatcaaggtcaagataagcagtttaatgctctcatagcgacaccacaaaccttgaattatgagagttggtacgctgacagtggtgccagcaaccacctcacaccagatgaagggcaaatgagttctaaaacagcctatggtggtaaggaaaagatcactgtaggtgatggtaatcaacttgacatctctcatgttggtactggtttattaaatactgatgtgtctaaaccccttgttctaaaagatatgctacttgttccttcaatttctaaaaatcttatcagtgtgtcaaagcttacaatggataataatgtgtcaattgaatttttccctactgtttgttgtgtgaaggatcatgtgacaaagaaggtggttcttcaaggagtgcttaaagatggcttgtaccaactaaacacttccactgttcccaaaaccagtcgtgcaagaagtaaaaccagtcactgccctctttactctttttctgctacttccaatatcgagtccaataaaaccagtaagcctacttctatgtcagatctctggcatagaagacttggccacccctctagtgttgttttgagtcaagtcttgaagtctactaatgtaaaatcatctatgaagaaagtattttgttttgtgatgcttgtcaatttggaaagtcacatgctctaccccttaaaaattctaactctagagcttcttctgtgttagatcttatacacactgatttgtgggggcctgccccaatcgcatctcacactaacttcaagttttatattcattttatagatgattatagtagatacacatggctttacccattaaaatacaaatctgatgctctggctgctttcaaacatttcaaaaatatggtattaatttgtaaagaaaatcaaagccataagaactgattggggtggtgagtatgaagcctttgtcgatttagtgactgaaaatggaattgtttttcagcattcttgtcctcacagttcgactcaaaatggtcgagccgaaagaaaacacaggcacatagttgaaatgggtctaaccctccttgcacaagcacatatgccattaaaatattggtctgatgctttctatactgctgtctatttaattaataggttaccaacctcagttctgtcagggcagtcaccacatgaagtcctatttgctaaagtccttgactataactttcttaaggtgtttggcgagcatgttttcctatgtcttcgaacttatcaaacacacaagtttgagtttcactcagtcaagtgtgtgaacctaggctatagtgaaacttacaaagggtataagtgcttgagtcctcatggtagaatttacatctctaggcatgttgtgttc

SEQ ID NO: 326202 - DNA, 817 bp, Cannabis indica
agatccctatctgatacgatggattttgaagcaccatgtaaccttactattctcttataaagttctgcatattaacctactatgtatgttgttttattggtagaaaatatgttaatttggtaaaccaatccacaactatccatatggaatccaacatacccgtggttctaggtagtctaactaaaaaatctatggtggcatccttccatttccacttgggaagagtcaatggttgaaacaaccctacaggtcttttatgttcagccttgatctgttgacaagtcagacatcgagatatgtactccaccacatcttttttcatactgcactaccaacaataggttttaaattttgatacattttagtggtatgatgatgtaatgaatagggtgtagtatgagcttcatcaaaatattttctaagctccacactaatagggacataaactcgggttttgtaaagtagtgttccattacttacactgtgaaatccttagcttgaccagctagaacttcttctcgggtttttatcaactttgaatccactaacggagctattctaattctttccaacaagtccaattataacatcaaatgattgagtttaccaattaccaactcaatatttgatttgaccatgtatttgccaattgaggtgaaatcataatcatgttggatacctatctgggacccttcctactcaggatcactacattggctttcccaagatggttaagaatttcataattataatttttaaccagctccaaccaccacccctgtctcatattcaaatctttatgagtaaagaaatattt

SEQ ID NO: 326203 - DNA, 1340 bp, Cannabis indica
aaaattcttaaacgcgtgaccttcagttccttggtgagtcttaatccagctagcatcgcttcatactcgaccttaaaaccaaaccttatttcacaatgcattcagattcccccaagtgttgtcattataaccccagcccctgccccactatccttcgaggctccgtccacatgcaattcccaaatgaactcttctttagcttcactctttgactcttcaccaacctcatgcccttggtcctcaccgtctgggcgataggtaaattctgctacaaaatctgccatcacttgcctgttgatagacactctcggggtgtaggatatgttgaattgacttaaatctatagaccatttaagaaagtgtcgcgaggttttgggcttgtgctgtacttgtctcaaagggtggttagtcaacaccacaatcgcatgtgcgtgaaagtatggcttcaatcttcgcgatgccacaataagagcgtaagccaacttcttaatttctgggtaacgagtttcagtatccacaaaacgcttactaatgtagtacataggttgttgtttcttcccttcccctcttacgaggtcgacacttagagcgtgttcagaaattgtcaaatatacgtacagcttctcgcccttttccagtttagccaacaaaggtggatttcccagatgttctttcaaacttgcaaaagccttttcacaatcttcccccaagtaaattgtttattccccttgagggtatcgaagaatgggagacacttatcggtggacctcgatataaacctactcaaggttgcagccgtcccagttagacactgcacctctttcctattcttgggtgactccatgtctaccaatgcctttattttttctgggtttgcttctatgcctctctcgttgaccatgaatcctaagaattttttagaggacacaccaaatacgcacttcaacggattcaacttcatttgatacttgcggagggtggcaaacattttgcccagatcctgaattagagcctttgccttcttggtctttattaacatctcgtcgacatatacctccatgttgcagccaatttggttagcaaacatcttatttacaagtccctggtacgtcgccccagcattctttagtccgaaaggcatgacccggtaacaatacaagcctcgatccgtaatgaatgaggtgtgtgttgggctttgtgccgtaaataaaacccatttcaatataatcaaatttacaaattaataaagatcagaaatcgcttttatgttgcatggttcacatgatttatctcatgattatatttaatgaataaattctattaactccagaacatatgta

SEQ ID NO: 326204 - DNA, 508 bp, Cannabis indica
aaaaaatagattttataaaaacaaaagaaaattgtttgactgtaaaaattttaatattttgccataataccaaagagcattgttataacttataagccattagtagtgcctagcaccacttaaagttgacacattatgattaattatcaatattttataaaaattatatataagtaccaatacttaattatactaatagtgatactagataccattaatgtcttttagcatttctcaaaaatcttttttttttttaaagaaagaaaaaaagtaactatttagtacttagtttaaccccaatcataattgaaattttgtattttttccttcctttttattaaaagtgtgtattgtttttttttctttagaaatttttctttagaaaaattaattttgtattactttttacccaatattcaattatacactcagactcttaaaatctgactcattttctcattgagcaaaatttacgaaataaatcagattgatttttttgataaaaaaa

SEQ ID NO: 326205 - DNA, 827 bp, Cannabis indica
acggccaaaaaagttcagggggcacgaattaatacatgtcaaagttcgggggaaaaattattaattagcctaataataataataaggaagttctacgttaggataatctctcctttgttgttattattatgattttcttttaggcacgtaaatttcttataatatcaatttttgttagtacagactctgttattgtcttaaatataacacatataaagcttaaattcttgattattgggtctagatagaaaaatgtagtattagttactttcaaatgttcttttaataaattcaaaacagagtctatactgacgaaactggaagaaaattacagttttacaaacattaggtacttatgccgctaaaaataaacattgagtttatggcgcttacaaatataaaactttgaatacttatgccgctatttaccctaattaatttttttttaaaaaaaaagtacagaaaaagggcacgtgaactgtgcacgtgacatgagggtgtggggttcacaagttggagttacgaatatgaattcttaaccaaacgcgtcgccattatttgtgtggccaatgcaggtgcagttggtcatgactatgagataacattttcattattattattattatttaaattataataattcgtgcttcaaatgacgaaaatgccctttatggaaagatggtcctttcctttcagaataaaccaagcacaaagatggcatattacaactttacattttttttcagtttttagcatacaatatttttgtttttattgggaacgagtagtgtttattttagaaaaaattataaaaaaaatttataatt

SEQ ID NO: 326206 - DNA, 1162 bp, Cannabis indica
aatcaaattatacacaacaccttcagtatatgtttatctacacatgtgatccgaatcaaaatcacacacactagggtaacgaccctattccacaatgtatattcttaaggtaataaccctagttcataataaacatgtttaggataataatcctaattcacaatacacatacttagggtggtaaccctaactcacaatatataaaacttagggtaataaccatgactcatgctttcatataattaatcacatttaactgtgtcaccacgctatactctatgtgcataattcactatctcacttgatttccaacgtatgaggggaaatctcaatccataggtgatcttgaccaagcatcggtattcgtagtcaaaattctaaggtttcacataatagggttaatcccaaatctcatctaaaaaatattcacatttatggctccaactatggaccaaataatagagcccaaaataagctttccaacgatataaaaaatgtccaaatcgaagttcagagtcaaaaattatgctcaaaataaaacaacaaaaattgaactgtcactgccttcttgcctcgaccatttatcatcacaaccagatataggctcgccatgaccagattaggcaggggccaacccctattctgggttcgagcctcgttgtgacgactgggcttaaaactcaaaaaatgtcatttttccagattttcatcatataacaattcataataaaacctaccatatcacaataattgtttttcatgccaaataaagtattttcaagcatcactaatctccaattaacatgcttaaagtcacacataaatctcaaagctccaattacaaaaatccatgcttttaaacttaaaataaccacaagatgattttcatgctcaaaatacccagctttcaaactaaaattatcaaagataactaagaaaatcacaacacataccaagaatctgacctaaaattcagattcaagcacaaacaataataatctaccatttcttagcttttaagcacatgaatactaacaatacccgatcaagatcataacacaaaaacaccatgcactttaaacacaaccaacaaattccataattcaaaacactaaggtggcgtttggttggaggtaatgaaatggaatggaatggaaaggaa

SEQ ID NO: 326207 - DNA, 548 bp, Cannabis indica
aaaaatattcagagctaaactcagaattcaaacacaaatcacaaccctaaaatcccctaaaatcatgctagaagcaattcaaaccatcctactagcacaatccttcaacaaaacatcaacaatcacatggttttcaaacacatgcaatcaaaagctaagaattaaccaagaactagcttccatgacttcaccaaatcagaattccttttttttttttttgaagagatttaagggttaccaagattcacaagctttcaattatgctaatccacacaaagttacaaattaattttatttgagaatttttgaagagaaagtgaaggaaagaggggggaggggggcgagcggtcaaggctaagtataaccagaaaatgagtttcaaatttctcaaaaattgcattttgttgaaaatgtcttagttggtcaaatgaccaaaatgcccttagggccaataaaactacatatgcacacatcaaaggcaaaattatcataaatcatacacacaatatttttcagattattcctttatcaaataaatgccaaaataa

SEQ ID NO: 326208 - DNA, 1095 bp, Cannabis indica
tggtaaaataattccaacattgacaagtaagtattggatactacaaatttaatttatgctgatcaagagaaaatgaagactcaaaaatacaagaatttcaatctatactctattgaagaagcaaaacaagaagaagttactaattcttcatcttaaattataaattatataaaacttatatgttatgaattagaataacacaatctaacgtagtatttttaaataattaaaaaatttatctaaaaaaagaacataaaatttatggaatatgtaaaataatattatatgaaaatatataataagacacaacgtgccttgcacgtagttccacctagtaacggtataaatacatacaacttttgttataaatacatataatgaatagtgaggagtcgaggccaattatgtagagaaaacaaattttattttattaggatttcttcttcttaaatttttttagcgatctcttattttctaaaaaaaaaatgcttcttagcaatctctgttatctttgccattctctttctatctttccccctggtttcaacactttcataatggaaaaaatactacctctccatttatttgattcattaacttcattatctattctttgataagaattattgctttatgcaattttattcatggggctcttttctctttttatttttttatggtgaaaagaggctctttttctttaaatacttcttatttgatttgagtcagttatatgttactgataaccacgattgtcttttctgaaagggtgtctcatttgtgaataatgggtttgtttgtaaatggaatggaagtttaactctacttgaatgggtgtgtctgttaaatttaaattttaaatggtacaatctgataaatatacaataatatattaagtctacgagaaaatttgttaaatagacatttatatgttaatttagatatactggtggtgttcgattgggaggaatgaaaacatagaaatatgaatgtgaataggaataggaataggaatagaatggaataaaattaaaatgcataaaaaaatttgataaaaaaattattaaattttttctcatcatacattggaatggt

SEQ ID NO: 326209 - DNA, 794 bp, Cannabis indica
gggtatttataatttggcccctcaataaattataaattaacttatggtatctacacattaattccatgacactttaatacccttttgatacccataacataattggtcacttaattttgtatcacactttataatagcatatacattatacatatgtgcccacataggattttaatccaacatagggcactttgattgtcacaaaagatgtttatactttctgatttgaaaccaacttcttgtgtcgaaccctttaaccaaagagcttccttgaatgcttcagttgctatcatgtactcagcttaagtagttgagagggcaactactttttacatattagacttccaactcattgtgtttccagccacacagaacactaaacaagtgagtcactttctggtgtctatgtttgctacataatcactgtcaacatagccataaattttagcttgtttacttgatcttcttccatagactaaccctaaatctgttgtcccttagacatatcttagaacccatttgagggctttccaatgaccttctccaagatcagtcatgtacctaataaccacacttagagaatgtgctagatcaggtctagtacataccatagaatacattagggtgccttctatgtcagtataaggtacaattgacctcgctttttagccaacaacggtgagtcttaattaaagcaatgagaataattaaataacagaaagaaaaataaagtaaagtaaagaaaacaccaattttatagaggttcgaccccttatagttggtaatagcctact

SEQ ID NO: 326210 - DNA, 1063 bp, Cannabis indica
tggtaatccttactagcttttcactcgcaaggtgacgagagtaattcattaagatagttcttaatgttatttttgttctttattttcttgttactttgagttgtagtatactatcttcatttcctacctttcttatttacttttattttaagtatttgtattattatttacagtcaatatgttggtacttgtaattttatgttatatattgagctgggattgttaatttcattccattcgacattttgtattgtattacaatagagctgtaatattttgattttcttctattgtaataaaatctctaacagaaattacttggtttatgggccgtatcaggcctaccttataaaattatcggcacatcacagcccgatactacacgacacgatccatattttttataattcggcacaacatggctcgtattttagaaagccagtaatatgtatgtgtcaaacgtggattcattatacaccatacaatatacttatcttcttcttacaagatccaaaaatatgtgtgagaggtgtattcattatacaccatacaatacttaatttcttcatgcaagatccaaaaatatctgtcacacgtgtattcgttatacatccatagaatacttaatttcaccaacaccacaccataccaccttctttccacacttattaagagatgtgaggttaagagctttgagttttttttttttaatagtaaattttattgaaagaaaactacactaaactaatgaccacaaagggggccacttcccttaacacccttacaattagcaaatgatactctagcccaagaagctaaggcatcagcaaccgattcttagctctaggaatatgagctacaacatctttttgaaattccttacacagcttaagacactgagaaaataaaggaaaaacactccaactaagaggtactgcactagcctggaatgcaagcatagcagccatagggtccgtttcgattttaacctttcttactcccgaatctctagtcagtagtcccgtgattcgtaaggagaaataccgggtaagttgtgcaatcc

SEQ ID NO: 326211 - DNA, 954 bp, Cannabis indica
gcgaacttatgatattaatgatgactacaagtgatacgatgatgacatcaattttaaatatagtagtgaatacaagtgaaatccagaaataataattgtttagaaattatataatgcgttttctatagatttattatcttctttttgttttagatctctatttttgtgtgagaattgtttaatttcaaaatttttttatagtacatttgaagatatttctttgtattttttttatataagaaattgtataataattttttttagaattctttagatttctctatataaatttattatcttttaaaacaaatatttttacaaaaaaataatcactaaacaaatacaaccgcacgcgaagcgcaacctgttgactagttttttatatggatcaattaaattgtgtcatgtgtacattgtttccacgtatatatacacgtggacagtccaacatggcacttaacacttaaaatagatagaattgttaaattgctaacataatacaagtattgagggttttaccgccaaaaattgaatttttggggttaagtgtaagtaaaatgaaaatattagaggttttgccgcaattaatccatgaaaaattaatgggtgagcatttaacccgttgggctgaccaaaccggccgatccaactcgaatttgggccgaaacaaccttatttttcttgggcataaattaaatgggtcaaaagtttcttaacccgtgttacttgggttggtaataggctgtatacaatgtaacccaaacaactcaacccgggccggcccaataaggtttttagaaaaataaatctgaaattccgtattttaatattcccagtttgattatttaattaaatgattaattaaatgcggaataataaaactggtactgaaaacagttttcagtagttacagaatgcaactctgtaactccagagaaacccagaaaaacaaac

SEQ ID NO: 326212 - DNA, 767 bp, Cannabis indica
atttataaccagaaagtttatgttttgtattctttcatttcataagtgtaccttttgaattaatttttctttgataaagaaaaatttaaaattataacgatttacattttaagcattcgaatttacttttgcaattaaggtgtttacttttttaaggttattagtttacttatttaaggagatgatgaatcatgataaaaataaaatgttttaattaattttgaatgtttgtgaagaataatagaagacctacaagcttataattttgaatagtaaattgttgacctctaaaaaaatacttaatataatattttagagtcattagtgttatgtcgaaagtttctcaaggggagctccatgcacctgtctctctctgtgtgcccgcgcccctctgcgcactcgtgccccttcgcgctctcgcgcccctctgcgcgctttcacttgcgccctccgaacgcctacgcttccctccgtgcgtgtgcgcgccccgctctgcccgtgtttggcctcctgcaccccgttgatcttatttgcagtcctgaccccaacagtgtaagtaaggagtatttgacgagataatgacagcacaatgagcaacgataatggaggcaaagttcatttcatccatgatacaaaattacaggggtatttttagtataacttagaaagttaggtatatcaaaccacctaagacacaatattatcaggtgtgaaagtgacttcacatcatatgggttgggatctggttaaattgtaaagtgtcaagg

SEQ ID NO: 326213 - DNA, 1265 bp, Cannabis indica
tgatcttcaatcaatttctcaggtcctaatataaaagcatacagcttctgcttcaagaaaaacttgtttgccagagacgttttcatgtaaaaatgctcaagtttcttccataaactcgcatcattcttctccttgatacctttctctaagtcttcatccccaagacatagaatgattgcattgtgagccttttccaatagttcagacgtctccttctctgccttccccttgatcttgccttcaccttttatggcaccttgtagtccattttgtaccaaaagagcttgcatctttaccctccacaaaccgaagtcgttcttccctgtaaatttttccagattaaactttgcattccttattgtttctaggaccaattatcgagcagctagagatgataaccttcaacttcaatctcaaaaatcatgcatgtagctctgataccaatttgttaagaatagcttgagcttgatccaactcacagctcttattcggataaacaagaaaataaaaagagaagaaagaaaaatgttctttattaaatgtatatcaaaaatttgtacactagtattaattttagcatttacatgattagctatatatataactttaggcatagaactgaaaacaaaagagttgataacaatttgttaacaactctaactaactttgttttgactaacactaactactaactgttttggtacaaattaaaaatggcagagggacacacttattaaatattttttatatatatataaagtgtgactatctaataaaaattattattttaacagatttattatttttttttattaacgttaatagtttaaattgacacaattacatcaattaattaattattagtcttgaaaaaatttattaattattttgtttaaaatatttaaattaaatataactcatatacttatttaaaagtgttattttttcaaaaaagatatggtacatattttttatataagtttaaaacaaattaattgaaattaaatgttatatatttaaaaaatataatagaattaaattaattaaacttattattgttatttaaattaatattttttatttcttctaaaagaaaaaagataagagacaagtaatatttgcgtgataacttgaagaatacatagtttttgtataagttaactaaaattatcagcaaactatattcatttaaattatactcacttttataaggagattgcccaatatactcccacattagcattaaagactgaaaattaagtcct

SEQ ID NO: 326214 - DNA, 1259 bp, Cannabis indica
tgtctcagggatgagttgcaatccaactcaaagcttctttgatgcctatgatctcagcaattttgggttggacatacccaacctttcccttcttgaaagcttctaccatggttccatgatgatctcaagctacacagcccactccaaaccgcccctcttgttcaaataaagccccatcaacattaattttaatcttgtttaacatagatgcaatccaacgctcatagttctaacccccatcattcaaaggagacaacgaaatgcccttccttccttgagcaaatttgtattgatcaagcatgattctagctgatgttacaatatttgaagcaagctaactcttgttttgccaaacaaagtcattccgcgcacgccgaatagcccaactcaccatgaactacagaaaccaaggaaaaaatttcttcagaagaaaccattgagttaagggcaccgaaatcccaacgtggttatcaataacaaaggtatgcttttttattccccttcatctaattaataaacaatctagatatatgactttttttggtaaagatatagattgtaattgtaatatggtagattttaatttcaacatcttgaggttccagtgactactcccaaaaacaatgatattttggtaaaaatataagcatatttgctttgaatcgagtggactggaaaattaagaaaattcatagtattagtatgtatgccgttaatctgttgtgtattatttatgtggttggtgaagtagtagaggttggaaaaggagtcaactattcatagctggtgacaaaatcttattttaaccatgtcgtgagatacctctcatatatatatataaatatatattaaatgttctgcttacaattaatttattctctgaagaacgatgattctaataatttaatatttcacccataaaacaaaggttttttttgaggatgcttatattatatgtcaagactctatacacaactcatttttctaagatgtaggcttattatgggtagaaaaagaataatcaatagagataagatataaaagaattaatgattatattgacaaatctttatgtgctcgtttggaacgtcgtattagctcgtattgtattgtattgtattatattaaattggattatatatcatatttttatataatactatgttaaactttaatttatactaaaacattatatatttgagtgtccataaaagttaataccacatatagttttacataaaaatattgcataaaataca

SEQ ID NO: 326215 - DNA, 842 bp, Cannabis indica
tacataagtaaatttataaaatatatgtatatatttatttaagatttaagtattcttatatagaggtatattttattaatacgggacttaaaaaatgtataactaattacaatatagaggttattcttatttataactggtccaaatcgggacttcatttttttataataaattagaggttattcttgaatagagtattcttgaatagaggttctactgtatttataataatatatatatataatatattacaattttaatcttaaatattatatttatttaataaataataaataaatattatattataaaagagagtatgttctggcttttccacttcaatcgaccctccttctctaccgtcggcagccgccacctcgaacaccacctggtcatcgtcatctttatcaacatcaccgcctgcatctccagttgaaccgtccctatcttctctctcacagtccgacatcacacgattgtccaggttagcctctctcaagttttctccctctatctgttcttcatctccatcttttttcccttctccttcagttacatccccatcgccaaacaccttttcattatcaaagtcttgataccaacatgtattaaaccatccatggaatctgtagcttaaatcgttaagcttgaagagctttagttcataattcctattatcgtggtaaagagataaggtttcaggtatgaaaccaaactcatcatccatcaattggagtcttaagtgagataaaaaagttgcttcagccgtatccttgtccacatccattaaaccaccacacatatctccaattttcctgaaaattctcatatgccaaaggttc

SEQ ID NO: 326216 - DNA, 593 bp, Cannabis indica
attatttttattatataaataattttttaacatatataaatgtaattggattagatcggtttttaattgaattttgagattgacatccaataaccgatccaatccaattagaatctaacttttagcattcaatctaatccaattgtaattggatatccaattttttataattggattggatcgattctgttcaattggattggattggatgatgcccacccctagctgtatgtaatgagttcccctatttctcttccactgtttttctttttctcctataactgatggtagactcttcgcattctcattttagggtttctttatctcacttgttcttcttctctacatttctattcatcttctataatcggcacatcactcttcttattgttattattttttcttctttttcttagtgggttgttgattatttttttttcttattctttgtatggcgtcgacttgttttttcagaggtcatcgataccatttcattttggattgtattgtgattatgtgttgctttaaggtttgttaatagtttaggtggatagttggttttgttgggttttgtgccctaaataaaacttatt

SEQ ID NO: 326217 - DNA, 1265 bp, Cannabis indica
gatattggtattggacttgtcaatcgagttaatccattcataatttttcaaacccatctttattccgaactccctttagtaagtcttagatctaccaactatgttatgatcggagccctactcatgtcgacctcctcaaattgagagaagttgagagaagttattgcaggtgaatctattggggaatcgctaatgaaaaatcaacatcatgggcatcccgcttttctatgttatgaacttggtttttaccaaaaagagactagaaaatctgccaggatgcttggtgtaatccaaaaagaggaagggacccctcttgtgtacccatcttttttatcttagtttatgaactagtcattctttcaagaaaaaactttatgattctattctctaaccacgccaaatcatattcatatcattgttaatttacagatttaattattactttacaagctattcaacaatctgaaaatagaaagtgacaaaacgtaatgaaaggatggtggtgggccaaagtggtctcattctatccaacatatcttaacatatatgaatcagagccgttattttaaatctcatggcttatctgcatcgttcatttctcacttctcaacccttagattcttcgtcatcaaccataacaccatcaataactaataataaaataaataaattaaaaaaagtcatgaacgtcataaacggttcagatttaataaaaaagaaaaaaaaaagttacaaaatacaaagaagtggttattggatcttgaccctacaggctacagattaaacaagattacaaaaccaattttcttgattaaggcaagccaagaacaacatcacacacaaaccaaaagtcattctagtttattacaaaagctccaaaacccccaaacctcgcctgattaaaaaaataacgggtaccgaggaacataccggagctccgaacgagaaccgttacttctcgggtctgttcttcgaatcaaacgctagtctagaagcgatcgccgagtggtacatcacgtcgtgaaacgtggagttctccaaggtcttcctcctgagctgtttcgccttctcttcggtgaaacaacccaaggagaatttggatctaggacgatccgactcagtttcgggatccgagaccgcgttctgttctccggttgaggtgccgatgtactccggatcggagtggtagccgaagagcggggtccaccagttaacggaaccaggcttgcggcgattaggatcgggttttcttgaggacgatgctt

SEQ ID NO: 326218 - DNA, 1409 bp, Cannabis indica
gggcataaaacccaacacaaaaaaattcagggggcacgatttactacttgtcaaagttcagggggaaaaattactaattaacctttgaattaaaattctagaaagtaaaatttgaatatgctctgattgttacaaatataaattaatttaggatgaaagtatctagcttgtttgtatgattttattagttgctttgttaatgatatctttgtgattaaaatttaccataggaatatataaaattttcacataaattaggtttataagtcttaatcagattataaacttttcaactcaacttatctattgaataggaagaagagaaattgagtaattgcactaggaagtaaaataaaagttggttggaaatcatactaatcctttttttttattattgttatttctttaaattttaatcattgtcttgctcatttattttttctctaataatttttattcatcaaatagaattaaagaattaattgattggtaattgataattaatcctcatggaacgatactctatttatcattatattaattgtttcaattacgtatacttacgtattaagtttaccgaacaatttattccatcataatcttatatatatacgtgacatacaaagtaataaactcacttattacatcatcattttattttatttatttattttattaattaattaggatttttgtttctcgaactttgacttgtactaaatcatgcccctgaattaactccctcgaactattaaaattattagatttaaggacttttgtccagtttcgttcaattttactaacaaaaatctgatgtgaattaaagttcaatggatacgatttggtatatgtcaaaatttaaggggcacatttagtacatatcaaagcttcggagttgtgatttggtacaagaacaaccatcacgtaagtaaaattgaacaaaattggacataaatccttaaatttaacaacctcaatagttcagagacatgatttgatacatgtcaaaatttggagtacaaaaaatctaattagcagtaatcatttattcaaaaggataaaaccaatgctttgcttatgccaaagccaacccaaagtaatattttaactagtgactgtctaatcaattttttgttatattattttgagtaatttacggcataaatacctaagtttaacttttagttgcacttaaatacctaagttaattttttggcggcaaaaataccttctgttaacattttagaatttctgtaggtacctcactgtttacagccacataatatgccacatgtcaccttataactgaaccccatcatttaaaaaaaatcacaatcaacaattcattaaaaaaattaccaactcacttaaatattggcacgtcagctgtcatatatatcataaattaa

SEQ ID NO: 326219 - DNA, 1102 bp, Cannabis indica
ttactgttaatgggcttttgtattctctcaaataggctaaaggatatttttgacttttttactctgtggttaataaatatctatatttaccatttgtgttcatttcactttcttcagtcaaacactaaactccttcgtggtactattcaccttctttgtgtgtttttttttgtttcttgagtggatttctaagctttctgttataggaaaaaaagcgtgtcgaaaggtcaaaacatcgtctcttactggtgaagcttaccgtcgataatgaagactataagtcccagttcttcaccaactaggtctgactcatccccatgcacatcaaatctaggtaaggcctcttcatcttctagtttacctaggcattttacacgttctatttctattccatttgcttcagctaaggtaaacctcacctcgcctactgaaccatccatgaaccttactgtgtctgtctcatctcagcctcctaaccctaagtccatgaccaaaaagaaaacactctcatctcaatcccctcactcttctgatcctaagaaagtcaaaacctctcaactagtttccccatccaaccaaacaaatcagcaccacttttttattcaaatgataaattgcttagtttcaggataatgtctgttttcgcccattgtggcctgaatattgtgttaaacttaaatattttccaaaaatttgtgagctgattgaacagcgtgtgtgttcactatctgtcacccatcttcaaccaccaaatgagaacctggtcagggagttttatgctaatcttgatgataacatcttgaataagaaaagcaagtttttgtatcttgcctatatctggggcaataggtttcggttttccccctcaaccattggttgtgtcaaaaaaatcaaaaccattccccatccaattttaaatgatgattacaaaccatcctttaaagaaataggatctgagatcactagcaactcagagtttgtttggaatggaaaggagttacccttcaccgtgctctctgagttttaccgtatccttcacataattgcattgtcaaataggtgggctaattcacacatctccacaatcaactacaatacaacc

SEQ ID NO: 326220 - DNA, 539 bp, Cannabis indica
tttaaaatatttttttttttgcacattttctgtaattatgttattttgttgtacatttataaaaaaagaccaaaaaaaagtatgaggattttaaaatacaaaatcatatatattaaacaaaattagattaaacgaaaattaaaaaaatcatattaaaaaaaacataccaacaacagagagattgctggtcgggggcaatgttaaggacaagcggcggagagaacatcaccgacgagaggcagaatgaggctcgaagctaaggagagaatgggctgaagaggaagaggaagaaaggaagagaggaagagaaatgaatagaaatgaaaggattagattttttttaatacataacattattagtggcggggcccgctgttaatggttctaataatgtaacaattatttttattattttttatgttattagtggcaggccctatcgctaatgtctttgtaacgtccccgctacaagcatccattgggtccttacacccacagaataattgctcttatacacgagtacgccactctggctgctt

SEQ ID NO: 326221 - DNA, 798 bp, Cannabis indica
acttaaataaaaggtgatacttattttttcgtatttttcttcattttttaaattaatattgaaatttagctgtgtaattggatatccaattaaaaaaccgatccaatccagtgagtaattggattggattggattggattttgatgtctaattggattggatcggatgaggggaaaaggttggattggatcgaatgcccacccctagctgcaatgttccattctgcaattttcttcaaaccatccctcctgctgcttttggttgacatacataatcccaggcaattggtccagaaccatgtgtcacatgatggcctttccataagtaagctctgcagatagcttcaatatctctagttgacctcttttgtaacaccatgatctgactccaataagaatgaattgatattaatacaaagttcacaagaatagcccttcctgctaaggatagattccgggagctccatactttgattctggctgtcattttatctgctaaaaccatgcattctttccctgatattcgtttagcacagataggaatacctaaatattttaaaggtgcatctttcttgctaaatcctgagcaatcaacaatgcactatatatcatggtcatccataccacaacaatagaaagctgatttattagggtttgggttcaaactagatgagcttgagaagagctttaacccttgtagcatatagtaattactcttataatctccatgacaaaagagtatggctgttggaatttattttaccaggatcttagatctactcacaagtatgttgtttaa

SEQ ID NO: 326222 - DNA, 1007 bp, Cannabis indica
atgacaagataaccaaatcaaacgttcaaagatgaatagtatactcaaatatttcagccaaatttcattaattccctctaatcattgtatagtattttctctgtaccgaagttagatctatatgcaatcagctttagacattagaaaatcaaaatagattgaaccaattgctgagaattatcatcaaaatagcttaccaattgctccagcgagagcagagcaatcacttgagggagaaatttcaggtatacatctcttccagcaatcttctgcttctgcttctgtaagcaccaaatttcagaaaagaactacatatcacatatgtaccgtaccttagggagagagagagagagggagacaggtaagtgagaatcccggagagagaatataggcggcggtgggtggcggaggggtagggttccgttcgggaaggagaagaagacgattaagtcttgggttttgcaatttgggctaaggattataccgaaaaatgacaattttttggggattatttcacaaatacacaaaaataacaaaaaattataaaatatggttttatagaattttaaatatttttacgatttttacgattttatttacatttttacgatttttacgattttatttacagaaaatacggtcttttaatgtatttttatgttgtacttttgttaatttgttgttatttgtatgttattttttgttgttgttttcttgtttacttgtagttttctagttgtttgggtgttgtatttatagaaaaacgtaaaatgtaaaaaaaagaaatctttgaacatcaaaatataaattttttaaaaaaatagtgtattgtgtaattatgtaatttaaaattgtaaacttttgctaaaaatataatatttttgtaaatacttgtaattgggggtttttataccacattgaaatttcccatttttttttcttttttaatgtggggtaatttttttcttttcaaaaatacagttcaagttttatactgtgtacagtgt

SEQ ID NO: 326223 - DNA, 878 bp, Cannabis indica
ttattacatgtcaaagttcaggggaaaattactaattagccttaaatctagctagctataaacaaattaatatgtatcaagaatgtttaaattatatttatctataactaattaaatgcaactaatgtaatgatctctcttcaaaaactttaccttattaattttttctctaaaactatatgtctagtgtgtggctgaaaaagtcactataagcataaaagtaaagtaaagaggacagagagaaagaagatgtggctatatatataaggaatactttttaatgagtaatacttattgatcgtcactaaaaaaattaataaaagtaattgatatatggattgttgattgaatgttagttgtgataatgacaaaataattttaaatggctaaatttttaaaggataagctaaatgaaataaataaataaacatgtaatggattatatgaaaaccataatttacattgaggtatgatatgtatatattgtatattaggtatttgtttcaaaaatagtagtggttgtttctggtggaagtaatgttattgttgttcacccagaattatggagaggttggatttggatactccttccctcataaatgttcttggtagcgtaacattaaaaatcctaaataaatttaggatcatttaaaacttagcatgtgatgtggtaaaaattatcctactcatatttctaacgtacaatgggatcgatattaaaaatagaaaaagttacataataaattaaaagtccgaaaaaaaaaaacttataaaaatataatcaacacggaaaatatttatttttcttctttgaattttttcatttacaaaatattcaataaaataaataagtcattgtttgtttattttttagttta

SEQ ID NO: 326224 - DNA, 1638 bp, Cannabis indica
ttccaagccaaaataatacccctcgcacgccccacaaccggaaaaataatattatgataaaaatagagatatttaagagtacataccaaacttgtagcttccacttttaattcggaaatgaagatgaaattaggatcacacgaccgaatcagagcttttaattccagaactgtagaggtatgtgacatacatacctacacgcctatacatgtatatatatgttcatatacatgttcatatataagatatattatagagagaattctaactctttttgtcaccaaagtgagattaagagctaatattattctatagtattataatttcatagtcttattcttctaatttcgagagccatcagtgttgagtatatgcctatatgtatgaatgcaatactcaggacagtgtggaagactgtgtcatatcctgaaggagatttaaggttttgttcttgattatactctgcgacagaaatgaaacaagagtgagagaggacataatgaaatgagacattaatttctgctgcaatgactataagattttcttatactctttatatatttatttcaattgttttagaatccatgttaggtgattaattataacatacttgaatagtaaaataaggtcaagattaaatgagctttctagcaactagtgtcaaagtcatggtaattttttattgttcaagtaaactagatttaaaaacaattatgtttgtttttttatgtgtttatgaaatatgaatgttacatgtttattgataatatgccttgatgattgattatattttccgatctttctgtataaaataatgtgaattttgttctaaaattattttatattgaaagattaggaaaaaaaatatgtaagtttgttgttgactcagaaatttagactagacttctaagccacacccgcttgctagattggcgagagtgaaataattgttaagtaataataataaacacaataaatttatagtagttcactccctgtatcgcgataggtatgaagttacgtctacttcaattttttatttctcatgagattgtgtttactgagtttttttggaaactaaatatttagagagaataaaggaaataacaagtattaaataataaaccaacatatttttacgtggttcaagtgttaatgatccttagtccacgagttaatattattagcctcttcgggcagatgttttgatactacaaagtattatagtatgtgaatgttttgtggaagaaaatattgctagggattttagcagggtgacgacaaatgtagagttgttctcccctgccttcgaaagaatgaggctatttataggaaaacatgtgataaagggcataccctttacctatctagggtttcgtcctccacacgctactaaggcctatactgccgaaggacgatctgattatccactaggggggaccttcttcatcgtgcgttgtagagcgactagtgaagacttttgtacgatcttggacacgtgtcgtgcaaaggtcactcctttacaaaatagtctctacataggccatcggacaaaaatcaagctcaagggtgcgtatgtgcactaccatgatctggcacaggggacaagatctgatcctgtgtcaagaaaaaggtata

SEQ ID NO: 326225 - DNA, 1273 bp, Cannabis indica
gttacaagtttaattttcattctgtttcaaataaagtttaaatttcccgcgcttatccttctagtaatctcggattaggtgatcagggtttcttaattagttagcgtagcgttcctaattgttagggccttacagccattctatgcgctagttgatcccacggaggcttcttgcaatggatgccagctactagcccattggcccgtatccttttaaaattgttagcagagatagaagatataggggagatccacctatttccttgtgatcttacatccagaatctcaagctcagaagattgacccaagacatgatccaagccaagcgttgaaggctcatcaagcctattaagtaggttaccatcagtatcataatgaccgaagggacagtttgaaaggacagtataagtcctataccacctcctcctaaccggtgcatcctccttaagatcagactcgacatcatgactctcatcccctgatcaatctgtggatcaacatcagcacggggctgagtagcctcctctacgattttgactcgaccccttgtagctgccctagctacattagggtcacatggaggttctatacagagagtctactttgttctgaccataattacaaaagaaataagggacatgcgcgtccgttacctcccctattcaacacccagtgctacctgcataaaagggataaggggagatgagcgacttaacaaagttccaaacatattctagtcaacagtacccaatggtatctcccgggtcaatcacaaagtacaaggtcatctatcgacctagtaccatcttaagtacacttacttagacacatagtaagtcttaagttatacttttgactataatggactcactactgagccttatacaaagttcccaagaggaaccacgcacaaggctacagttgtatacgcactccaaggctatcgcgagaccctagtcgaggtcaatagaaggagaaattggttgtcccttggagccttggcctttgccggccaaggttccaaaccttagtggtcttccaaacccctgacctagcttagggaccagccaggaaccctaattccaaccataggccagccagcctatggggtacatccccttggctggccggaccccttgatagcctcccttggccggctaggtcttgcacaagacctccttggctggctaggacctgcacggatcaaaacttgtgttttttctttcatgaaactcaaacatgctcttcgtgttctccgtgttctttttgactga

SEQ ID NO: 326226 - DNA, 1007 bp, Cannabis indica
aaaaaaaaaaaaaactggaaataccactatattacccttaatgtatttgtatacacaaacttcttcttcattttgtttgaagccatactctttaatagtcttattatggatttaagcaacttgtacacatttcattccttctctgataacacacacctttcgatctttgttacacgcgtggactattgtttttgtacacatgttaattgtttgaaacttatttttagcaaatgtattttttaaaaatttataagtgacactaaataattacaacataccctattatgaaaaaaaatcaactaattctcctatatgtcgaaacaaatacataaatctactaaaatgatgtactacatattttctttatatctttttatataaatatataaatttgtaatcaatagatgtcccactcctcatgcctgctagtctttctatcattcttgtcaagcactatgtctcctctaccttaaatatctttttccctccaaattaatttgatgttagagcaatctcatcaccttctctcctcttttctttaaaaatacattaacttatttattttctatctccatattatttaaataatatactttttaatatatatactatcatattattaaagaatattattattggacaccaatagtgcctaacaagatgtagcacccttgaattagttagcgatattctctaaaaaatattatcttaagttatatagaacctaacttaattgcaccaatagtaatatgacactgagaatagtgataggtaccattgttatcttttaacatttatctattataaaatatcaataaaatattattatatattgttaaaatactcttgaaagaataaaatattatatataatattaaaattaaaatatatttagagaatgaatagtgcttctcaacctttattttattcttcataataaagctaatgatgaaacactgttgtacccaaaagtgagtattttaatatttatactcgcaagtgcacga

SEQ ID NO: 326227 - DNA, 995 bp, Cannabis indica
aggtattcggcagggtgaccctctttcgacatatcttttcatcatttgtgccgaaggtctttcttcacttatcaagaagtctgaatctcaacgaattttacaaggatgcaaggtggctcatggggcacgacctatcactcatatgttcttcggagaagatagctatttgatttgtcaatctagtactagtgctgccggcagtgtctcaaacttactcaattaatttgaaactacatctagacaaaaggtgaacttttctaagtctaatgtgttcttcagtcctaatacgtgtcctacaacccgtgtccatatttgtgatatttccatatgcttgaagcctttaacggaagcctctatctcggtcttccaaacattattgggagaaacaaaaatgttgtactaggatttctaaagaccaagctaattgtaagaattaatagttgggatggagaacttctttctcgtgtcggcaaagaaattctcttgaaaactgttgttcaatcgttccccacatatgctatgagtgttttcctccttccacttggtacatgtaatgaaattgaaaaacttatggcccggttttggtgatcttctagtaaagggaaaggtattatttggaggtcttgggatcgtatggctgctcataaatacgatggtggcatgagttttcagcacttgcatgatttcaacattgccatgctcgctaaacaaggttggcgtctactttgcaatccagatactcttgttgaaaaagtctataaagctagatactttccccactctgatttcttgtcagcggagctaggaagtaacccaagctttgtctggagaggtatttcgactacccaatctctactccgttcgggtgtcagaagaataatcggatcaggggacacagtaagcatactaaaccacccgtggctacatgtacaagataacccatattttaaataaaacaccctggtttaatgaaccaacatgttagctcccttttt

SEQ ID NO: 326228 - DNA, 1398 bp, Cannabis indica
cctattctttaagaataattaatgggttattttttttttatatatttaatatgtaaaaaagtgtgacatctccttattctaaggaatattaagctactttgaacaagatctattgtaggctctcattaatataaagagcactaggctaaaccataaacctaagttctaatccctaagttttggagttctaactctcaaaaccctagctccctctcttctacacgccagctgcagtctattagagactaagtctttctcatctcacttacttgagatttgccttacatctcactattgtaattcataaaatgccactctaaaaatcaccaagcttgtgatttgagtggtattatctcttaaatctatacagctaaaatgggagtaggtcgttacccattaaccaaaggggccgaacctctataaaattattatgtctattttatttactcgctttaattgtttgcacgtagtgattttgattttaaataaggctccgctatcggctgactaaatttaaggtaaaaattttggtgctttcattaagatcatcatttatcaattcgataaatcaccatggctgtaacaaggagaactccagctacaacttttgcttcatcgggtcttcctcaagaccccatgactgctggtcctgatgttcgtattccaaccaccactagagtttccacaaacccaacagatgtagccaatcctacgagttgtgccaacttggcaggctcaacaaactcaaccaacacaactagtctggtcgacccaactaacacgggtgatcccaatgtaaagcctctactacccagggtagatccgccattggaacctcaaacagaaggtttggtcaatgtggagcagccctcacgcaccatgactaactctgttgctcgatattatgtaggggaaacagggccaggaattggcaaaataacaattggtgagcctcatgtggacttgggagaagactttgaattgactagacttggagaggctgtatgccaagtcagccaaactgaagagccaaacgatgttggtttcgatgtgttcgcccaatagaacgcgaattcctaatggatggatgaccaagagcccatcctctgagctcatcaggaagaactggattgccgtaatagggaagctagtaacctaataaggaagttcaatgagagaattgtcaggagaggataggatagagatcctctacaaggaaggcctatcgactgatcgggcaaggtctacaggcaaacaatctaaccaagttctttgggaacgaggatggacttccccatgcccaaagagacaagaatcctgctaaacagatcctattgcgagattagttagactctatggggggtcggtcaggtatctcttgctcattaacacccccac

SEQ ID NO: 326229 - DNA, 590 bp, Cannabis indica
cttgttaatggctcaatcgatttgaattgagaagaatgccaagaatcttgacatttctaaagcagaggccaatctttctcaggcaagaaacaatggctttggcacttatgggcgtccaaacttccctgctcctactgtaccacctggttttaatagctacaattctggtttcaacaaaagtttcaatattttcaacaataacaaccatggtggtcagtatcagtatgttatggcacgctgtctcccctctaatcgtggtggtcctacacctaatgccatgcctagccgtggtccccctatactcgtggacaaagcaacaacagtggtcaaaaagtgaagtgtcagctgtatcacaaattgcggcatactgtaaaatagtgtttctatcgatttgacaagtcatttactggtcctgaatcattcaccaactttcctccggttgccaacattgctgaaatgcaagccatgcttgctggacctgaaattgtcagcgatgacaattggtaccccgatagtggagctacacatcatctaacaccagaaatagccaatcttaacaccagctgtccctacactggaaatgagcaagt

SEQ ID NO: 326230 - DNA, 427 bp, Cannabis indica
gtgaaaattgtacttcttgaccccaccactatgcaaagggtggatgagattaaaagagctctagagggctgatgtcttggagggcctctatgcctctttactaactggaacaacaattaatgtagaggctttagagaaatgcttggcacccaaagtggggagtgagaccaagtggtcggagacacgtccaaatcgcccttggacacctaggcaacttgcaacagtattgacgccttttctctagctcatgccaccaaaaaataagcgattggggtcagattttgaacttttatattttaacttttgtcgttgcatgtagctttcttatttttccttattgcaataggtagctctgttggcagaaagtgttggaaatattttaccaggatctagatttactaccatgtatatttcattaacatcctaa

SEQ ID NO: 326231 - DNA, 854 bp, Cannabis indica
tgggtccaatttctggccaccaaatggcatcgtttaattcctagaaacacttgtatcttaatttttgatgcaaacaaagaatatgatctaggcttcatctgaactgctgatggaagtgacttaggttggcaaaagtgtcaacttgggtgcttgccccaatagctaggtcaaccagcacattgggtccgtattttggcctccaagttgatctgtttctggcccgaaagcacttattaccttgttttggatgaaaacaaaaaaaaaatgctcgagatagtttctcaaaactaaaagtactccagatatgattcttatgcctcaaatatgtttgtggcatgtctaattcatgtataagtataaagtttgacccatttgtactaagaaggacccaaaaattgaaactctagttgtaatgccaacctgggtgctgggtgaaaaccctagacgcttgggatgacattcggggtgttgtttcgtgtatatgagcttccaagccttgtacttggattcttcatggtatagaagattgaaagataatgagttggaaacatatatgcaatatccgaacacctattttggagttcccgaagtaaacttcggtgcaaagctagggacccttcccaggttaaccgctatgacttgggactactcatcaactccatgatgttttctgtcttgccacgtatcaaacattgatgtccacatcaccaggaatacttttcatataagtaggttggattttgacccaattcttttaattttaagcccatatcatctgacctaaccttaatgtgaaggctataaatatagaaagatagatttgacaaagaaaatttctctctctctctctctct

SEQ ID NO: 326232 - DNA, 601 bp, Cannabis indica
catgaaataggtctgaaatcactcaccagattagggctcttgactttgggaatgagggtaatgactgttgaatttatttccttgagaaggtttcctgttcggagaaaagatctaacagcttcacatatctcaggaccaggactcttagaaccagagatgtcaaatacatcttgcttaatttcttccctagaatactctgctagtaaattatcagcttgctccttagtcaccactggcccttctgaaatcactgtccgctttacttttttccttgtcagcaattttgatcccatgagctgcttataatactccaaaaaagtctcagttatctcctctggtttatcaattctatcaccactagcattaataatagagttgattctattttgagacctcctttcccttaggctagcatgatagaaggtcgtgttagagtccccatctttgatccaacatactttggatttttgctgcaagaaagagatatatgctttgtgaatctcttgatacttctctctagcttcttgttctgtctgttgcgcatccagatgttaggttttatgctctaaataaaactccatttcaatgtaatctattttat

SEQ ID NO: 326233 - DNA, 779 bp, Cannabis indica
aaatattaaattaaaatttatatttagagttatctaaattggtaattttaattaaataaatatatataaaataaatagattaaaataaatattagatgaaaatacactttaaataatgagctttattataaggatattcgatctccactgttggttctacatagttcttgttttagtaagtaatcatccctaatggatgaacgtttgttagcaatttaacgccgtagaatctagaaaaataagtattatttgtaagtgttttattcttagtattaaaataccaaaaagggagtaaactacttattgttaagagatagattttttcacaaagaagaactctgtaactggggatgagacgagtgacttggtgtattctgagaacttctgaggttgaagattatattcgaaaaaatttgcaaaaaataggttaacgataaagagggcatgcaagggtttggaaagtcgggaatggttttttgcagaaaagcttgagagttctgaaaagcagaaatatcgaaatggtggtttttcttaagttttatacctgcagagtgatcaccgttatattaaaaagaataaagatctaacggatgggaacaagagagaattggaaaagatgggtaattaatgctaatgatgcgtctcgaaatcatgaaccgccaaaactcaaagcatgaaatttttaaattaggattaagacaaaaataccattgtaatcatttataaagcttttttttaataaaaaagaactttttaatgggtcaattgttatacccaaa

SEQ ID NO: 326234 - DNA, 571 bp, Cannabis indica
tttattttatttaatttttttaataaaccagacaatattttttattttgaggtttatggcatatatacttttttgagtgtgcgccatcaatcatggataaaggagttttatgggtctcaatttcttgagctttcaacaaagttgtgagtttttaaatatgcaatcttagttttatgttaattattgtagtttaatgtaattgtattttgatgaaatgcatgtaatttcgttgagtttattataaatatctctctcttattattattttttttctaaaatctccatattatactacgttttgtatatgaaatttatttaaataatatgtcaaagatcatatatatatatactagcaaaaaattacgtgcgagacacgtatactaaattttatactagtattttttctatgttatttgaaagtaatataattaaaaatttaagaaaaaatattattagttattagctgagattattattatgtgtatctaaatattatagtttataatgttgtcaataaaaaatgaatactgaatgcaatatattagcatttaagaaagcttgatgatttaaa

SEQ ID NO: 326235 - DNA, 1225 bp, Cannabis indica
ataaaatacaaataactaaaatgcccttcaaaaatagatatttttcctctttttttattgggctgttaaggcccaattcgtggtctagcttgttgtccacgtatgaaagctgcgcaccaaaatcctgccaagctaaaggctagccgaccttgcaatcacagggtgcatgctggccggccatgggatgtccagaagctggctagcctatgctggccatagggccatagggccggctaggggtggccggccacccccttgaggtggctcaccaatcactttatcgtcccgcttaagtactcggacccctcgttggttgaagtgctgagtagatgacttggctctcttgttggaaagttgtactgccacgtggcacttatgttggtcatgtagacatgccacgtcaggtgggaaaaattggaattacatttaccccaagttcctgctcgaacgtctatgcagataaggactttctagcttagttaggactgatgtatccttaactggacaaatcttgcagcatatttaattttttctcttgactatctgatcaccctctttgcagtaagttaactgcatttctcttctgcgtggtttttagttaaacattgcatggcaagtaaaaagaggttccacagaagctcaagggaaggaaaccactcttcacttttcacatttcattctctctcaagaaaaagaaacttttgaaagctcctccttctctctagaggccgacacccacattgcttcaactcctaggattttcacgctattttgacgattcaagcttcccatcttcttcaccaaagatttcttgtagtgggtaagctttctgatcccgtattcatgacggttcaagagttcgtaatttctcaggatttaggacgatatactaattaatcatctttataatatgaattaggtctttataataaatagctagtttgataatgacaacttaattacatatcagtcatgtcatatataatctctattatatacatcacattcaccaatatgtctatctacatcagcgatcggaatcaagattgcttgcactgagtaacaggcatcagtgaactatactatcaaccattgaataaagattcaataatttcaatatgttgctgactatcttattcatagcttgtgatattaattttcgtacaatgcaaagtcagtctcatatatgaataagaatttttttgatatttatatataaattatt

SEQ ID NO: 326236 - DNA, 1366 bp, Cannabis indica
ttttttgtgtcttacttggacaaaactacctatcttttagtggttgatcacaagaagattgctatgaggtaatattacactcaattctaattacataagcgttttcgaaacatgcctgtattgtttaattataataaatgagatttgatattgaataaagatggttttgagacttttgaaaaggtatttttgaattttgtttgaatggtaactagttaattaatttcaggtatgtaaccaaaatgttatttcctatggatgtggcctcaactctaccttttcagctcatacacagggtcgttactggtaaagtccactccggtgaggcatttcggtttctcagtttgcttaggttatggcgactcaggcgtgttagtcaactcttcaaaaggtgctctccattcatctttcaattttttaagcaattttactactcataattgtgtggaaatattatactaatattacatttcgacttcaattaactcagattagagaaagacacgcgctttagttacttcataacaagatgttgcaagctaatctgcgtaagttttgaacactatcctgattgattagtacaatttagtatcgagtctcatcttatatatgtttgttatgttgtttgtaaaaaataggcaacactattctcagtgcactcagcagggtgcttctacttctggctggcaactcgccacaaaaacccggaaaacacatggataggaagccaagtaccggatttcgagcaaaggacaatcaaattaggctacacatactccatctattgggcagttgtgacactcacaaccgtagggtacggtgacctccacgcggtcaatccaagcgaaaaggctttcactttgttctatatgctcttcaacattggtctaacagcctatgtcattggtaacatgaccaatttgattgtacacaatgctatcagaacatttgctgtggtaactaactaactaactaaactcaatttcttccaacaatgtcataactacaaatcgaaaatgatttgttattgttttttttgtgtagagagattctatcaatgaaatattgaggtatggtagcaaaaacagactcccagagggactaaaagatcaaatgttggcacacttgcaactcaaatccaaaacagttgaattacaacaagaagaagtgattgaaaatttgcctaaagcaataagaacaagcatatctcaacatctattttatcccactattgaaaagacatatatcttaaggggagtctctcaagatttcattgctcaaatggtaaaataacaaaacaaaacacctcatttttattttgttacactacatattattacattaccaatttttgtttttttttttt

SEQ ID NO: 326237 - DNA, 1009 bp, Cannabis indica
tattaaataaataattttggcatttatacgattgaaagtgcaaaagtggtatttgtgaaaaatagataaatgattgaaagtgcaaaagtggtattttgtaatctcataaatatttgccttgagaggctaatactatagactcgtggactaaggatctttaacgcctaaacctcgtaaaaaatacggttgtttattatttattatcttttacgttctttaagcacaaaatatattcggttttcgaaaaactcggtaaacagtttatctctcacactcttacctaagaatcttctttatctacagaagattcttcatacaaaatccaatctcaatatctctcttttctctataccactttctctctacctctcagtctttctctctcaagatcacctctcaaaactcgtctgatttcgttcttactcaaaatgataagtgccagtggctataagtgctaagttgttaagtttgttacgacttaacaaacttaacaaactcatcatagaagaatctccacgttagcttaagttatagttctcccgaatgaagcaaccaattctgagactatgaactgaagaacacgctgaaggatcttcctggataggaatagagatagttggactcgattatctaggactcccttccaagagagtacagttagccatctggaactcctttccagtgaaagactattcttgaagactccttccaggtggacatgataagcatctgagaatgcccttccgaattatatctatcattccacaaaacttcttctagatggtcaagttagactttcaggaacgtccttcagaatatcatctaactttctataaacataacaacttttggagatctttcatttgaaagaactataccacaaatatcatattatcaaataaaatttaaaatactataaattactactttatttaacttattttttttttttgttaaaattaaagtagtttcattgtataatgaaaaattaagactctcggtctattac

SEQ ID NO: 326238 - DNA, 730 bp, Cannabis indica
gtttccattgtccaacacctcaccaatatctggacattcattcatcaattttctaatgactcccacatgtccattccttgcagcgatatgaagggcagtcataccttgtttgtctttgtcataagcaagagattttttggcttccaaaaatagtttaacaactcttgaatgtcccatgcttgctgcataatgaagaggcttccatccaaactcatcttctcctttatctaaaatttgagatccacatttgtttaatgcctttgtaacaactcctaaggaaaaagagactgcatctttgcaaatttgggtaattaggattattgaataagcattaaggaaactgtttagtatttaatatttagggtgtgtttaaaaagtcaatttgtaattgaaattgaatcattaagtttgattgtttagtatagggaaacattcctaatcaattgaaattgggggtgtttccctataagaataatgaagcattagtaacaaaggaaaacattgtacttacagcaattttccctgatcatggtgggcaccaggtttcctatcattaattacaagacagacacaacaaatgattaaatctatacaaacatataatgaaacaatatatttacatatacttatacacatacctgggtcatacaaacgaatgacagcagcatgcatgaaattcataccctttcttcctaacaaagagcaaataggaaaagtgtccaaaattatg

SEQ ID NO: 326239 - DNA, 614 bp, Cannabis indica
tttttttatttttttttaaaataaaatactattagcggcgggcattagcggcggacagcccgccgctattaatattttttaaaaaaaataaactcagcccaccaatagcggcgggggagggcctccgccgctaatacccccattattagcggcggaggagctccgccgctaatacccccgccgctaatgatgggatttcttgtagtgcaagtcaaaatccattggcacaccacgatggaaaatcccctaaaacaaactactataatatatcaaatgatgatctttaacgataagcaatttctcaacttcaatctctaagtttcactatacatcaaacaaaaatattgcataagtgtttcttaaaaaaacactatatttaaaattattattattactgcatctcactgtattcgcactatattcaaaattgatgtatttcacttatacttatagtgaccactatattcaaaatcactattatctatgtatcttacttgtaattgtcacattcaaccatttataaaagaaaaatctcaaattctaaaatatagtgtataatatatataatatagggaaattctataatgcactccttaaaagggatacactgatac

SEQ ID NO: 326240 - DNA, 854 bp, Cannabis indica
  modified_base (822)..(822): a, c, t, g, unknown or other
ttttttttaaaaaaaaaattctacaaccatattttatcttatatttttataggaaattgaaagatagatacaccacatgatgtcactttatttcatattaataagtgacctcttctcagtaataattcatgacataatctattacgtacacacaatatagtttcatgtaaaatttataatcttttaatataaagttacaaaaaatcatttcttctaaaattaattatcatcaataagattgctattttcttattcaatgaaattacataaaaaaaaaatagctcaaagttgataattgtattcaataatttaatacttttcattattagaattaatatttaacgaaacacgtatccaaaattttacacgtgaccaaaaatacatatatacttatacaaaattattgttacgtgcattgcacgtatacttatagttatatttttgttcatgtgtattttaaaattttataaattaaaagaaaatcaattattaattttttatttttctaaaatatttaaaattttaaaaatttcaaaaaaataaatataaatttaaaaatattaaaattaaatatactcctaatattaaaaaataataatattacaaaataatatattaatatttatatatatttcaattaatttaaaataaataatattaatatttattaacaaatatttttttaattttaaaatatattatgttaaaccaacaaaaataattaattaaataacaactttttatatataaaaaaacataatacttacatattatgtatacacatatatacaaatacaatagtatgtcacttttttttttttnttttttttttattttttattatatattattat

SEQ ID NO: 326241 - DNA, 2496 bp, Cannabis indica
ttggatcaaccataattccatttttcccaacaatatgacccagaaaggatacctcagacaaccaaaattcgcactttttgaacgtggcatacaacttgtgatccctaagtcgctgtaataccattcgaagatgatcctcgtgctcctcttgagtctaacctactagatcccacaaaatacgggcaaattcttaaagcatgaaggggctattattcacccactcagttttaaatacccccacattgtccaagatactggtgacgatattcatttactactccaccccactcatatcattaccactaggaatgtcagagattataatttaacaacctttccacaaattgaatctctataccgttgcaaaattggtccaaggttaactaccactagaactagagttgtaaggatcacttgctctactaaagctacctaagccggtgacctaactcagcacaactcttcttcttgatgaaggatattaactcacatctcattaaacatctgatgcttatcagtagaaggattagcattaatcacccttgctttatcccctggattttgcggaggccttggcagtgttggtgggagggttcagataacactgtcctcaataaactcgccctgtgatctaaatgattgactaggatgttttctttttcaaataaccctttaaccaataatcccaatgagccaggcaccactcccactcttatacacttctttccataacccttaattatcacataattatgcagtacttactataatcatactttcatttaatatcaataatttctatgatcataaagtagtaaacatttaatcacataagcatatacgtatttactctcaacatttactacaccacgagtcaagcttgtcttcgatgatgattgtacatgtttggctagtgttcaggaagtttaaaatccttagtgctctgatacaaaattataacatcctaattagaagaacgccacatgtcgtgattacaaacaactaatctcgctaattgggctccatgggccaagtgatttaaaacaaatattaaacttgataaataaataacttgcaataaaaattgatattatactaaaaacaaatataatttaaagttacttatctaggatctcatatagtttatttttaaagtattacaaggtattttgtacaggtcgacctaagcgacaaagtgcaatttctatacaattcttgttggacccaacacttgtgagtctattttggctggaaaatgtacaactgatcttcaaaaccctcgaactcaaggttgaaccgacactactttaccaatgcctgtatattagagcacttgtatgccaaggctcagcaagacaaaaataatactacaacatgaataattataataataatttcatcatacagtaggctacaacatacatattctgccaccgcactaaattacattattctgtacaataatgtaactataattaacgtccatgtaccatagtcctacgtgttgtgctcacacgtctcttttacatttaagaccttactagtgtttatctgggttatagttatcaattctaacctggttatgccttatccgcataactctactaatatatgtaattcatacattatgatcttacaatggtttatcctgatgatgtttatcaggtctaacttagttatgtctcacacaaaactcttgacatattgtgccactgcactaaattacattgttccatacaataatgtcactagaattaatgtctatgtagcatagacctacatgttagtctcacatttctcttttacatttaaggccttactagggtttatctccatcatagttatcgagtctaacctagttatgccttactcgcataactctaatcatatatacataatccatacattatgctcttactgtggtttatcctgatgatgttttcaggtcaaacttagttatgtcttatacacataactcttgacatatatatgcacacaatacattcaacatatactctgctacatgaagttttagggtaataaaccttacctgcatacttaatcctttactcacataatacattatagcatgctcaagacaataaatatttagggtaataatcctaattaaccatatataaatatgttaggaatattttaccagtatctagatttactaacaagtatgtttattaacatcttaaatatgaatatctctaaaacaatgaaaataaacacataagcttttagaaaaacttatattggttgcagcagaatataatgactccttctgcacaaatctctaacccttgttcctttcggttgcagagtattatcaagatgtgagcttggaggtctttctctccttcgagtttaattaccaccgtctctcactatatgagtctgacttctatgtgtgggcatggcactcgatcactaagggtgaatgatgaagacaataaggagtgtaaaatcacgtaagaaaaggtcgtctct

SEQ ID NO: 326242 - DNA, 773 bp, Cannabis indica
tttaatataataggttttagggagtatcgctagctaatcgcaatgcgacatgttaagaaagtgttaggcaccactggtgcctagtagcaatgctctatattaaattatatgggacccaatacttaattagaccaatagcgatactgacacgtaggagagtgctatataggcacactggtatcttttaacatttctcttaattataccaataaaagtaataggcatcaataatactttttaacaattctcattaaagaaagatactcatcaaatgcatttgttgtattaattttagtataattagcaaagtcttcaacaatttttagttcctaaatctaagaaatttgtgagcattaaagatcttggtaagtgaacgattgaaggttcacaaaattaataaattcattttgggctataatcatcacaaagagacacttccattgatttgagtttgtaagactaaacatgctctctgaaatcaaagcaaaatccaaatgcaaattcttctagcaaattgggctataattatcgtatatattatttttttttaatttttttttctttttaaatttacggtttaggtttctcccgtagttttcaaattaataaataccagcagtttttaatattattaccggcggagatttctaccagtaatattgttaaatgttgtagtgatttttgtgcgtttggaaagccacagtgtaattagatttgtgtgtaattggaggtaactacacaatttgtcatgtttgtctgaccatataattaca

SEQ ID NO: 326243 - DNA, 2307 bp, Cannabis indica
ttagattgttaccttattaatttttttagtttcccatcaatgggtattacccattaagaagtgttccatatatatataggtgactactcaatggttacatttttattgtaaccataatggttacattttaagaagtgttggggtttgttggctggtttgtgctttatctcttttctttgagtgtgtgtctgtattatttggtgtcttgtaagcttgttgcctcgtacgtttttgggtggtttattttggtatttagtgtggttggtaagattcggtttggtgggtttgttttgtttgtcttaagctttgctttgttctctttgtcgggtatttatggagttaatcattgcttccaactcccctcataaaggcaaatgtttttcttgccttgaaacctctgtcaacctatctccttctgatacttctctcaaggctctagcctcgtgctgcttgtttgggaaagtagttgcacccatggtggtggaggaaataaatgtaactgattttgtggccaaaacctggaagatgcatgtttcagtagtggctctggtggatgaagagaagacatccaatgttttcaagttcgggtttaaatgtgctgaacataggaactgggccctggacaatggaccatggtgtgtgcgtggatataccctgattcttcgagcctggactccgtccattgatggaccaattgactttaaagtaatgcgtgtatggattcaaatacataatctcccccatgaatacttctctaaggctaatggttacctgttgggggagttggctggtaaggtggtgcaagttgagctagaggaagataggccggctttatggcgaaaatttctcaaggtgcaggtggacatcgaggtcgaaaacctctgttttcgggttgttttttcgacttagcttctggggtcaagagatgggttcaagtaaaatatgaaaaattaggcatcttctgttatttctgcggttgcctggggcaccaacgcaggggatgttctctaatgtcgccggtgacggttgcgaacatagatgggattccatttcctatgtttggcccatggctatatattcaatcagtgtaccaaactgtgttttctggtcctatctctggtgatacccgtaggtttgtgtcctcggctggaagaaacgacggtggtgtcgtgttatcattaccggcgatcttgggtaatgaagatgatggttcgaagggaactattccaagctcctctcgacgtccgagacgtccggtgatagggatcgcttgagcttcggctgtcctcgggaagacccagcacgcggtgtggttccctaagaattgtcctcttggcgtggagaaggcagtttccacttctggctatgggggtgcgactgaacgcctggacaagagaaaggcctctgaggttttacctgttttgaatttgaacagctgtgttaaagattctatcaaggataacaatttgaaaagtgtgaccgttatggataatgggccgtgtgtgactgggccgaatggaaaatctactgaaaaggctggtattattaaagctattggaaatgggcctactaataataatcatggtattgggcttcctatgttaacttctaatgctcaaatgggtgggcctattgctgattctaattttaaaggaggttcggtgggcccgtgtcatttgggtagctgctctaatccgaatgggccggatgcttagcaaaagataaaagtgagctcgtggggattaatacttcaatgccttacatttctcacgggggccaggtgcatgttaatgaagaataagccttagctcaattctttaatgctcaagaaggcttactacacgacctcaagcattttgggaagctcgatttgtatgagatttgaaatataggaggggatattggggtcccggcttcctctgaagttaatgagagaacgacacctttcaagaaacggaaatttgaagtgtccgcctctctttgctctaggccccacaaagttccgcgcaagtatccagatgttgtttgtgatttgccctgggataccaagaataaagtaaatgacctggaattggagattgatgatccttcggaggacagctctagctccccgagctgctttggtattttgaagaacccgctggttggttcctttgtgatcgatgaatctgtttcgagtgggtctgcttactcccacaaccctgtgaaggagaatgtcgaatctcctccacaggagccttgagaggtattgcttggaactgtagagggttagggcagacctcgtacagttcgggaactgaagtccct

SEQ ID NO: 326244 - DNA, 2146 bp, Cannabis indica
atgctcactccttcccaattctttccttagtccagagtaaagctaatttaatagcttcaagttcagcagcaatagcacagtcctgttttcctgaggttgttttgataaaccattgattagtgataccatcaatggtcaaagatttcttgcaccttttagaggaacatgatatcatcttaatgattggaataatggacaccttccaaacacaggagaagagttctttaagttgaagcactcatgttgtaagaatgtaattgagcgttgttttggattgttgaaaatgcgatgggctattctcagtagtccatctatttatgacatgaaaacacaatgggttatatttctgttaactgtatgctacataattttattacaagataaatgagcatagatacagtagaaaatgagatgaatagtgactaagaaatcacccgcacaacagataataattatattaatactatcgagtcttcagatttatgaactacttggagacaaaatttagcagaaaaatatagaatacatggtagggaactagatgattagaatatatatgttgttaactattaccattttagtatttcatttgagcatttatcaaatatgatttgatgtaataaggacatatgtctatatttatttgataaatatgttttttttttcaaattttttctatttaatttttaaagtattatttatgtgttcttttaagttttaaaatttatatcttttttatgcatattaaaaaaaaattataggtatatataggatgagttcaagctttaatgcagatcaaagagaagaggtaataataaacattattagacaccaacataagatcttgtattgattgaatgtcttctagagttgagtcaaaattcaacacggtgagttgattcttgatttaagaatagatatttgcaataaattgagatataaaccacatacgatcactctaatagactttgaaaatgactcatttggtatgaagcccactagctccggtaccaattgaacaatagcataacatgtgaaaaagtaacactactagaaactgcacttttggtgtcgattttaaactgacacttattctgatagtttaagttcatagaactgacacctattccaatgagaaataaagtcaaagtttaggttagttttggtatcattttacaatcgacacttagactgtacatatatattttttcatttattgtcaatttaaaatcgaagctaattgttattagtgtctattctaaagtgatattaaaaggggtgtttctgaaaagaaaaaaaagtagtcatgaaaggtaggcagtagaaatttatttcaaaattacaaaactttagaccctatcaaactcattaaactccaattaatttttacaaaatgttttgtattataacgactataaaatgaacctttccaattctagaaacatgttaaaacacataaaaaatattgcatgacaatctagtacaattcttagaacaatttatcaatttcacaataagtacaaaataaaaaattcatacagtaaactcagtacaagaaaatctcttgaacatagttgcttaaaacaaatgactctaaaaaaattaacaaaaattgtaataaaaattataccattcagtgaagagttaagggtgggtttaagaacttgaaataggcctaatcctcaactacaatgactctccatgttttttggagctccaccacgcacgacggctgtcttagatcaaaaattgtgcatggagacacgaatcttgagatctagaagcccatgatgagaggaacacgttcttaccacctgtttaactcaaagaaactcagaggtatctcaatcaaggatttgaagcttttgctccgatgagctccaccaagatagtgaaaatagtgatgtgggccattggtttcgagttttaggacctccaaatcgtgtttctgtagtctatttgggccaccaacatggtctggccatggttgtattgagaaccaatgagatgagtgagatcaagagtttgagagtgagatggagaagctcagttcgagttttttaggtcttcaaggttgtgcaagacttggaataactgtcccatcctagttgccgggaggcatggtgtaacaccctagctaacatag

SEQ ID NO: 326245 - DNA, 1469 bp, Cannabis indica
tcgtcggatgacgatgccccatctgtgctgttcgggaaaatgctctggcagcgtgcagagtactccatcttgcatcaaatttcttgattatcatgccttcatattctcatgctttttcttgactatgtactttattccctgcagacatgctcagaaaatgcttaaggccctgaagaagagagtgggaggaagctcgggcttatctccactgaccaagaagtccaagggcggtgagacgaccccgtccagagagaaggcaccagctaaagtggtcattgacctctctgaggaacaaactgtaatgaccgctttagtaattgaattagtaaaggcaattagcactaatttttgatatttttataattatttatgaatttaattattagaaatgggcattagagttataatttctcaattccaaagattttattaaactctaggagtattatttgacttatatgtgaagtatgttacttttgtaatttttgctcgtcgacaacggaaaatgcgatggatggctagtttgatcacatgggtaagcttagaaccttatttcttagtggtatatatatatatataaatatatattggagaaaataatatactggggttaagcgaggttatagaatttaaccattttacccctagtcttgagaaatacctaagttataacctaaagggcattttaatcaatttctaaagggaaatgttaggtggctaccctaggaagtgacacatggccatttagttccagcaaatgatttattaggaaatcctttattcaattaaaggaaaattgaagaaataaaccaaaaaatcaaaagaaacctctcttcctccttctctctttcgaaccagccataaaccaagggattggttgctgattcttagtgttttcagcaaagaatttcaaggaaaatcaagccaaggtaagccctagcatctttatctcttagttcttaaattttaagatttggttgagtttatgattttgaaaattaggggctgttatggtttaatttttgtgtagtttaaattgtaaggttcatttgaattagtttcagcttccagcagctgggtttggtgtttggagttgcttttgctcaagtttgagctttgaactcaaagcttaggtctttaatggcatattgtgattcagtgtgtttttatgggaattattgattggaatatattgtatataccttaattaggtactctggaaggtttgattgcttttggtagagttttgaggaagaaatggaatttttgggtgaactcgtataaactggctagccggttttattagtaccagttagccggttttttgtagggttccccgaacgtcccattttctcaattctcgtccatttcagtgcagtagttgggtgtttccctatttcttgagttagtgtaatccctagagagtataatagaacctagggttgcgggttcgagtttcccgaattagg

SEQ ID NO: 326246 - DNA, 1252 bp, Cannabis indica
gaaattcttctcaaatcggttattcaagccatccctacctattccatgtcggtctttaaactcccaaactctttctgtaactttgttgataaggagatggctaacttctggtggggatctaagaatggagaacataaaattcactggaaaaattggcgatccttgtgaaactctaagacttctgggggccttggttttagatccctaagacctttcaaccaagctatagcttggagaatccaaacaaaataatccttcctccttgccactcttttcaagtctaaatactttctcaagtccacctttctgaatgcctctcttactgtctagcagagcttacattggggaatcgctcctcaaggctgacctatgttaggagaattggtaactggagctactacttgcaacctcaaagtatcactaggtaccctaactgtcactttctccctatctcccttccaaagttaccttacccatgtctctgacctgctcctccctgatggtgattggaatatccccctccttaacaatcacttccccaacgatgctgtcaaagagattatgtcccctcctccctgtgacattaaccatagtgattcacttttcaagcaacatactacctatggtcactactctgtcaaaattgggtaccatcttgccaagtcatttacacatattgcctagccctcttcttctagcaatgataccctcaactcttggtagaaatccctctgggctcattgcattcccccttagctaaaacactttatttatcgactttgtcataatacccttcccactgctgaaaatattttccatagaaaatgtctccactcccccacttggccttgttgtcacatgcatcctgagtctgtctagcatgctttgtttgattgtaagggtataaagatggtgtggtaaggtacgtcctttaaacatgctctgaataatttaaaaggaatgcatattcttgatacactattatacattaagtcctatttttctactgccacttaatcttttcatgtgtattctttggaagtgctggaatagtagaaactcttttgtgttcaaaaatcagcaagaataccccacgaggatctatcaagatgcaaaggaattttttgttgggctttatgccctaaataaaactctatttcaatgtaatctctatcgtttaattaacaataaagagacagaagtattttcatcacttatatatgtgtgatttggatgtgattcatgttgatct

SEQ ID NO: 326247 - DNA, 1234 bp, Cannabis indica
gcaaggttcagacctgaattgcatcttatgtttgttatagggtctaatgttagaaatcacttgcttccaaaagtttttaaaccagaataatctggttgtttgtagaaacataacctctaagggggttttgtgattcaatacaggagtagacaacctattatctataaagatagttgtcctaaaagcctacgccccaaaaatttagtggcatagaagactgagctaacaagtaaggctattctcaactatgtgcctgtgcttcctttctcttataccatttttttcgtgagtggttgggcaaggggtgcctatgtaataccccaaactattgaagaaacttaggaaagcttctaaattccccaccccaatcagtttgtaccattttgatttgagtccccaattgtagtttagctttagttttgaacatttgaaacacttttagagtttcacatttgtctataagcatgtatatccatatgaacctagagtatacatctatgaaatggatgtaatacttgtagccactgtgagaaatagtgtgagatggaccccataagtctgagacaacaagctgtgaaagggttgtgtactcaatagtacacacctttgcaaaaggtagtttatgaattttacccaaacaacaagctagacaaacaacttgagaaaatttattatcaatagaaatgttacaagttttgagtacaaaatgaacaatacttctggagggatgccccaataatctgttgtgccaaacatcaaattcagagaacttgcaattattattacaacgagcacaagaagaaattgaagttgagacagtgtttgcagacagcttagtgttttcaggaaaaacatgtcctacactgtctcggctgactgttttgggaagaatgtctagaccttcaaaagtatagaggtcattcttgtgtctcctttgtagtataacctacctggtatcctgatccttaacacaacatgtgtcaaggtgaaactcaaagaacactttgttatctttagcaaacttggacacacttagcacgtttttggttattataggcacacgtaacaggttattgagaactaaagtttgtttagacaaattggaagatagaaaagtttgacctatgtgcttaatggacaaacctagtccatcactaacaaacagttgctcctgtccaagatagtctgagctttgagcaaggttggtagggtctgggtgttgggttttatgccc

SEQ ID NO: 326248 - DNA, 1226 bp, Cannabis indica
gatcctggtaaaataaatttcaacactcttaatctcatttgaacagagtactcactcgtatctcaatcgtgtcttcaaatatttattcaaggtggtatatatagccttaggatcaagatcccaaagtcggtggctacaagaggcaaggttgttaagatagttagaaataactaacttaaccaactcctctttgagcgaagtctctacgtcagcttaagtaccagagccttcgggaacatgaatgagcttccgagcttgacaacaacatacccttgctgacgatgcttccagataggatatagtctgctagagtcgactatccggatctaccattccaaaagggataactagccagttggaactcctctccatggaagggctagctatcctaaagactagacccggagtagacatgatactcatccaaaaaccccttccggactcgactatcattcctcacaactcctttggggatcgagtgagtgaacaactttccaaaaatgacgatcgtggagacctctttatttggaggaactataccacaaaatcataattacttatttttcaaatgtaatttttctcaacaagttgtgaaccaaatctaaatttggattggttgcaattggtcctctgagttcagtgaatggactcgtttgatagaagatatgtgcaaatatgtataagtaacgatagttgtgtcaatttttttagcaacaatttgttatatttagctaaataaaaatatttgttattttaatagttattcttatagagtagaagtaattatagatatgataaaaagagatatagtttatagaatagttttactcaaaagaaaatgaaagagagtgagaggatttttgtgaggaaagtgtgctccttgtaatatagctgggctccttctgcttgaaggagactgttgattgtatttgtgtttgtgattaataaaggatttcttttttgataaaagaagtatatatatttaaaaataaattataatattttcttaatgaatatttggaggaaattacactctatactatttttatattgtcttcttttatttttaccctcttttataagtctatcatttttacctctttttttaaacattgtactaattttgcctctatcacttcaagatattctctatgtgactctcttatgtcagggtattttgggtacaatatatataaaaaaaggtatatttcaattaaatataaaat

SEQ ID NO: 326249 - DNA, 526 bp, Cannabis indica
tgcgacagaaaggaatcaagggttagagatctaagtgggaggagacatatattccgctgcacccaatgtaagatttctgaaacttttatatgtttaattttccatcgttttagaagttcatatttaggttgttaaatcaacatacttgtgagtagatctaaaatcctggtaaaataacttccaacacatctcttggtaggtctcggatcaggggttgtaaggtgtgagttgacatcgagaaatcacactccaaggcacctaggagcatcaccatgccacccaggctgtgaggaatataccagagtggcatagggcatgccgctcaggtgtgttgtgacagtcagtagtcctgtgcctaggtgtgcctacaactttgatttcatctctatcaacttttatggcaatgtcaatatgacataggtgtgcctaggtctatccttgtgaagaaaaaccctagactttcctttttaagaaaatttaccataaagggcctaggatgaccccttagagagagagagagagagag

SEQ ID NO: 326250 - DNA, 514 bp, Cannabis indica
aattcatgtgggtaaaaatgtaattacacaaagttacaactgaagtgccacatggcgtgctcgaattggttgctttgatcaaattgctgccacgtgttgacatttgattgactataaaaaggagcaattttgactttttgtggctgaagagaaccagctccggatgaagcgtagtcgcaggcttgggcgtgaggcgcacgcatgaccagaattaggtcgtgcgcctcacgcgtgcatggaagggagagagggggggacaaggggcctggcacctgttccacgtggggctcgggtctgatggccgaatgacagcctgccacgtggcgcggctgtctcttggtgaagggttttgggccgaatgggcctcttcctttaggctttttcttgatcttctaaaaagaggaaattacattctataccttttttatattgtcctcttttatttttaccctcttttctaaagtctatcatttttacctcttttttcaaacattgtaccaatttttcccctgtc

SEQ ID NO: 326251 - DNA, 1085 bp, Cannabis indica
gtgtcagaactccaaaattctctctcgtttttttttttttcaatggatcccttcatgggttctttgaatcaaagagaggattaagacaaggtgaccccctatcacctctattatttgtcattagcatgaaatacttgtcccaaattttgaaaaaaataggaaacaaaggtgattttgctttccatgagaggtgtgatgccttgaaactcaatcaccttagtttcacaaatgatgtgctgctttcccgtagaagtgattataaaagcatcattcttttactacaaggtttgaagcttttctcagctacatcaggtgtgcatcccaacaaagcaaagtctgcaatttattggagcaatatatgactaattcagatgttactaggatattggaggcatcaggattttcgaagcaacaaacaccattcagataccttggtatccccatatgtagcaagaggatttcaaaataagaatgcacggtgttgacagaaaagatgacagtaaaaattcgatctttgagcactagaaacatttcatttgttggaagagttgttctcattaactcagttataacagcaatacactcttattggtgccaaattctcaagcttctaaagaaggaaatccgtgagcttgaatctatttgtagagctttcttttggaaaggccaatatatgatgcagggagcaggattagtggcatgggaaaatgtatgccagccaaagattgcaggaagctcgggcattaagagaacagctgaatggaactcggcagcacttcttaagtaggtatggaccttagcaaacaaggaggataatctttgggttaaatgggtacatgcagtctatactaaagaagagaattggtgggatcatcaagctccaactcaaggaagttggtattggaaaaatagttgcagccaagaaccaagtcaaatgtatcacggatgtgcatcagtttgctcaaaaataatacaagaatacagcaggctacaacatgatttatcctctccagaatagagttgcatggagtaatgaggtttgggggagatttaacacacgcaaacatagttttatactttggttg

SEQ ID NO: 326252 - DNA, 1046 bp, Cannabis indica
tagggcataaaacccaaaagttcgtcccaatgaagatccatccaaggtggtccatgcgaggggatcggcctataaatacccccgaagacacacaaggcaggggactttttctcttttgtcctttggcttttcaccttaaaaccgaagattaattctttgaaaaatacattactgcaaccccattatcaactccagaatattcctactaagcttcattttcttcaagagaaacacggtgaataggagtaaaagtccatccttttttatttgtatgaacaatcactggccaaagagcctaataaaatggactcgtgcactaaggatatttaacgcatagaccacgtaaattttttttgtttattattacttcatttatacattcattactttcttaagctctaaaatattaggttgccgaaaaactcggtaaacaataagtgttccaccttctccattagtatgaggccttttgggaaggtgcccaaaaacaaaaacatgagggcttaggcccaaagcgaatagtatcatactaatgtgagagtcaaggcgaggtagaagcccgacaaggtggaagaatggggcccaacaagtggtatcagagctaaaggtttaggagcgcttggatagtttgctgcgtttgcgatgtgtgggagaagccctcaatgtgatgacctcacgattgaagatccacatggtgccttgtattaaaagtctacttgatattgaggtagtcaaatggtgtgtcccgttgataattatggcagtacaagatggagatcggtgttaggacctatgtagaaagtcttcctgatgacaaaagtgatggtcaggagagttccgttggtgatagcggtaaggtggttttgctaggaggggaggccatgagtatgtggtccttggtttgaggggaggattgttggggtatcagcccaagttccacattggaagaatagacaaaagttgtcttgaatataagtgttccaccttctccattagtatgaggccttttgggaaggtgcccaaaaataaaaccgtgagggcttagg

SEQ ID NO: 326253 - DNA, 1095 bp, Cannabis indica
tatcccactaataatttagtacacttcatgtatacctatttaacatataataaatctttaacaaactctaaaactaaattaatatgtaaaatagttatagatgacatgtccagaattaattgatgggaagaggcagcaatttaaggagagcaatttttagttttttttattatgacctgtgatactaccaattgaatgttatttttgaggcattaatcattctaaattacacataatattatgtaaaatacagaatcgtaattaaatatatgtatatataaatgttatttatatttatatattaacagtctagcggtatatagcacaaattaatagggtgctacttctgatcgatgccttttagcattaatcgtaattaaatatatgtatatatataaataattattgtgttgtgcgtataatataaaaattttacgtattcagtattctacgtacctcctcttctacactagctatccaaacccaaagcatatggcccaacggaacaatactcatttctcgcggccgtgaataattatatttatagtgctacgcgatattaattataaacaatactacgcctactttacattccataaatgttattaattaattatttcaagtatttggatttaactttttactgatataagaaatgtatatatttatatattacctttcttggtataaatatatatatatatatgtacattctagaaatcgaaagtatcttcattaataatgtattacttaattaaataaaataaacgaaactctcacgttgagttaatattactggcacgaatcatcatcatcatatatatgatatggcacaacacatggctgaccctttgatccccaagcagcgataccaaaaacagcccttcttgttggtagaatgggtagtgaaaagagttgtacgtatattatttaagtatacatgtacatatatactgcctgatctataaatataatattaaagtccttctatatatatgttctaattttgtttctggttgattccagaaaaacattaattaaagcatatatatagacaattcgtcattgtagcatgaagtagataaattataatat

SEQ ID NO: 326254 - DNA, 1614 bp, Cannabis indica
aaataagtagtaggaaagttaaaatatagttcaatttaacaaaaagtgtaaatgatgtaaattagacacatagcaaattttgtgttaaattggtaacatattgctacgatagtaaaatttcaccataataattgcacttattttttatttatatttatgtcattttttattagtacatttaattatcacattaaattatgaaacatttatattatttttttattgtcttacacattaaaataataataaaattaattataaagttattaaattttatttttttaataaaatattaattagatattaaattttacattaaaattttacaattgtgcattgaaacacaaagctaaaatttgatgtacagttactagaaaattatattttgtgctaaatatatacaatttttacatctttcattagagatggtcttaaaagtactataataaattaaaaattataattatataaactatcttaaaataaaagttggttattaaactactttttaattgataacatcaacaagttctcaaatctaaatcatgttaaactacaacgatcaaattccaaatttttactagcacctataaacttatgactcgtataatatacatatcaaactaatttattaaattttttatctttattaccttatgaggttcttattaattacgtgccaatttagtactgttaaatgccaatctaaattaaatctatagtccaagacaaacttattaacatgaatcattaattacttcaacaaattaattcatatttataattttaataactaactgtaatatggatccttctttctaattggaaaagagagcttcatatgtccttaagtggattcggaagtcaaaaatttcttgaggtaaaagaaatgttcttttgagtgttattacagccacgatttatcacatttaacatgctaaaaataaagtattttgagatcagaagttattaattgttaaggtcactttgctcataatatttattctaaattgaactctttttttttgaaagaacataaacatgttcattaaaataagtaattggaaagcacaacaaaggatctctccttatggtaaacaccattcaaaagactatccgctctaatctttcttactacatagtctgtagcctgattgtccaaacgattttcagggagagttgaggagccatttctgaggctcgttcctggtacatggggcgcatgagtagtcccatttccaactccatcaactagcgtgccctagttgaatgtccaattgttggaatttgtctatcaacatttgtagaaaacgtattgccaccatcttgctagtaactttcttgagctgtggcttttaataaaaatactaaaatattgactcagaattatggactagacttctaagccacagatgcttgttatattgactagaatagataagtagttataagtaattataagagagacacgataaatttatagtaatttactccctgtatcacgacggtaatggagttttatctacttcaagtttctttctctcacgagatggtaattacataaaaagactaagtgttagaagctccaatatctagagagaaactagagagaga

SEQ ID NO: 326255 - DNA, 832 bp, Cannabis indica
cacctttgtttttcacatgcataatgcttattattgatatgttaaaaggctttaccttttagttatctaagtttattaagtcttgaacttttcttgtttgatatcttgataatgcttgctaattgctatggtttaaaaatcctattttgatttccatattttgtgttaagtgattttttttttctttattattgttttaaccatgaataggcttttcacctttgtttttcacatgcatagtgcttattattgatatgttaaaaggctttaccttttagttatccaagtcttgaacttatttcttgcttgatatcttagtaatccttcctatagttctatgatctcttaaggttatgttttggagttagattttgttgagaaaagaaagataaataaatttttcatatttgatatcaaaatttttcctatataagttttcttttcatatgaaatatgtgaatttataattctttattgagtaattggcggataaatatttaagtttaattctcaattttagataaatacttaagtttaatttttagcggtaataatatttaagttatatttctaaactttttgtgggtacctcaccgttaagtgtcaagtcattatatatgtgctattttttttattggtatacttaattaatttttaaataaaaattagtattcaataacttggaccaatcagaaataggggtcagcataaaatccagaaaatcgaaaaaaccgttcagactgacctactgaacaccgttgaaaccgaaattgacgaaaccaaaaatcgaaaaaatcactaacgattaaaaccgccattgaacggtcggttt

SEQ ID NO: 326256 - DNA, 2457 bp, Cannabis indica
gaaggcatacgacctttgatagcatcaaagtaattagttctattataatatttagctttgagtaatcaatccagaagaaagtttaggtgcttaaaatttctccatgcttgctttttcaaacatagcttggttgaaatgaatgagagatctaaaacctaacccccaaaagaagttagaacgacgcaaacttgaccattttttccagtgaatcttagaattattaccataggaaccccaccagaaattagccattatagactcaatcttctgataggtttcaacaggcaaacggaaacaagacataacataagaaggcaaggcttgaatcacaactttgaaaaggatttcctttccagccttagggaaggccttactattcgatgaggttaagaaagtgctgactttatgaaggatgaattgaaaagagatttcttaggtctacgaaaacattggggcaggcctagatacttgctgacaaaatgcttatcctctaacctaaaatgtcaaaaaatggctatttgtttcaaatattagtatgtggagagaataaaatggaggacttagtaaaattaactaactatccagatgctttatgataggtttccagagtcgatttaatagttagacaagaatttgattgaccacggtaaaaaagaagctattatcggcaaacaaaagatgggcacagaggggcattcctaaaatttgtatacctggaaacacattctaacgctccttacttttaaggaaagcaaaaagcccttcagtgtaaaggatgaataaatagggtgacaaagggtcaccatgtctaatgcctctagtaagaaccatcttcccatcaacatggccattgaacacaaaaaataataatgacattagaaaccccactcaacacgatcaaaagtgttctccatatctaacttgagactagcccatccaacaacctcggttcctatgatttatcacatggaaaatctcattagttatgaaaatattataaaaataatacaatcacccaaaaaagtactttgaaaataaaaaaaattaaatgactaaggataggtttaagcctattagcaagcactttggacgcaaccttatacaaagttgtacgcaaactaataagcctgaatccctaattttggtagcatgagaattcttaggaataaggaaaataagagtcttattaataagggacatatcaactccttaattcaggacatcaaggatatcaacacataaatcatttcctaggacaacccaatttttatgataaaaatgggcattaagatcatcaataccaggagttttttctcttgaaagttgaaaaagtgaaaatttaacctcctcctgcttagtgtaatgagaatttaaaagtatcaattactcactggtaacccaacttcccatacctaaaaggatgttattaatcataatagagtcaaaaccttgagaagtaaacaaagaggaataaaacttagcaatattttcagaggcaatacacttggctgaggtaactttggtttcattatcaagtatctgacttctaataatgttagatcttttcttagaagatgcatgctaatgaaagaatttagattcttatcaccagcttgcatccaattgaccctagactgttgatgccaatagacttctgccttataaagaaatgcatcaagttgggaactaggatccttggctttttgaaaatcatccctagtcttaggaaccttagactgtaaactttcaagggcatattggatttgaggaatcctagacttaaagtcatacttatgtttactcttggatttagttttattgacgcagaagctttgtcagtctaagaaactctaaagtgtattgggagcatcacaagaaccaaccccattccaagaacctttcactaactcaaaaaaaaataagctatcgtttagccaatgattctcaaataaaaaactactttttgaccattttactcttactgagaatcacatcatcagagaccagtttatgaactctatgatctgaccctaataaatctaaatggaagagagattcgttggaaagagatcaaaccatttttgattaataatgcaccaatcaagtccttcaaaagttttgttatgcttcctgttggtttttatagtactaaattaagtacacaataaaagaactttgtattatctgattatcattgtaccatattccaatagatctcgagatgtgtgtactttaaatcaaaacataaaattattaagtttagagtatacctcttgaagactatcagggtatcctcaaaacttctcgtaagttgtatcccttaatctagatgatgaggaaaccgcaattggactcacactagtgtcttctaaatcgatccaccacacacaaggaatagtgtgggctattagaataaagtgtatatgcttattgctgttgagttttcaacacatgagc

SEQ ID NO: 326257 - DNA, 836 bp, Cannabis indica
tatttttaatttaaatcaaaggacttttatgggatataaataagacttttaagttttattttttgggactacattcttgagagagaaactcatagaaagtggaaaagaaaaaaattgcataaccaattgttcatcattttagttcttttattctcctatctctttactttttaattatgattttgattatgatgattagtgtagagtaggttttttttaattaattattatttcaaaaccctaaagtataattttttgattcgtgaaaataaatgttgttcttaatttttcttatattaaattgtttatatttttctatttgaatgttatgaatattgtgaattatgtacaattaattaaaataattattttagtattgataattattaaaataataaaataattattttaggtgtacaactaatattgtgaatttgtgttacaatataaaatattaaactaattgaattttagtattgataagatgtcacttcaaaggatgagaaaattaaaaagaagcaaaactctaactcaaaaaagtaatagacaataaataaagtaattcatggtagtgaaagatttatctcctcagatctatcagtattgctacggggcatcaaagtgtctagtatttctatgacatatcgtcttataattagttagctttattaaaataaataagtagtatttgatattaaattgtccaataataatattacactttatacgggtgctaaacaccatgagtaccctttagcaatttttacacatctatttgttgtagatactattacatatgtgctcctttaagtatactattgaattgtaatgaccgc

SEQ ID NO: 326258 - DNA, 1460 bp, Cannabis indica
tcttaattagaatcacatgaaattgcattaaacaataatctaaatcgtcacataagtcatgcaaataccttcgttttacataaatctaggttatccaaattttagcattctcaaatctcacttttcagatttcgaattgagatcgtagaacatgcaaaaggtgatcaagctttaacatagaaataacacatataaggataatttctcaatcaaaatgaacaggaatggcaattaacattaactagggcaaactttaacaaacattcatcatcttccctaaatgggagattaactcatgttcaaattcataaccattccaaaaacagaaattaacataaagaaattaaaaaggaaggaagaaagaaactattggtggaatgattctgggtctccactttgctcctccagccgctcttgactgcttttttaggtctccaaatcgcttcctctctcttcatttcgtagttttctttttatttctcatttctcgtattcaaaagactaaattgcactcacttgtacggaatctcgctgcggccatagattccctcaccgcggcgagtgatgacatggccacggtggtggaatagctcgccgcggctactgacctagctcaaaaccgtctctctgcccatagtatttagccgcagccaggaatagggtcaccgcggccagaagtgtaccaaacctcaattttgcatttttcttggctccacttgtcttttgatgcacttttgtagcccggagcttccataacttcgagaaacttgaaacatagaaaacaagtgtaattctgtcctataacatcgaaaagcgaacataattgtgacccgaaacataggctaaaaatagcctaacacaactcaaggggacactagaccttcctggaaactgtagatggatcctccaatgagcacgattttggtgctagactcattttaataactccagagtatgaggaactcctagcaaaactacgattagcactagaaatcaaaatgaatcactagagatctatagtgattcagagctagttattaatcatattctcggcaagtatcaagctcgagggtcaaacatgatagcattcttaagcaaagctaaagatctattagtgcagctaaagcactactccatcaaataagtgtcgtgtgaacagattgcaaatgcagactcaccagctaaattggctagtacaatagattttgatactctccatgaagttcatgaagactcggagcctatcctcatgattgacaacagtccatcatggatgaccctaattgcacacttagtacaaggtattcttctaactaacaaaaacaaagctaagagattgatgagaaaagtagctctcttcatcatcatggacggagtaatgtatatgtaaagacagcctagtttaatttggaaattagctagtaatatgtttaattatagtaaaatattttatagatatt

SEQ ID NO: 326259 - DNA, 1123 bp, Cannabis indica
ttaatccataatgtttattgttgtagcaaaataagctgaattcattgccaaaaataattttatgtgcatgtgttgactatgttgggagatttatcatttagttttcattaactcattgatttattcaatattttgtttattggtggtagattttaatatttattacatccgaaattagtgttgtatggttgtaagtttttacatatttcgctgtttatatagtaaattttccatagacttttgtgaattctttacaaaatttctaattttcaattttttcatctatatattgttttgattatatttttaatttgtcattcttcttcaaatctgacattgtatattttataacttcactttatttagaatttctaaaaaaaaaattattcttcccaatacaagttttatgatatttcttccattatatatatttattttttttctttttattctattatctaaaaaaattaaaatatctaacttgaaaaatatctatgaaactaaacttctactaacctatttaactattttttcaaactaaataattataataaaatattatttattgtgccaccacattaattagcatcggatagctattccattaagtattattgaaaagttatattttgaaatttgaaatacaaaatacaaactttgatataattttattatttaattttactaaataaaatacaaccgcacgagaaacgttttttaatatttaatagtataattaaaaactaaatgacagttaattaagaattgaatagatttttaaaacaatttataaaatatataaaataagaataatttaaaaagaaaattaaaacctaataaaatataattaaaacacatttaaagatataaatatcaatgaaagataaagaaaatataataatagtaataaataatatacaaaatccatcaaataaatgcttatcaatacaaaaacacaaaaattccgcctagagataattacaattaaaattaaatgacatactaaaatctagaaaattagagtaataaaatttttattataaatgataactaaaataaaagaaattaaaataaaattttaattaataaatacaaaaaaaattacaaaatttacggcaaaaaa

SEQ ID NO: 326260 - DNA, 391 bp, Cannabis indica
ctttaaaaataagcttcagtacgactataccaagtctgtgaagcttgtttagtcataagagtcttttttaatttatacattttatgactcatttttaatcttaacatagccaggaagttgatcaataaatacttgttcctcaaggtctccatgtaagaatgttaatcttacatccagctataaaaaaggccatgagttttgagcagccaacgcgatcaccaatctaattgtatcatgtctcgctactggatcaaaaaattatttgtagtccacgccaaactcttgcttatagcctttagccaccagtcgcactttgtgtttgtcaattttgctattttccttcagtttcatcttgtatacctacttaacaccaatttgttgggttttatgc

SEQ ID NO: 326261 - DNA, 746 bp, Cannabis indica
caaacccattttttttgcggtgcgggcgatttgagcggtttgatgtacacccctagggactaatcaactctgagatgtcttctttcttgccacgtgtaaaacattgatgtccaccaaggaaattttttgggttaatatttgccctcgaagtaaactttacacttgtgtggaactaacttaatgatgtgaaccgagcccgtttctcttgaagctaccagatgggcatcaattttgacaatcttagacaattatttctatttttaagcattcctaatagacttagaactttgaattccctttctattatatcaggggattttcaaaaaaatttaagcaaagaaaaagaggaaaaaaaaatttctttgaaaacttaaaattttcatgtatttcttatggcgttaagattaattggatttaaatcctactcttattttaaatgccatccaaaatttatagtagaaaagaagaagagaaacgttttttgatcttttgtttattatttatcttattcattgtaaactctagctttaccttaatctcaatagcattaagaattattgttaccttttaaatttggaattcctattcatattcgcataggaatttcaaaattctaagctaaaaggataagggaaaatatttttcatcttttcttattatttatcttttccttttgtgctttaaatttaaaagactcacaattgctttaggattaggatattgagctcacctataaataagagagc

SEQ ID NO: 326262 - DNA, 756 bp, Cannabis indica
atatttaaaaatttttttttgacaaaaattcacataataatttacatagaaattatagtttaccactaataatgtgtattagtccaatgctatcccttttctcttctctcatcttgatttcaattcctaaattctccatccccgcaacaaatttaaaagcctcgattctcaatctatgattcttcatttgtcatcacgattcttatttattagcaatattcacttcttgatctatgaattttctttcgtctattacgatctaggcacctgataagtgtcttagtctttttcaaaccttgacttactttctaaattttttagttttgttaacaggatatagttgattttatttggttcttttattatatattttttgagatgaagttcattgaacgacaatgttgctaatagatgattaatagaccttttaattggctgattgttttttgtatccttatctttggcgactctttttcttttttcggtgtgggattgttatttttaactagaagagatatgataaatattttggtattattataacttttcacgagattgactatagacaagaatgaattacggatttgattaaaggtaatattctgtcattaaggtaatcaattacttattaattgtctgagacgtcgagaagcttctgtttggttcagtcggccggtgtcgccgatcaacgacggccagtcatctgagagtggtttcaacagcagtcgtctatgaggggttcaagagcagtcatct

SEQ ID NO: 326263 - DNA, 1361 bp, Cannabis indica
ttattcactgttatttattgttattttttgaaacttttgtgaaacaaatgttttaatcattaacatgcaatcatcagaagtaatgcaataccttgttattgtatgtttggatttgattgggagctccgatcaacgattttcaactcatccttatatgatctgcaacaatttaaaaacaagtttatgcttttaagtataaatatttgtctgttaatggtgtgtttctttactctgttttttcatatctttttggattaatagggagctgcgatcctcaatttttgtcaattcatttgtaatacgatctgcaacaatgaaacaacaattatattttttggtatgcgaatgtttttatttcaaagtttgtggattggttgttaatttaatacctgtttcaatttgaatttgaattcactagggagctccgatcaacaatgtctcgtatatttattgaatgttctacaacattcaaatttcaattttagaagaaggactgttgatacctcagttattgatgagattatagtataggatcgttgatacctctgtgtaagcagttttgttgaattcacctctgttgatgtttttttattgtttctgtgggtctgattgttagagtaggaaggttctttgttgatttttcagcgaaatgttgttgaatctttgtttcagcaagctttgtggagcaacaatggatgctctgctgtttttttcagtcggcgagcatcaatggtgttgaagaagataacaccgtattttatgtaattattattacacttaccgtatataagttgtaatttggggtgtaaccgtatatttgttaaatttttcctattatagtgcaattgtgaaaatttccctttagattatttacacaaatttccaaattttttactcttgtggttggaatttttttcaataatatcgtgtactactgtattaagttctcactgttgttctacggttgttttttagttgtttcactattgtttttaactgttttgttttgtattctactattgttttataaaaatacaatatttttgaaaaaaattctgtagcagtatttttgtaaaaattaacctaaatttataaatttccatttattttaagtggaaatcacaatatgattttttaaaactttattacaaatacatggcagatttaagtttgaacactttttataaaattagttgttttttaattttggctaattaagattttcatcccttaaactttaacatgtaccaaatcatgcattctaaatttttctggccgttaaaaattctccttgaactattgagatttaaggacttttatctaatttcattcaattttactatttcagtgattgtttatgt

SEQ ID NO: 326264 - DNA, 668 bp, Cannabis indica
tttaccaaatagaatcataagtatagtttagtagtacttaatccaattccctgtggttcgacctcacttgcgtgagatactacttgattgcgtatacttgcgtaataacataaaattcgtaacagatatccagaagatccaacatccatgcttccaacaagtatcgacatacaaatgctccattcctactctacagatgagtaatacggtgaatcacatcttgtccctccccatggtgaagaggaacataataaggttggccagtgtagccaacttttagaagtacggtctgtatcctcctgcttctggagttataggggccgagggcccatcagttggtgtggatggagccccagctgctgaggaggtctgtgtcgttggtggacatgttcctgacatggatgatgatgtgcctctgttctggatatcccggggtctagagaggagagagaggaccctccgccagtgcttggctcacggtcatgggggcacagttagggatgctactctttggattaggcttggaggctagaactctgtaaggcctactctccttttcctgcatctagattaaagggcaaggcatgatctgcatgagcttgttgtgttggaaattattttaccaagatcttagatctactcacaagtatgttgtttgacaccctaaa

SEQ ID NO: 326265 - DNA, 612 bp, Cannabis indica
ttttttttttcctaaaaaaataacattaattaatttatttaaatattcactaaattaatgtattaacctcgtcgaattgtttttatttaataaatatacaattctatttctaaaaattaataatatatacttttttttttaatgaaattacaaatacttttactttataaaatattaagtttattataacttataattatgatgaatcatcatactattacaatgtatgatttaaattttaaatatttatattcgtaaatttatttattataagttatatatatatttctttcaataaaaaagattaaagtatttaattataatcaagaaaaaaagttattttattctttagttgaattttctacaaataataatacaaaaaagttctacatatccatacacatacacatatattttattaattaattaggccatcaataatttacaaaaataacaaatgatgattatatattagcatatttatatatggtattcgctcatttccttagacaaagtcacagacgatgatgatagatagttcaatcattttattttataaacaaaataaataaaactatatatatgtatgggtatactcttaatgggtattac

SEQ ID NO: 326266 - DNA, 924 bp, Cannabis indica
tgatctatattaataagtaatctgattatattgaaatgagttttattagggcataaaacccaacagtctacccacgtaatagttgaaggggaaaaaaagcatttttttcctattgattattcctttcaaactcacgactgccatagacaagagttatcgcaattttttattgggttctaaaggcaatagaagcaagctccaccttgcttcttgggaaaaggtttctagtaaaaaagttgcttgaccaaaagagttaccaagaaggtgccaatgtttctagtaaaaaattggattgagaccgtcatgaccaggggctttatccctagaaagttggaaaagggcagtcttaacttcagaaaaatcgaagtccctactaaggaaagtgagatggtcaagggtgagacgttgggtaatcctctgcagcatagtgttgataaaatccatattagcccccgtggaggtgaaaagattagtgtaaaactccataaaggtatcaataatagtggggaaggtagtgacagtggaaccatcatccagagtaatacccttaatcatattatttctccttctggaatttgcacggctatgaaagaatttagtgttcttatccccagcgttaagccaattaaccctagaccattgcttccaaagaacctcctcttttaaaagaagagagtcaacagttgattggagatgattggccttaacaatttcctcagtggacaggataggtttctgtgaatagcctcaatttggttttgcaaacagttaatgttgtgaccgaaagagtttttagactattccaactcttgagagttttcatacatttattttgaagctcgaggaaggaggtgaaagaaggagcaaggatactgtgataatatatttgttggaaatttattttaccaggatcttagatctact

SEQ ID NO: 326267 - DNA, 692 bp, Cannabis indica
tcattataacttgaacaaggtatatacacttttgtcctcctatctctaagcactaaaggaactctcataaaaataactttgagaattatcaagccttgaagttttttagtaaagtaaacttttttatagaaaattaagtcgcgcaaataaacactctggattcctttatatagtgttttgcataacactatttaaaattctaacacataacattccataaatgttatggtctcaattaaataagtaaaaaacttattctctaacaactataactcttatagcttttaagaattttaatttaagatgtgtaacatctttttacactcttaatacaagtgataactgtggatgttactcatatcaacaagtaacttcttatatattacaaaaggaatactagcggctaagctacccaaatcacacattttgttacacttaacctcacaaatccaatttttggtggcaaaactctctgaactcgcattctgttatggtctttacctttccgttaaattttcacaattaagtgccaaggtagtaggtctatgtatgtacacaattgtacacgtgaaatattttcaatagtaattttaataatttaaatattataaaaataattttaaaataaaatatattttttatttttctttttctcttttctttttgcttttcttctttttcttttccatttt

SEQ ID NO: 326268 - DNA, 728 bp, Cannabis indica
ataacagtaataaatttattaacttaattttatattttgttacattttagagagcccaattttttatttgattatgtaacagttttggcaagttctcctaattctagttagatgacatgaggtcaatctttagctattttttttaagattttttttttaagattttttttttaaaaccattttatgtgaggttatagtacacattttaatttatatcttttattttttgtattggagaaatttgaaattagttaattaaataaaatcttaaattaaaaataataagaaaaaaaattgtactaaatactaactagagtatttgataagtaaataagaactaccacatatgagttcaatctctagactaatttgaacattttgatagttagagttgatacaaacattaatctgagttacaatgtaatttttaatcttaaaatatctagagtaaatatccattcgttattaagtacgtctgaaacactatataagtatctaaacatgtcataaactatcacattttgataattttgataatgcataattaattttttatttaaattctttttttttccttttagatttttcataattgatatttatactagcaaaaagctatgtgcgaggcacgtatactaaattttatgctagttttttctatattatttgaaagtgatacaattaaaaattaaaaaaatatattattagttattatatgagattattat

SEQ ID NO: 326269 - DNA, 969 bp, Cannabis indica
gaggtgccacgggcacctctacctaaactagtatatatattgattggggatttataattttcttcgtacaaatttaaactcagaatttatacctgcgctctaatattaaaacaaaatcatcttacattgctttcaaaaaaaaaaaaaaaaacaaaacaaaacaaaacaaaatcatcttacattagttatttaaaaaaattcttgcgcatttttttatgttaatttcaataatatctttctaatcatgttttcatatatgttttaaaaaaataatatatactgacttttatttttatgctaataatatttcatatattttcttcttttaatgttttgttccaatattcaaaatatatttatttaaaatatatactattttattttaaaatgtgaggaggaaaagaataataaaaatgagttcaaatatatatatttatatatttatactagtaagggagtacgtgccaaaggcacgtaatacccgtcaatatatgtgggttataattatattttttaatttcattaattatatttaaatacaaataagttcatctatctaaacaagtacataagtgtggtataagttcgtttgttgaaggcaaagttaccagtcattctatctaaatataagctcatctaattttttttccgttattatctactaataagcaaaagtttaaaaaaaaaaaacaaaataataactaacaaacatttatgaaaaaggaaaaataataacacaaaaaagattaataccatacgtatgctcatataattttcacacactatttatatatatatctaataaaaaaaaaagaagaagaaaaactgaaaaaaaataagcaagtaaaattcattttaaaaaaaataagagaaaaaaatagtaaaaatgtagatttgaaaaatggtattttaaaaaaagcaaatggagtgaaaaataagagattttttttaagaaaaagaaaataaaaa

SEQ ID NO: 326270 - DNA, 1328 bp, Cannabis indica
ttttttttttttttgttaagatatgagtttataaatataaataattgattttttcttctaaaagtcttagtttgtttaaattatttattggatttttaataattttagtttgatttattaagatccgtgtttataaataaaataaaatttgaaatattttttttaggaataatttaggttttttaagtaaaattaataatttttaattaatttaatatttttattaggttgttttaataatttttattacatttttcagatttaatagaatattataattttttatattaaaggaggcaaattttgtatttgtcaaagtccagggagtaaaaatactaatttttaacggtaaaagaaacggaacctaacagaaatggatataattatgtaactgctatattttaaggagaatttttaacaagtcgtatattttagggagcaaaatcaagtaatatcgaaagttcatgaggcaaaaatgctaaatattcaaaaaaaaaaaaaagacaatatacatcatgctaaataattttcaatatattttagttgcatgtgtttgtttgttttttttttctttcttatataaatatatatatatatttgtaaattatatgttgacatagaaatttgaccagtaccttctcacactagtgagatgggatgtgagttagtaacaaagagagagacaaaatttataatagttacacatcctgtgttgtgacggtaatgaagttatgtctactttaaatttttattcctcatgagaattataagaaaattaactaaggaaaaagttcatatttatagagagatgctttgactttgtaaggacttttttaaatgtgaaaaataaactagtggagctcttcttttgtagtaaaggaggtccattataataataatataataatacaaaaaatatgaaaaatatttttaggctagtcttgaccactgatgatgatctaatggtgaaaatgacttcggatgatgattgtcaatttttggagtttgaattccgtcaatcaaatcaatatttagtgagttatggtcgtcttattgaaggatgttcaacaactagcgcccaacttgacattctgacgttaaccttaacactgaatgagtaggaaaacgtgcccaacttgtattttttgatgcctaagtaatattttgacatcatttagtcaatttcttagttctagtgaagtcgttcaccacttcttgaagaggatgcttttttgtgaaatcgagactcaaaacttcccaatttacaagtaatatgttgatattccactttgcccaaaaaggtaaaatatcaaagtgtgaatttgaat

SEQ ID NO: 326271 - DNA, 864 bp, Cannabis indica
agaacattagcattttctcaagcaacttatatctataaggttctggaaagattctcaatagagaattccaagaaagtacagttaccatcaaaacataaaattactctacataaggatcaatatccaatggctcctcatgagatggaggacatgagaaagtacccttatgcatcaccagttgggagcttgatgtatgcaatattatgtacaaggcctaatatatgctacactatagggattgttagttgttaccaatctaattcaagtttgaaacactggataactgtaaagcacattcttaagtatcttcgaagaacgagggatctcatgcttatatattccattggagagttaaatcctactggatatacggattctaatttccatcagacaaagatagttaaaagtcaacatatgggtcaatatttaatctcggtggtggagctgtagtttggagaagcattaagcaaacccgtatcggaaattcaaccatgaaagccaaataaatcagaacttccgaaggctaaggaagtggtttggttgaaaaaattctatattgatctgaagcagttccagaggtaggaaagccatcggtgctatattgtgacaacagtggagcagtggccaactccaaggaactaagaaaccacaagagagacaagcacattgagaggaagtaccatctactaagaaatatagtagaaagaggtgatgtgacgatcttaaagattgcatccgaacatatcctggtagatccatttataaagacgctaccggcgaaatttagccaatttacttttagggcaagtggaagattattagggactatgccctaaaaagcttgtaaagatatttatgattatt

SEQ ID NO: 326272 - DNA, 510 bp, Cannabis indica
tcagtatttaacttgagtctgcctgaaggaggagccagccatttaggcttagctggggacacccgtgattgtggaacaaagtcatgaggcagtggttcaggagaaaatgcagcagaaagaggctgagaacttgcaccagtaggagcagtgatattctgagcatctgcaggtgaaccattgaagctgaggatagtgtgatggtgggaagattgagccttcttgtactcagcaatataattgttagcaaattgccaaatttgcatagcagatttgggagtcttcgaatgagtgtcagcattccttgctttccaaatgcaccagagaatagtgatgaaaagttcaaccttatccgattgcaatagtgaagaaacatatactagaaagtctgagaaagaacaagtttttgacaaatgccaattaatgtttgattcccaattcctccagacctgtctagcccgattgcaccagaaaaaaacatgattaattgtctccaaatgcatctgacaaagg

SEQ ID NO: 326273 - DNA, 1158 bp, Cannabis indica
caaagtaaaaaaaaacttcacacatatatataattatgaacatataaaataaataaataattacgtaatttaatattattaatttagtttatatttattattatgtgttttttataaaataattaatttaatttaaatatttttatagaaaatttattaaaataatagtaaaattttaatttataaatttatgctctaataaaatattaaaaaaaattgagagaattaaggagaaaaaagaaaaatagctttagagagattttagaccgccacgtcaccgtcttatacttctcctttatatatagatatatagatagatagtaaaatattaatttgtagatttatgttttaattaaatattaaaattgagagaataaggagagaagtgaaaaatagttttagagaatgacaccgcctcatacttttcctttgtatatctattctatataaaatgtgatgttgccaattaattgaagaagttaacaacaaccacacaaattttgaaaatatatctatatatttaaatatatatatatataactaattaaaatcctatcaccgatttagatttggaagtgtgatatatataaatattgaaaatatgaatagagaggatgattattaataaatataaatatcaattataaactattgagtgaattagagaagcaaacatatatgtaaaacttattaattacttattaaatactacgtacgtacgtacatataagtatatgcatataataattaacatacgtaagatgtgttatatataatttttttaagaaacaattttattcatatcgatctgtaatttattcgggatatttctttattgaaaacacaactagaattagaaattaaaaaaaacaaaccaactatttggttccaatgattctcgaatcgatcgttttaacaaaaaaaaaaaaataaataaagttagaataaaaaaaattgtaattttactgttatatccttaagaatacttatattattcagtttactgcaccgctcaaaagataaaatatagtagatatgttctagcaagttattcaaccactcttatcattacaaaaaatcttacttttagttgcaatataaaacttgtaaactaaaagtaaaaatattgtgactaattataaactcatatattagtca

SEQ ID NO: 326274 - DNA, 637 bp, Cannabis indica
ataaacattatgtttatattttatattgataatatttataaattataatctaatatatttaatatattactttataaaataaaaatgtatgtttatttattttacttattttgttgtaaggcaaaatatatatgtttattgtttatttatatatgacttaagaaaaattaattaccttatatagattgtatagaaaattaaaattatatttttgtatctatatagaatgtataattaaatgtaaataagctatattttactatatagtgtaataaaattatataatgtatacaaaattataaatttccctatatatataaaatttaaaacaaaactagttttatataatataatttttaaaattaatgaaagcaagagtggattgttaagaatgtgcagaagcatgacaaagttgagatgaaacctgatgcagatgggtttcggccagttgctaagggctggaaggctaaggataaggggagggattagttgctacaggcactagtaactctttccaggtgctgcagcagcttgataagggaaaggaaaatgatcaaatgggtgagatgaatgatagagggtatgagattgttaacaagggagggggggagattcctctcttggagatggataaaat

SEQ ID NO: 326275 - DNA, 1303 bp, Cannabis indica
agccaataattcatccaatatttgttcgacatcatcttcatcaatgaacaaatacttcatagtctcttttataatggactgttttggtagtattttagcttttcctttatcttcatcttcttttacaaaggtagtcattgaatcataagatgtatcattttagcgagctatttgcacctcaatgatacttgctttgaaaataagctcattgaaggttttaggctctatggagcataagtaaactgctatcgcagaaatgagagcttgtctacttaattgaaatgcaaatagctcagataatttttttggacattgaattcaaacacttctccatgtagcaataaatttgttgacagattcatttggtctttgcttagtttcagctaggtcactaacagtgacatcccttattgaacttacaaattgagcaatgaaggctctttgcatgtcatcccatgtgattatcgatccttaagtgaatgcaaaaattgtcttatgagtaatgcatctgactgagcagattcaccacatcagagacaaactacatgttctgtaggggatccatttatccaattaaacttttcaaattgtaagtttatgtaatttgggggacatggaacataatcataatgggatgggtatggtttatggtatccaagaataggcatggttattgtttcatagccttctcaaatactttctatgattagtgctttcaattcacgatgaataaagaagtcttctcctccttaccagttaggtcctaataaagaaggccaactgcgcaaagtttttgagagttacatacaagctgatgatgtgtacaagttggggatggccttatttgttatgggcgtcctgactggtaaggaggagaagactgttgtttctttatttgtgataagaatggttgataacttggaattcttctatgagtatccgtttggaaagatctccttcaacaagttgatggaaatttgcaacaaagattttgtagaggttaagaatcagatgcacaagaagattgagaagggagtttctcaaaaggaggcgaaatactcatcataggactatactatagcgttgcaatattgggcctatgaggccatcttagagttagacaatgaatatgcagtgagaaaattgcatcgctttcccataatggttaattgggagagtaaggagaagaccacactcagcagggatgaagttataagtttgttttcgacaaatgtaagtcttttttacgctttgcagtcatatatatgttattttaatttctatctaataagacattggtttt

SEQ ID NO: 326276 - DNA, 1258 bp, Cannabis indica
aaaaatcatacataaaaataaacaaaaataaaggtggataaaaaactacactcaccctcaagcaaacacaaaacccttaaaataatatacatatacgtaagcaaatatcaccatcaacacagtaccaaccaaacaaaatctgaaataaacactactacaaaaataagttttcctgacgtttttaaacagacatttaaagtatttccgtcggtttctataaccgtcgcttatacgaccgtcataaaatgggtagaaccgtcgctaatgtgggtttcctgacagtttaaaatcttcgcctataatagggtataggcgacggtttataaccgtgccctatactatatatagtataaaggtgacagttttaaacttaaactttcgcctataagagtccattaaaaaattagtaattttattaaaaaacgtcgcctattttgtttactacggttttaaaccgtcgcctataagggtccattaaaacgtcacattttattaaaaaaacgttgcctattttatttactacaattttaaaccgtcggaaatactaaatttttctcgacggttttaaatagttacttaatttttgtagcgacaatctccgaaaaaaaattatttttaagaccatcggggaattctaatatttgtaatagtaaagtaaataatagataaataaatgggaatattatatataaaaaaaataatgagacacttacctcaaaatactattaataaccatacacttaagtaacacacaacccaaaaggaaggagccgctgtcgatgaacgccaaacagagaagaagaagaaggaacacggaacaacccacgaacacattattcagactaagaaactgattttaacttgtattacaattactagcttatcctttaaaagttgggctgaaaataaaaacatgaaatatgagttttggacattaaatttacaaaaatggaaaaaattacactgcatacttattttcatttcttattttaatttgacctttattttattattctttaatttatatccagctttataggttatatctccattatgtgtgttagagaatagagactctaattgggaaatttcattaattgcccttaataatataacctatatcaaaatttatacccttttataatttgtacaaattgattcctctaattttaaaagattcctaaaatacccctaaattaaactttccctctctctcagacgttcccgctctctttctgacgttccctctctctctctc

SEQ ID NO: 326277 - DNA, 814 bp, Cannabis indica
attatataattttgaaaggcaaaattttttttttgtgggcccctgaactaggtgggccctaggcacaggcctagcccgccaatgcccagggccgcccctgttgcttacatcaacttggcctttcttgggaacattggatttggaccagtcagtccattcaaactcaatggtgagagtggctggagggtttttctcaggtgcccaaaaccaagttgtatagtcacccttctcaggtgcagtgaaagcaaaatcaccccattccacattgtccatgtagtgataattgttccctttaggtgaacttacctacaatatacaaattacaacttctcactcttgaacccttaaatacaaaattgaaaaacacaaacaaaattatgtcgaatactctaaagtgttctaagctaagcataaatcaatttccacaaaattaaaattgactaagcatttaatacacatactctaaagtgttctaagctaaagtttgattgatttcttttaaacacttcaaccacacaaccaaatctatcttaattctcttgagtattcttgccgatctctttaaattttcacattgtattttacacatttacttgtattactttatattgaggtgaaattgataccaatattaaaataactcagtttaagtaaaattgtcattataaacaatttgagttagagcgggatcagtcttaaagtttttttgggttataggaaaaaaattatttttagacccttatttaaaaaaactatgataggatccttatttagaaaaaatataatattttttaaaataagtaaaaaaaaaaaa

SEQ ID NO: 326278 - DNA, 1371 bp, Cannabis indica
ttgtttcaattgatatcgatattaagaattgtacactcaatgaggggacatcaaaagatctgaatggactgtgcatgtatgttagttagtggtaactcatctgacggggtcagacagattagggaaatgacaatatgaattaaatttgctggtattcctaagtggaatataggacataagtagccaatggaggcatccatttaattgattcggagaaaaaaatcttttgtttagaagtgatctagtattagtaaaggtgggacaatttatgagtatcgcccagaatcctaagtgaattaaaggcgacgattatgtgggttaatctatctactaccaagggaaaaataaaacaaaagagacatgagtcaaactgcgacagtcagagccccgtgatctgcaaggaatagattgggaggtatataatcccacatcgcctgggagaaggttgtatatgatgattatgagactatgtaggtatgggactacattatcgtaagggatttgaatggattgattggggccacctatatcaacgaggtgtatcttatttttggtagcctatgacgaaagaactctacgattaagtgtccttgacttgaggtgatttcatttcaggaagggtgagttcttaagaagtttttccaagaagcatgcgggtcagaacaaagcacgttgggaatactcgagttgacctgaaaagtcagtcatcgatccaggaagtggtcagagtggcgtacctgtatataaaatccaataatccgtgggggagaaggcccgatggaggcttgaagcaagggcgttagaaaggtaacgtatagcaaaaggttagggagagtagtggttttactaaggtaaagaagattacttgaatatttcatggtgatatggtaatgatggagaatacttttatatttaactggatggtcaatctggtattttgaataaataggtacttatattttgaataacaagatacttacattttggataattatactatcttaagtaattaattacctgtaatttgggtaaccagttacttatattagaggagctcttatgacgattagatcttaagaataaccacaagtgcatccacaattacaactgaaagttgtaagaaaaaaaatacaataataaaaattaatattaatataactatataatgttaaatgtgcaaaaataaataataaaaattagagatgatggaagattaaaaaaattaaaaatagagggaatacaaaagggaaagaattaaaattataaagaaaaagaaaaggaaaataaatgaaaaatggaagaaaaagaaaatgagagggaaaaaaagaataataaaccaaatatatatatatatatttatatgaaaaaata

SEQ ID NO: 326279 - DNA, 743 bp, Cannabis indica
aaaaaaaaaaaaacaatattactattagtataattaaatatcgttaactaattatgagatgctatctactattattagtgccaatagtaatattcttttaaaaatactattattagagatgatttaatcactcaagaaaaaagttttcttctctttcggcaaggttccgatgtgtgtcgcaccaatttaattgttaccacgtgttaaatattgattgggttttaatataattggtgagaattgggtgtttgagtggtggaatttatttgttaccgtggggttgaatgcagtggattgtgaacctaggaaacttgttcgtgttttgaatgtttgataatttttggtggccgtggcgtttaagttgtgaattgctaacttagacttagtaattagaatttcaaattaggctgaactaagatactttacaaaaaaataaaaataaaaataaaaataaaaataaggctgatggtcaaaatcgtaatttaagatgagtgaataattagagagagagtaaacactaaacaattttgttctcatagtacaagcaaggccccactatttacggtacaaattgtttcggaatatagtggtacaatttttcttttttgataattttttttgtgataactattttatttattataaccaatataatggtataagtaggggtgttcatccgatccaatccgcatttttttggtcaaacaacatccaatccgcacttagtgcggatttcatatttt

SEQ ID NO: 326280 - DNA, 531 bp, Cannabis indica
cagcagccaaaacttgaaaaacgacacgtcgtttagatcgtcttctttagccaacccgggtcattttgacccgtttttcttcatgtgggtccgacggacccgacccaaacccgatcggaaaagaggttttccgacgacgaaatcacatgtttttaaccccgaattgatccaaataaaaaaatatagagattaaggtgggttttaaaaatctaaaatacgtaaaacgtcaactttaatttcaattaaaaatttggatccgcacggaatactttttagaaaattcgaaatttcttgtttttcaaaatatttatcatgcttaaatgaatgaaacaatatatgtatatatatgaatgtatacaatataaatatatataaatgtgaatgaatgtaaacaatatatataaacgtgaataaatatatacaatatatatatgaacgtgaatgaattgaatatatatatatgtatatacgtaaataaaaatgaaaatgtatatacgtataaaaatatatatatatatacacgaacatgaa

SEQ ID NO: 326281 - DNA, 1308 bp, Cannabis indica
catccacttgtgcaagcacaaattatcaacttaaaaatatagtacaaggcttgatcgactcaaaactcactgatctcaaactcggtcgtgcacgaggatcacctttctcccctgaaattgaagttcttgaactaccccaaagttcaaaatgccaacctataaaatgtatacagaaagaagatcctagtattttgagatgcagatggacatgcagggggtaagaggtgatgtacggtgcaaaaattttcctgccacactcgcagaggccacccagcaatggcatttcaaattgtctctaggaaggtttaactcatggaatgccctctcattagagttccatgcacagttttcctcctctcgggaacttcccttccacctagaagacctggcatcaaaggttaggtgttgactgaagaagggagactggcatcaatactggggggcatcgagcctcttgaggaattgtggaaggatattaaaggctaactgtgggatcaatgactgaatagaagggttcattgagctcgaagaagttattcggtgtgtggatactatcgggcaaaagaaaaaccaacaatgtgccacttcaacagggatgtccgtccagaatccacaatatcccagtagttcaaattcaaatgggaagaggtataacaacgacaacaagcagggtaataaaaagaaaggcaaattcactggcaatgccgagcggcaccctagggaaaatgcctctaaatttactgctttctcggtcctaatagacaacatagagacaatctatgcgacaactcagtctatggtgtcgtacaagaaaccgtctctcatgaaaaaggatgtaagtaagagacacatatcaaagttttgccgctttcatgcggactgctaccacgacacaagcaaatgtaataatttaaagcatgaaattgagtttttgatcagaaagaagaacccgcacttacataagtacgtcaaggccgatcaagatcaaagggccacccaagcagacaataataattgcctccacaagtagatggacatttacttgtcattattgggggtccacatcttggtaaagactcaacctttttggtaattgttttgaattttcgaatgtatgctgatgtgacataatattatttgtgcaaatagttttcttaaaagtatttttataaataaaatcaattttaagtatgatattttaaaaaactcaacaaaaatattgagcagtacactatcatatctcaatataagaaatatgtgttgggttttatgccctaaataaaactctttacaatctgattagtaatc

SEQ ID NO: 326282 - DNA, 729 bp, Cannabis indica
tgagttttctatctttttaatccatattttgtttacgtattttctaattcatttcacaaatttgacccaaaatctataaaggcaaagcagaggccagcgtggtacactggtgtggtagtgacattatggattttgtaacattggcgaaattattctcaataaaaaagctatacggtctatgattataaacttttttgtaaagtggttttcattatctatgtttattgtttaggtaaatttcacatcaaattctgtaaatgttgcacataccagccaaccaatattagatgtattattcagtcacattaacatgactcataattgtttctcttcattaactataaaattataaaatattgttattaggtattaattttcataatgtgttgtgttaatgatttttataattatattattaaattaaaatatatacgatctaatataaaattatagtattaaagatataataatcaaagtggtgttcaatacttataaaatttagtttatagtttaccaattctcaaaattatataagttatacatggatgtaattagggttgtttacctaattcaattcatactattttatttatagtgtatttgatttgcactaagtgtaaattttataatttgatctgcacaatagttcaaatctaatccaatccataaaagtacgaattagatcgattatttcagataagttaatttttaatattaaattatttgata

SEQ ID NO: 326283 - DNA, 606 bp, Cannabis indica
cttttttctttctttcttcttctacccagtaaccttcttcattcattcattcattcttcttcttcttcttcaatctacgaacaccaaaactcaccacatctacaaccaccactgttgatcaaagcacaataaaatccaacaaaaatctaaataaatttcaaatcccacaaaaaaataaaaaaaaaacatatggaacaaggaaaaataatgaattagatcccagaaaaatgaagccactaatcccaaaattcaaactcaccatcaacaacacaaatcacatatttatatatatacacagagagagacaaagacaaacaaataaaaaatgttggctcgtcaagctttcttgggcttggttgggtcgagcagctatgtcgtggtggacatcaaggaggcctccgaggcaacacctatagacgcttttctcgagcgagtacgaatcggaggagttgaacccacctgtagacaatttcctatagacgattccctcatccctaatgttctcatcggaatggcaaaccttaggaggaggcgtggccaccacctgagccataatcaagagagagagagtaatcggagacgttgaagaagaagtagaaggagaag

SEQ ID NO: 326284 - DNA, 877 bp, Cannabis indica
ggaatccatatcttgtccacctcaatttcttagatgtgtccacttacaagggcatttgaagaacttacctatatggataacacaacttcaaaccctaactaggatagggttattttggtcaaagttggaaattgatttgttgggtgtccttcaaaacatacaaaatcttgtggagcttcaactattttatgatggatatgatggtgagaaattgcacttcaaggaaggaacatttccaaaacttaaggtgacttgtgttgtattccttgaacaaattgagtttgatagtaatagaagaaggagcattgattaatcttgaagagtgcttcattggtccttgcccacaattaaaggagttgccttgtggattccaacatttaagaagcattaaaaaagttcaatttcgagaatttccaacagtgtttggatgaccaatcatgcaatatttcaaagcttttcaaatgttattggagtagacattcaattgctttacagaattcgtgatgaattatggagctttaaattggaatgtgttatgcaattcgtgaaacatttgcaaggtaataattatatatttatatatatatatatatcatatatatcttaaatcaattcaaataatgtatcatctatattgaatgttattttttgttttattaacagacaatgtcaatgaagaagaatgggagtcacaattggacaattatttcagtaagttatatatttttgttattttttagtttctatatatttataatagaaattaacttatacatttgttactataattgttaattaattaagggctcgtttggaacgccgtattaggccgtattgtattgtattgtattatattgaattggattatatatcatat

SEQ ID NO: 326285 - DNA, 915 bp, Cannabis indica
ccgctgctagttggggggaattcttgtagtgtcaagaacgggaaacattgaaatttaatttcatttagatatcgcaacaactctagttcgattacaaatgtgagattttgagtggggttattattattattaatgtgtatttttttgagctatagtctattcgttcttacgtgtcgtatttttgggcttgtagtatcgtgtcgtgcttaagcctattcttttcgtgtcgtgtcgtacaaatttgtagctttgtgttgtgtcatgtccaagcctatatttttctgtgtcgggtcatgctcccaagatcgtgccgtgtcataaagtctagctcgtatttacaatattaatattctttacctcttatagttataagctagcattaatggttttggaaaaagaacattgttattaggtaccaaggtgtctgacattaataagaattagctacttataaaatggttagtaattttttataataattattaaaataaaataaataaaatctaatattaaattgtacagtaattatataaactttattgtggtgctactgctggacaccatgacatttagcatttttcagaggaaaactagcataataatatcaccatccatgtgttagcctaaaaattgaatttgataatggaatataattaaacaaaaaagaatgaatagtatataatttcattttatctatatgaatagcgactagcaatataattatttatttcttcacaattatactttgtatttttacttatttttgttacgcttatacttttaactcttatattagtagtgtttattttaattttttttttctttacatatctctccctttctttcttcttcattattttatgtttgaaaacatattaaatctaaatgggaaatttgattttctatacttagaaa

SEQ ID NO: 326286 - DNA, 1990 bp, Cannabis indica
cactatttcagtattgtgaaactaactaagcacttttcgagaatgatgattatattcacgagtttacattactttgcttttatatttggtaaaattactatgttttcagttgcttttgatgcggtaccattcatggtccaataacaaatattgattgcttaattagcagttgtattccatatcatgtgtaaatttaaccatgatgcaggaaattttaaagtagattttgtcgttggctggggcaagttccaattcaagatactcataacctcctaactcgttattttctaactttaaataaaaaagagagggagagctacaatcaattcacttttgtctaatgcagaaagcgaaaggaactgctgctgctagaaagcatgcttccgaagcattaaaagctttctttagtgacccagaaaatcgtcggaagaggagcattgccatgaaaggtcagtttctattcacaagcttcttcccaatccacaaaaccatgttttgcttgcacgaaatacttgataatcaaatagttaatccgagcttgaaagtatcatagcatgggcagcccaagacaccaaaagtatttcataattgactttttctattgtaatgtgtaagccattcttgcctaatgcaggggtgaagttcttctgcaaaaactgtggacgcgaggggcacagaagacactactgtccagaactaaagggtttaactggtaggcagttcaaatgccggatatgtggaaaaaagggacataacagaagaacttgtccaaagacaaggttgctgcatagtcacaaaagaactgttagaaaacattttcactgcagcatatgccgtggaagaggccataaccgtaggacttgccccgaagttattggtacagagtcaagtaattctagtgtaaagaaaggccctttgggttctgaaagcagaaaatacaagtgtcgattgtgccaacaagttggacacaacattaggacatgtcctagtaaaaatgtaaatggttctgagttccaaaaagaaaccagatgaatattttgtgctttactgagatatataatgaatttgtgtttttttcttttttcattgtcttttaaagaatataaatcctcttgatcaaaatagagtatagaagcgagtgagcattacacgtgcttttttttttcattttcttttttgggacaaactatagagaaatttgagcatggatgcattgttaaacagggcaaaagtatgtctgatcatctccaaggtactatttattttttatttaaattgttaattagagagccatttttcgtaaagatactttaatcatgtttttcgttttaattaaaattgattatttttattatatttttataatttgaattcattcactatagattaatttaatcaaataaatgaaaaaaaaaagtagttggacaagtaatgtatgttgtctcatcatgtatttacttttaagttgtgcaatggagtgtctccgtagagatgagatggttcctagtcctaataggaagtattgcagccgaggacttgttcgaccctccaaaggctttggcgggcgtagtttccaatcagccactggtatactcccatcctaactgtgaatttgtaactaaaggatttcatctcctgaaacaccttcaattgtacatgttcattcagctgatagaaaaacgcgcactagagtttccaacagcaagaagaaatactgactgaaaaagtaaaagtgttacggctggaccttcctactcaaactcaccactcccaacttctttaccaattccaaagttccctatccaaccaaagactactctgtctttaatgttgcctgagtctgcgcttgcatcccctaatgaaggttagtctcttcattttttgaattatttatctcgtacttattaaattctaatgatcaaatcacactgcaacagcagacattaatgtgttggaagtcaatgagaacactgcattggctactgagacg

SEQ ID NO: 326287 - DNA, 1537 bp, Cannabis indica
tactgtcttcttataaacaactgtaaaaacaacaaaaaagaataattaaagcaacagtgaaacaactaaaaaataaccatggaacaacagtaaaaacttaacacagtacacagtataaaacttatatagtattttttaaaaaaaatctgtctcacagtcaaaatgtaaaaaaaactaaaaatttcaatatatggtgtaaaaacccaaatatatatgctggtttaattctaaatattattgtaaatttatgataataattcaaatgacaaaactataaataaataatgccaaatttatcaatacaccaagttaatttattgaaaaaggctaaatgatgctattgttattgatacaatttaatattgagtctcacttataataattatagaaaatcgctaatcatttataaaatactatattactaactacataataataagagtaagtactattttagactttatgttttgtaaaagttaacgattagaccatctgttttgttaaatgataatatagaccctatattttctataattgtaaaaataggaccctgagctcaattttcgctgagctcaattttcggcaattttgttttttttttttttaatataattaacttgacgacaatttttaacacgaacagatacataaaatgtaactaattttgacataatatctcaatatttgattattattatgttttattttgaattaattaccatttggaaaaatgcaagattcattttatcattcaacaaaatagaaagtctaattagtaacttttacaaaacacaagattcaaaatgatatttatcctaattataataatactctaatttattatatataaatttattgaattattttgttatttaattatttttataacaacccccaataatacctaaaatggcgtgcatcacgattattatattatataatttatcattggaagagattactatataaaaatatattttttgttggtacttataagtgtatctaaaccctatcttgacaaattggttgggctaccttcagatccagatctcccttcaatcaaagatcatcaccgggcccactccaactcctaggcccatattcattgctatcatgaggtggcatcttactaattattagcaattattcgcggtgcaattagtgcgcgttgtaattttttttttttcaaattaaactgaatatgcgatttttataatttttcaaactgtaaccgcacagtgagatcttaaaaccgacaaaaatcacactgcataaatacaatgtggtgcagcgcgatttgagcggtttacactatcatcgttataaaatattataatggaaatttaaaaatcaaaataataaagccttaccaatacaaaacaaaaaatcttattaaagtcttaacatcatgtataataattatcaagtcattatattgaattatctctaaaaaaataaaataatatgtacatattatatatatttgttcttatataaaaaaaataaaaattatattgtaaaaattagtaactttgta

SEQ ID NO: 326288 - DNA, 1021 bp, Cannabis indica
aaaaaaaataacaaagaaggaaaataactataaaaagtaacccaaaacgtaggctaaaaatagcctaataggagttaggtttcaaatatgaggatatcacagtttattgtgacaatcaaagtactatgaatcttatggaaaaaccaatatttcactagaggtcaaagaaaattgatatcaagttacacgtcataagggatattgtgtcatctaagcgggtgcaagtgaagaaaataagtacacatgataaccctagtgatattcttactaaaagtgtaactctagacaagtttaggcaatatctaaagttgctaagcattcaaaacattggacagttaatatcctcaatcatttatggtggatcagggatcaagtgagtctagtcaggtagaattgttgggattaaattcacttaataatctgtgaagtcacttgttccatcttaacacgtcccagttgaaactaaaaaaactgcaattaattataacagttggctttgttaccaacttaaatagatcctcacaaacacctataaatacatttgactcaactcactcaagggcgatccaatgctcatacttcagattcaaagccaagtttagaaagagattctccaagatcacaatgtgtgtgtgtgtgtggagggatgtaattggagtatcaccgttgaagtgatgttaattgtttactgtgttgagtggtatgcttagacatatctaattttgtaccaagtattattctatcaataaagattcctaattcattaattcccaagctaagtttattcttgcctagtttcatctaagttcagttttgattttgtgattggttttagtttgaattgtgtgtttttgaacattactactattgtaacaacagtatttttgttgggttttgtgccctaaataaaacccattacaatttgattagttgtcaatctaagaagtttgaagtcatttatgtttgcatgaatttttcatgcttatatttattcacaattacagtattgtcaacacagtgg

SEQ ID NO: 326289 - DNA, 1360 bp, Cannabis indica
aaaaaaaaaaaaatccaacttgttatatcatttttctcataaatttagatctaatttaaatatatagtataatggacacaacaatatttggtatgtgtttttgtgttctccaacattcacaataacattttttttttcaaagatagataccatattaattaatgcttgtgatttcatatcaaacaaaatcacaacaataacattttaagattataacaatataattcatatacaaatattattaaatgtaacactatactatatatgtaaatataatatctactcttataaagatgcaaaatatatcaattggttcccccaaaaaatagaaagaaaagattatggccaacatggtgtatatatatatatacacatgacatgatcatatatatatgatgagattttaggtcttgtccaactagcttatatatacatatatttttaggccactagaaaatttgaatttgggaaaaaaacaagcataaacatatattggtttgcgatcaataaattaaccccataatcaatattttattggaaattaaagactacaatttgatataaataaatatataaacaactacatattgtattattaattaattaattataattaaaaatagtacagctggcattatggccaagttgaatcaacttggatttaccatatacgcatggagaagagatatgtaggccattaaatatatatgcacgtggctaaagtgaaacaaatgaggccactatatagattataataaagagtaatttgcggtataatatctaagtttaactcttaattataaataaatactaagtttaatttttaacaataataatacttaagttataatttaaaatttttataggtactgactgttaagtgttaagtaaattaccacgtgacaattctgtccaagtcattaaatttttaaataattattttaaatataccaataaaaaaataacatgtgaataatgacttaatatttaataatcaggtactacagagtttcaaaaatataacttaagtattattaccgccaaaaattacttaggtattcatttgcaactggaagttaaacttaggtatttataccgtaaattactctataataaataaaaattttgctacaaaaaattgtgctaaattctttcaattattattctatttgcacttaactctctaagcttaaattttagtagtaaaactctctaaatattactgaattgttagcaatctcacactgtctgtctggggaaggtcaagtgtgatatgattctgagtatgggactacacatttgaagaaggcttaaatgaattgattggtactacctatatcaacaaggtgcatcttgtttt

SEQ ID NO: 326290 - DNA, 964 bp, Cannabis indica
actgaaatatcatttataggtacacttctgctatttgagttcatctctttaaatcaacaaatgtattctttagattaatagttatgcacttatattaaaatataatatatttgtttataaaattaaatcttgatattacatattttatgagtgatagagaactctaacattggtgttttttttttcgctctactttttttttcgatcgacttttttttttttatggatcagatagtggttagaagtttttgtttatgttttagctctgatacaatgttataattgtaagatgcatgatgttttatctcaaaactaattaattgtaagaggagtagtgcatatcttatatactatatatgatattatatttttcacacattagcaatgcgagactatttctaatgctaccttttcaagtttgagcttggaaaatgtaggtataataaacgacatttaagagactacaaaattgaacgtgatttttaaaagaatctcataagtgaaaattgaaaaatttgtgagtgtacacgtcgagaaatttgtagatttttttaaacaagttacagactcaaaacacttaaaaacgcgcacacattggtcaaaagatcccaaataaaagtcaaaggcgaatagagcggaagctatttaattactatgatagcatattagaatttaaaataagttgaatataattccaacttaaaactaattgactacgagtaaagtagctcataaattttatacattttattatctttatacaaattaataattggagactttctaacaatagccacttttgctttccactgttcttcgactaccgacaaaagattatctttaactagtttttgccttatttctcaagtagttgttgaagatttagatttaaaaaagaatcgtcttttatctcaaaataaataaactttttgagaatccaaaaaaaaaaaaaaaaaaataaaat

SEQ ID NO: 326291 - DNA, 1060 bp, Cannabis indica
tttttgagccaggttcattcatctcggctctcgagttttcagtcgacgtcgccaccggaggacaccatcccttggttcggagccatctagaaccaacattcttgtgattacgctgcggtagggctttcatgaattcgccatacggcttctctatgcgatcaattggttgatgaaagagacgtgggcagaatttgtcggagtgaccaataatgccacaaataaagcaaaaggtagggcatcgctcatatttgaagttaatccaaaaccaattcccatcttccttagtgatcttcatacgtctgcgaagtggtttagtaatgtctagagtaattctcatccgaagataatctcgccatacaccaataaaattcttgggatcggactccaaaaatttccccatagtatttccaacttttctgatggttgattcggacatgaaaccaggttcgacatcatgtaattgaaccccaatatcaagagtattcaatgctagtagtttcggatcaccaccaacttttaatctctcaataatcagttgcatacgatcataagtccaagggctaccattgatcacccgttggatatcaatttcatgataaaattgaaatagaaatcgattattgtcaagttgcttaacaaacattcccatacctggttgccataatgaagccaatatattctgcattttttcgaagtcgattactcggttggataagaatctccctaccaggcaccaccgatcatcaataccttcatcccgttcttccgctgtgacagtaacatcttccaagtcttcctcatcgatatgaaacatcagagtttcattctccagggctccagtgtgtcgactagatgaggccatgaagtttgacgatgaagcaacgtgaatccagtccctctttcccaggtacgaaagcagcaaagagacaaagagccaaagaacaaaataacaccctatactggaacaaaggaataaaccgaaaacgacaaacaactcccactcaccaacaaaactcacttaccaacaatacagagaaaccatgtcaatagacatgaacat

SEQ ID NO: 326292 - DNA, 826 bp, Cannabis indica
taattttgaatcattactcaaccatttgcatattatttctttttattttaagttgtaattagttgattttacatcaaactttgtttgcaatccctgtggagacgatcttacttatcactttattacttgtgtgactgcgtatacttgcgtatataatttttcacaacaatgaccattgttggatatgtttgttttcatgggtatggcttgaaactttgcgaaacagcagactattttgtgaaaaagcaagaagcattacagacaatgctttttgtattaagccaaataaactaaacattacataccaaaagaaatcatataaagattgaggtgagctacttcaattttacaagtccaaatgacttcatcaatagtgaaaaggagaaattaatgtaagtaaaatcggacaagtcttctcgggtgatgaaagagtttgtttctattgatgattctatgataatgaagaattgaacagttaaaatagtcacatctggaagtacctcatggaagctgcaaacaggaactaactttcttagtggcactcctgtctccaacattggctctgcaataacaaataacaatacctttacacagaagatgcttcttttccttgttgacctgtaaatgctgcctttttaaagtttcaatgttattatcattgcttgaacttgctttttagttgttaattatgatgctgatttctgaatattcctgaacagaaaacatatgttttctacttcttaaatgatactgcagactgcccatatcattattagtattaaaattgtgagaagaagtgcaatgtggtcatttttagaaatattaa

SEQ ID NO: 326293 - DNA, 1268 bp, Cannabis indica
gtaatgggttttatttagggcacaaaaaccaacaattttaataacactaaaattagaagtagtgctgataggaaattagggaatgttagaattgatgatgatgatatagaagaggaggtatcatacttgaactctcctatggtaatggctttcgttttatgaatttattttatacatgaataattagttagctatttaaaatagtactaattaaacttattgtcgtgtactccaaatagtctttacatatatgtatatttctattgataataagatgaaacttgtaactgtttatatagtattttggtatactatgagtactttattgatgatttatgctgacttcttagctgaagatcacaacaactctagctctgtagtttgtaaattatctctaaaaattgttatattttacagtgcaagaaaattgtttgataaaatgtctaatagagataaattgagttgtagataaggaaacagtttgtgaagatacaagatcgaagaaaacgatggttttgagctttgtgaatccagttgaatattatataatatacagggtattagtgtattcataatatattttgtattaatataccacacacaaaacgatctttctatataaacgtatccaacacttcctaattagtttggttgatcttgttgatgacacaatatcattcatttatattcaagtgacaataataaatttaggtatagtcaattattattcagttcaatgtatgataatttatagatttatatggtctaccaacaaaaactttcaataaaacaattctagtattataactaaatgccaagacatgacttcaaagttcatattggtttgcaggtggtcattttgcatatttctgttttggcacttttaacttattttcttaaagcttaccacattctatcttatagtataattcaattaaaattacaactataatgttttgtcatgtctaagttccgccacttcttctgtgattaacttgatccctaaattattctcatgacattctcttttgagatattcttttgaaacgtaataaaagtagttcattttccctattgaatagtagttcatttctttcaatcattgaattaatattatattgcacacttagaacagttttattggtctttctatactttgttttagtaagtgctaacttttactagacacagtgagaattgtagaaaataacgaatcgaattgtgtgtatatttcatagaatagtacatatttatatacaaagctagga

SEQ ID NO: 326294 - DNA, 607 bp, Cannabis indica
ataatacttgtaataaagagactgttataacagtctcccccacatgtaccaattctgatataaataaaacatccatttctgtacctactgtcaattccactaatgaaatttttcatgttaatgttgctcaagacatcaatatttggcactccaaattagggcaccctggacctagaattttagccaaggttctatccaatattaaccatactggtactttaaaaagtctccagttttgtgatgcttgcaaaattggcaagaatcacaaactcccatatgccttatccaccaatagagcctcggttccccttgaattaattcataccgacctatggggtccatcacatgtgccttctaaagaaggttttagatactatattcactttcttgatgatttcagtagattcacatggatctttcccctcactgtcaagtcccaagcttttcccaccttcttgcaattcaaaacattagtggaaaaacaatttaacctccccattaaaactgtccaatccgattggggaggtgagtacaggtcctttgcttcttttttgaaagaacatggtgttcactttcagcattcctgtccccatgatcatgagcaaaa

SEQ ID NO: 326295 - DNA, 792 bp, Cannabis indica
ttttaaaaacaaaaactgattaaaaaaaataattaccaaacgccaccttagttaataccatttgtacttacttatataaactaattaaatataaatgcaaaaaaatatgtacgtgtaaatatctctacataatttttattaaagcatctatataatttatattttttaaatatatatcataaaattataaaattaataaaaaaaatattttattaaataatagtatattcggttaaaattaacgtaaatatatgaatattaattgattaattaattaagaaaaatttaaataaacaaatgtcacatatattatacagtttatgtatatattacctatataattatatatattacgtacattgaaaaattatttattttttattttaaaaaccttattctaatatcatctatattttttaattttcgataagagatattttttaataaaaatttcaagttagctatatttatttatctatatatctatataaagcttagtcataaagcaatgatatggcaatacagtgatgacattaactttaaatatagtggcgactataagtgagatacggtaatgacagttattttgaattatatgatgagttttcaataaatttataatcttcttttttgttttatatctatatttttttagagtattgtttcaattttttactttttttcactataatgtacattttaaaaatatttttttgtgttgattttattttgtatataaaaagggtaaattccttttggaccctgtattttgcaaatgttactaattggact

SEQ ID NO: 326296 - DNA, 560 bp, Cannabis indica
ctgtatattaaagtgtacgtccgcccctggaaatatatacaaaatattttcattgataaaatgtgattatctcattggtttaataaagtattttaacagtatactaatatttaattaaattcacaattgagtggggtttcctagaagagatgctaataggtttaaactttcctaagaagttcatccagctggtaatgaactgtgttactattcccaaattttctctgatgtttaatggatccttacatggtttctttgaagctaagagggggattaggcaaggagatcctatgcctcccctattgtttgtattgagcatatatggagtatctatctaggctcatgagaaagattggggagagagaggatttcaagtttcatgataggtgccatgacctcaaacttaatcacctaacttttgctgatgatgtgctttggttttgccatggagactttaggagtattctctacatgttgcaggcacttaaaactttatctcttgcatctggcttgtgtccgaatgtgtaacaccctaactaacataggcgtattacgtgatt

SEQ ID NO: 326297 - DNA, 1184 bp, Cannabis indica
ttgataagatgaaccaaaacatacaaatgaatgaaaaaatacttctgtttctttattgatattgaataaaatggattacattgaaatagagttttatttagggcataaaatccaacactttcagggtcggcctaggcaacacttcataccaaatgccccttatttctcttacaaccactatgtttcctcatgtttcaaagatggtgtggtcgtacttttgacacatctaccattgaagtatgtgagtatgcctcattggtggagcctacctcgagggtcaaggaagggcctaatcaatgagacaaccactatggctagagagcgtgtggagggtttgctaccaagcaagctagcgtacagacaactcacttgatactgggcgagcgcatggagggcttgcttgcttggtactcacttagtaaatagtacacattcgatatttgtggaaaaactccataaaaatatatttgtgggaaagaaaaattatgggaaatatttaatcaattattttaaaatattaaagtttttattaatcttttaaaatattattgtactgtataattatttgtaaatactatttttaatggcatttaattcatcaacatattgaagaaacagatggtgatatgtgggttccttctcacttcaattcaatcaactcattctttgaatttagttgaatattctctcattcaaacgtattgacattttcatcatatgtttactaaattcatcaatctgtttgattcatcaatctgtttgtaataatctcttttcttctgtcctaattctgtggggcaaccatgaaatgaagtagtagttggcaaaccataaaagtcaagaacttatttatgtatatccacaccaatgcggctgctctttggtctccatcgccggccaaggatgtttgagcatcttcaattaagtgttacaaaaattgtgtacatttatttgagtaatttgtgcaaaatcttcttatgttttaaattttatacacttaattttcttaatttttttttgtggcaaaatctccttaagtttatttttctttgtaaatttaagatttcagttaaatattaccgttaaataccaactggattactattgtatttacttcgaggttttactgttatatatacacaagtgtatactgtgattatccagttaatatttaacggtaatat

SEQ ID NO: 326298 - DNA, 589 bp, Cannabis indica
tgagcaaaaataaccaccatcttaaaaaagaatattggaaagtattgctactctactcatcatcaattaattttaggataaaacgctacgattctcaagagtagacagcatataattcttacattctgattgtttggttttgtacttctctacgaaattttctatatgtattgaattaggattaataatgtgttggtaattttttaactcatgaattagtcaatgcttattgttaaatataaatgtaaaaattattattactctgcttatagctatgcttactataaaacgattgtgtacgtagacataaatgcattactttttgtattagtttaaagcatacttcatactatcacacccgtaaagtgtatatttatcaaaacaatttcagaaacaagtgatcataaagccaatgaaaattaattattggtataaaatctttgtaagtaagctttatgaaagtataaataattatataaatatatatatatgcactcctttctcccttcccatgtggccggagtcccattgatggtaagacgactcagggcatccactctgtacctctcttttcttttctttttctttc

SEQ ID NO: 326299 - DNA, 1350 bp, Cannabis indica
aattgaatttttttattttgttaaataataaaataaaccttatatatttttcaaaatagtacaaataagatcctaaacttaatttttgatatatatatcttttgaatatacactacaaaaaactgttatctttggtgacaattttttagtcacaacataatttttttgtgactaaatgtgacttttagtcataacaaaatgttacttgtgactaaatcacaatatttagatacaagttgtcactaattaagttttactcacaacgagtattgtgactaaaaatacattaagttacaacaaattgtaatttttgtgagtaatacttttagtcacggactttttagtcacaatataagaatgatgattcataattagtcacaattttttcacttttggtcacaagttttgttgtgactaaaagtaaattcttttctagtaataatcaacttgaagataattcctagcacgaatagatgtagaaacttaactagttttgtcataacacctctagaaacataactagtttcatatattttgacaaaaaataagttcatggtattttttagtactattttaaaaaagaaatggtccaatttatcatttaacaatatatagagtccaatcaataatttttatgaaatacggtccaaaatagtattatctctttaaataatatatctataatatttttatcagttaaaataatataaatattaataaatgaaaaagtaataaatattttgtaatttagagataaaatataataaaaattaaaaaccatttacctcttaactacatttagctaatgagttacctactaactcatgttgagcccaaatattttagctcacttatccttacgaaataaggaaggctcaaagcccaacaatagccagcccaaccgtgtaagacatgggaagttagctcacactttaggtttcctcgatcacgatggaagcgtgaaaacaatttttaatgacatcatcaatcttctaaaatgggaaatgtctgggttgatgtcatcgatccactcacccaagtcagttatggcataagcggaaagtctagggcccataattcaaaatttggcagagatagctatattcaaaattactttcagcaaggaattcaataaaaatattcagtaagaaagctacctcacttccaatccaaagctaaacccaaacaatctccaagttcaagcttcaagccaagcaaaaacacaccaatcttctccaaaaatcaaagtttgagaagaagagggtttagagagagagaggggttggcaagagaggaaacaacaccagaatttcacttcctttttcttcaaaaaatcatttaatcaagtgt

SEQ ID NO: 326300 - DNA, 1547 bp, Cannabis indica
tgatgatttggtatatgtcaaagttcaacgggaaaaaatttcaatactaaaatccaatattatatccaatcaaacatccaagtgttcctttctcatgcaaagcaaactatgctacaaaacaatatacacaataaatattaggttaaaaattaagaacaattatttggaacaaaggaagaaccccaagtgatagtttcttaatattaaataggacatttgttttcatccaagtgttcctttctctgtttttcttgttctgttttcatctcaatttgaagaatggatcaacacaattcactgttcggaactcttgtcaaagacatcaccagcttggttatcccaattccactatcaaccaccattgaagcacttccaattctcgaaagaagtagtctttacataagcgacagagttttcggggacaccaacatccgaatggtaaggctggtgttcttaggcaacggccgcgtctacatacaaggatccgaatggaactcatttgtcagagatcgcgggatcagagttggagatgttcttctcttgaaacttgttcaccaagtttcccaactcatcaacatgattatcaatgtcactttaatccgattaaaccgccaaaacaatcacactttcactcctcccttaccccaacaaaatcaagaacaagaacaagatcgaaattgggaacaaccatttttgtgtgtgaaaagattgagtgacattgatgtgtgtaaagttgttgaacatggtcctcaaattcttatgcctaaagagatatgggaagtgattacagaatcatcattagtagtagactttcatctaaatgatatgcttcaaggtaattttgaggttaatttgagagaccaaaccattgagattttggaattagtggcttatttgggtataagagttgatagtgaagtgatgtttcgatatgaaaattggatggattttgtggatcgtcgttgccttaatgatgaagatgtgattgtcttctgtgttgatcttcctcgaagaactatcaccacaactgtctatcgttctcatcaacaaactgattttttcattccaatgccacaggaggagatcgaattaagtaatattagtgacatgtaattggtttcttatgtttgatgttgttaatgttaatgtcaaacaacaaagattacagattacatgttaaggtatgtagttttcatttaatattaagaaattaatgttctcagtctcaattttgaaagaaatttcttcattcctaatatttttgtgtattgttttatttcttagtttaatatagttttacttctgcaaatacgtttaaaatatcttttgggtaattaattagaggtagctaatgtaagattataataagtcattgtatagttttattgacaaatatggcaaataataaatttcaaatctcttgattattgaaatatatatttgcaacttaaaaataattggaatttttacaaaaatattgaattttgagtaaaaatttataattttactgttacaaatttttttttacaaaaatattgtctttttat

SEQ ID NO: 326301 - DNA, 894 bp, Cannabis indica
atatcacatatatataaatacataaaacacacacaatatttaatgaatatacattaatagaattgttgttgatacagattgttaatttttatggaactaaatcaagtacgcagcagaagattttgtataattgattatcattgtatgttgtatctacctcttgatgactatcagggtctcctcgaaatttcttatatgttgtatcttttaatccagatgatgtggatggtgcaaattaatccacaccaatatcttccaaattgatataccactcacaaaaaatagtgtaagttattattaggataaaatgtataaggtgttctttttacttctcaaaacatgagcaaaaataatttgagagagaaaactattttcctctagttatttctaaaatagctattaaaaattattaatattagttctcaaatcaggcttctatatatagtagtttaacctcattaattaaattatatttaattgtttaaataaataaatatttatagccgaatttagttactgatatttatgagggaatctctcaactatttgagagaatatctcaactacttttgaaatatttttaaccactttttaaattcaaatatttatacaattaattaatcaactcaaaaagacaaaactcatagagagacaggcacttaccatgtctgaattaagacaagaatggtttctttggtcgtgacaatttttgtctcaacaaatattatcttgaaattttttatcttagtaacttttgtcattacagcgacagtggatagagcaattgtttgcagtaatgcacaaagacttgtagtgattcattaaggcttgcaatgatcctgaattgtatacaaaattttcttcctatttttttttatgtttaattagataact

SEQ ID NO: 326302 - DNA, 698 bp, Cannabis indica
gaacaaaattagaaaaaaaaattacagttttacaaacattaagtacttatgccgctaataattaaatcacgtgagacttgatattttattataccaatgataatacaataaaacacaataaccattagtgtctttcaacaattctcttatatatctttgatccttaaaaaaaattaaatgatgtatgatgtatttttttgagaagattgaaaatagctaaagctcttttattttctttcatctctaataaataactataaataactaaaggcacaactatctcttctaatatcaaaatcaaccgaaagttttactctttttattcctaataattggtcccacaacaaatcttaaatttcaagtttcaatccaactttttcaaaaaaagaagtttcaaatccaacttcctccaaagccctataaatgtccccttgttattgaacaacattagagatcaattgtcattttcttataatcctaaagtaggacaagtgttttcttcttttccttttcttaatttgaaaggattcattttatttattaatgtacaattttctcttaaatcctatggattttggttaattaagggttcatagaattcttgtttcataattttagaaaggctaataagtaatttttcccctttaactttgacatgtatcaaatcgtactctctgaactttttttggcgttaaaaa

SEQ ID NO: 326303 - DNA, 1417 bp, Cannabis indica
cttctacttcgtcaagggattctgttatgaaaatgttttttacatcttggtcataggttatcctcctgtgagatggtggcactagctctacagacaacattacttcatagcattaagttaaagtgaatggagtttgcctagtggccatcttctatgcagtcttatgcaactagaggacctcttgaagtaattccacccatttttgttttgccttatcaaagcgcttctttaaagattccttgagggccttgttcatagtatctacctgctcatttgtttaagatgagccatggtagagaagcttttaatgatgtcatggtagttgcagaaattagtgaacatgtgactgtcaaactccgttctgttgtttgaaataatcttctatggtagtccaaattgacatatgaatgttcttgacaacaaagtctaggactttcttggatgttattgtcgctaggggttcagcttcttcccacttggtaaagtagtcaataatgactacaacatactgcacccctacttttccctttggaaattgaccaattatatctattccccatacaacaaagggcaaaggaaactacattttcgtgagctcattgagtggagctctagggatcttcaagaatctttggcacttgtcacattttttgacataatccattgagtcctcaatgatggttggccaaaaagtaccactgtcagagtatctttttggataggctttacccccgacatgatttctgcagaacccttctagaacttctatcaacaaccgattgacttctatcttagtgatacaccttaaggacggtattgagaagcatcgtctatacattacttcgtttaggattaaataccttgcaacttttcttctcatctttttttcctcattttttgtttttgggcaaagctcgagtttggaggtaagctgcaataggtgtcctccaggttggattattttccaacttgtctacttctttagggatggtaatggtacgttctttcaagaactgtattggcaccatgtttgcctagtcggtagtggtattgcttgccagacgggcaagtgcatctactgtggcattctgtttactagggatctaccttattgtatagcctttgagccaacttagcaagtcttggatcttgcttaaataggctatcattctttcaccacaagaaatgtattctcctaggacttgatttacgactagctgagagttagtttatatgtccaggtggtcagcccgtacctcatgcaccagcttgaagccaacgataatggatttatattcaacatcattgttagaggctttaaagccaaacttgatttccccatgcagctgtttcccctaggtgtaatgaaggcaatgcctacactagacacttggtcagtgcaacttccatcaacatg

SEQ ID NO: 326304 - DNA, 1515 bp, Cannabis indica
actcgccaccccgatgagaatccgtttagtattttattttatattctaataatatttcataatttatgattatgtttgcctttttaattatattagtattttttatttaattaattttaagttgagtttggataataattagtttactgaataataattaatgtgtaatatattaattttatgtaatttaatatttaatatacataaattttattaataccttaatttttatgaggggattctccgctctgtccctattcttattaggggatttttcgctctgtccccgtccttagtaggagattttctactccgtcccaatccttattagggaatttttcaccccatgcccgatggaaaataaacgggaatggtgattaaaatttttaacgggtaatggggacgaggagagcacttcccgccaatttcccgccctgtgtacatccctacaaataatgttaggtgactatttaaaattgtgaaaaaaattagatattccaaacaattttaaacagtcatgaaacatccacgacagtttattataatcacttaaaatttggcaagattttttaattagttatctctctcgcggtctaattgagcacaattcagctattatctcaaattcacatttatgctacatatttttaattttaaatattacaaattcggaacaaaaaattattatttagtctagatactaattagtcaaaaacaaaatatgaatacttgcgaaagcaaagataatgttatacaataaagtagcattaagaaaacaaaaagtataatttgcctattattctaccatatacaaagttcaaactttaaggcaaaattgttttttttttctcaattattatttaaaaggaaaaaaaataagcaagaggaagaagaagattaggataatgaacctttcgaaagtaaagggtatgtcgaagtgggtcatgagatcagtttcagataaaggtcacacatactgctgaagaccagacccataaaggtaggtcctccacctttggatttagacttgagcccatcaatcctaaccgaggaagggaacactgaagtggactccggcgccaaggaaacacctttgacagtagatttggcgggtggtgtcgagtcgagcagagatgattcgaaggcaagtagcttgggcatgtcagggataagaataggaatgtagaggctaaaaggagcagacaacgttgatttcttggggttgaataagagagaagattggaggtggttgagttgagaaatataaataagggattcaaagggcagtttggttccgtttgaaaggtcatgaatgacagagagaacaagttaattaatatatgcaagaactagacagagtagaggtgggtagaatagacatggctgcaagtgctctacagaaagggtacttcaagagacaactatgggttgtggctcttgattattctatttctgttcttatagaacatgcaattcatataagaatattttttatttaaggaaatatatttctat

SEQ ID NO: 326305 - DNA, 962 bp, Cannabis indica
ttgtacagttatggatagaaaacccagtgttctgattcggatcggtgcgcccttgagccgtgattgcgttgaactggttcgccattgcaagccttggatatatgtgacagttctggaaaaccacagctgcgttcccgaaaatgaaatctactgtgccgtagatatcacaatcgcgatagaattggcggagagaatgagtgtagagagtgtcttggtacccttcgaaactgcagctgtagaaagtcgataaatcagcgctgtttcgaaccgccaccgcctggtgcttgatcgccccggctgtgttccggaatgttatgttcaccgctacgaatcccggcgcccctaccactgaaaacataaaaatatatatatatatattaatataaaaggagaatccctaagaagcacatccgtgtttaacaacttttttagtgttatatcactatttgtgtaattaaataacgaatctcatacaatttaaaaaaataatttttataggaaatatgactagtagctacccaataacaatgctctaataaaaatagtttagttgcgcgttttttataataattttacgtggcaatgtcacatgagcatggacaactaggatgtaaaatgaaagaatattgctattgaatacttatccaatactatttaaaagtagtgctttaggattagttagctatatattttttaaaaactattttttaagctctatagtgttttatactattaattatactaatagcggtataatcagaagagacttagcaattctcaaaataaaatgtacttctatattagtttgacttaccaataagatattaaaggctattgtaaataaatcaagaaaaaaaaaatcaaactatatacttaagtacaatttaaatttacctgttagatccttagcaccacatagatgcattttataattaataattttacttaattaatttatatga

SEQ ID NO: 326306 - DNA, 654 bp, Cannabis indica
aagaaaataaacatggttaataggacaaccccgccaaaggatacacaacaaccactactcctgcaactcaagaccatctattaggagaattaaattgaaaacggaattgatttcattgattggtgagaaaagtgtacaaagacaatgatacaatatatatagagtggtaaagtcagctaagactaactaccaacaataataactaacttcctataactaataactaacataacaaacataaccactaatctaataggccccctcaagatggattgtagagattcttggcattcatcttggataaaatgatgtggaagtgagcagggaagagtggcttggagaggtgtctactatgttggacttggaagtgacatgattcagtttgatggtgcctttgttgaccttctcacggatgagatgacagtcgatctacacatgtttagtacactcatggtagacagggttttcagagatgtgtattgctgcattgttatcacaaaagagtgttgatggaagcctaggttgatgccaaaatcatgaattatagaatggagccaagtgagttcacaagttacattggccattgctcgatattctgcttcagcaaaagagcaagatactgtttgtgttcttggatttccaagagatgagaga

SEQ ID NO: 326307 - DNA, 936 bp, Cannabis indica
cccaactttatttataaataaatagatgtcaaattgttttgcaaatgccctattttactcgagacaaatcatagtgatgcttcattgactgtttttaccttaaaagtcccatatcttgcttatccaaaacaaaaattaaataaaattagaaataattgaatgatgaaaataaatgcattcccttaaatatgtatagataaatattaataaataagattgtattttattttagctaataatctcagccaatgtcttttgtcatatatgaattagagattgattagatgtctattgatccgtaatgttatgatttttttttggacgtaatgggttaattttgataaaattgtagatggtttactttattttcaataatagtattttgattaattttaggtctttaatcactattggaaattgattttttttaaaacattgtgaatgcattgagatattattaagttggtcattaggtttttttttttagtttgttagatcatttctaatggaaatataaattggagccaattttataaaaatctactccaattatgtataaaaaattatgcaaaatttgaaacataatatattattatacaaattttatgtcacactaaaaatacttttatatttatttttatgttgttttttattattttataattggaatggtatgcatcatgaaaatttattattaaaatccaatcatcaatgacatggcaatggtataccataaatttttattatataaatttatgttttaccagtttctaaaaaaaaaaaaaaaaaaaaaaaaaacttaaatgttttacttttttggattatattttaataaatatattcccacatcattgaagatactataatttatgacaatttatcaaaacattgctcataacattccttaaaaaaatatatatcgttaaagaatggacc

SEQ ID NO: 326308 - DNA, 744 bp, Cannabis indica
taaaaaaaaaaatcaaacttaagaatgtaccaatagctctatatgtctaatttattaaacttgaaacatacactctcgttagaaatactaatataacaactaaactcgttttttccataacatactctattgcagtcacaattctttttttgagaacacttctcttaaactcttgatttataaaaataagtacaacctatcaaaatcaaactaaattatgtaatatagctacaccttgaatcatttctttaaattttccagaaaatatcccattgatcgaaccctacttacaaaattctaagacatatccttctaaacacaaaggaaaatctagttacactaaatttgtacacacaagatgtaacgtagcataaaacatgtaaaactaccatgaacatatttactcaaacttacagtacagtgagtcgagctcgtctcgtggcaatgaactttacatgttagggctaaccacattctttaagattgtattgctgtgataccatatttaacgttcccgcttcaagcctcccatggtccttacacccgcaaaataatagctcttatacacgagtacgtcactcaggttgctttctggactgatgactgaccctacagaccaatacgagtatttttagcgtgctttgttctcacttgcacgctttctaggaaaacttcccaggaggtcacccatcttgaaattgccccaggtcaagcacgcttaactgtggagttctttcgtgatgg

SEQ ID NO: 326309 - DNA, 992 bp, Cannabis indica
aataataaagaattataacaaaacaacaaaaaataaataaggtagaaaagtctattagaagatcaatttgtttctattagtaaattatatacaaattaatggagaaatctacaatctcaccacagatcaaagcagtggtcaaaaaagacctatatcaacacagatccatgcagtataatattcaagatataatagagcatgtttaatatacatagtgcttgttaaaaatattttattattattatttaactgtgttgtattattatattttctttatatatataaaataaatgaaatatattaaaaatataatttttaaatgatgtaaaaaaaaaaaaattatgtataagtgtgaggtaaaataaagaaaattttaataaagtattttgaagaataatatagagaaactgagataagagttctctaatgatcgatgatgaagaaaacacaacactaacaactagcaagctagtaataaagaataaaatcaaataaaatcaagaaataaaaagagaaaaagaggaattcatcaccatgaacaaactatatactgatgtacattaattcattataagcaaaacgtaacttagtgtgtttccacatccatattggaagattatgctagcccatataattatataattaagctcatgaccaagtatgtatggatccaaatcaaatttaatgtaagctctttgaattataataaacttcttaagtaatcttggatattataatttagtaaaatattttaaaatgtatggggccttgagtttaaacggccctaagtatgggcctagtccgctttaatttaacgatattttattacatatactaaattaaaaaggaaataggaatatgccttcaaacaaaagaaggaaataggaatatgccttcacattttatgttgtatatgtagcgcaacttggcagggcgtttatttcgggtattaaatcatataatttattaattatttttattttaaaaaataa

SEQ ID NO: 326310 - DNA, 601 bp, Cannabis indica
attaatttagatcttaaaaaaatcatttagagtgattaagaaaattaaaaaggaaatcaatattttaaattgattaagcaatttaaaagattaattattatttttattaaaaattcatttaaatataaaaagtatatttttcatttgatttttgtaaaaattaaattttagaatccatatagtatcaaaaattcagaaaacaaaaatactaattattcttatatttatttatgaactatctatctagtaatatctaatatgtgcaatgaaagagccccaccccaaatgataatctccatttgtgattttgttagtgatgaagagaagatcccatcccgagtgagtgtgaagaaagttgggatcaagaagaaaattagtgggaagcaaccagactctaaaagaccctctaaaaaaatctgtacacacccacatgtaaatgaagtatccaattcaaattccggtggaagaattattcatgctccatctataaaggtcctttatttttggtctttttttctttgttagttgttatttttttttttgtttttttttgttggtgtttcttattatgttttgttgtgtatcgtattgtaatattttt

SEQ ID NO: 326311 - DNA, 1421 bp, Cannabis indica
gtcgaagtaaggaaccatggcatgtatgtttagaatatattccattttgagagagttcaaaaagcactatctcaacggaaattggtcgttgatacgcgatccaagccattcattttttttcaatctttctattcattattttctttattttattattctccttattactattaccaaatcaaatgattgcaaccaggtcatttcttcaatttgttctccatttcttcaatttttattttgttgttgttttatttaattgtttgatacatttttcaatcggttttttttggttgcctatcttttattcagaaccttgttggtttaaattttttttagaaccggttatatttagtaatctggttaaaaataatttatgtagatgttcatttttttatatttgattatatcaaattttttttatattattaaaaattagttttttataattacttttatataaatgcataattaatttaagtctgtatataagaatgtatttttgtctatttttgtttcatttgtttatttagcttgacttttttatttatattttaatagatctctgtatattcgtattcatttactgaattcgaattttatttgatcaattgtattttcgtattaatatatatttcatatatgatagttcaatccatcattatatgatgatatataaatttgcatgtttaatgtgtgtgattaattttgtgatctttggagaagactgttgatgaaaatttattgttttgtataatcggtttttattttaaattgtcttcaagctctgtttttttgtctaagcattcatgatttttaaaagtttttgttgcttgagaggacgatcgggaagaattgttgaggtcaccgtagatagagataatgattggcaatttttgttttcaccctgacatcctctgtagcagtcaacaatggtgaaaaacaagagaagaggaattatttcttggttttctgtgatcaattttctagaaaattgcagatgaaggagaggtcattgatgagagtgattcgtggaaagaatattggagaggaattagattctgttatgcttggaaatttatgaggtttttttaaggtaaatttatttatatattattttgttttctacattttgattattgaataatttgtattcgcatattttttctgccataaaaaaataacaacaacttaaatttccttatttaagaaattctcccaaatggataaacataaaatgcaatgttacttttaatagttatataacttggtaatttacaccaataattatttcctatagttaatcatttagggctcgtttggaacatcgtattaagttatattgtattatattgtatattacattgaattggattacaatcatatttttatataataataagttaaactttaatttatactaa

SEQ ID NO: 326312 - DNA, 840 bp, Cannabis indica
aaatattgtattattaaaatttaaacattatattaattatatattataataatatttatttaaattggatgaactgggtaaggagcttaataagaaacgacttgaaagacaatcacagagcgatacatctggtactgaatttgatactagttattaattcgacgtacttagaaaagttcttggcaaaagatttgactatcaaagatgcgtggattatagggtcaaaggcaaaggaataaaatcatacagtcaaagttagttaattgcgcctcctccgcccctaatgaaatgtttaatactgtggtagatatgtttacaactatatgtgacacaatagggagtagtttgactcttgaacaaagtgccaatttatataactcacggtttgaaaattttattcaaatgtatggtcagccgtaatctcctggtagttcgtcttcttagagttatgtcgctcctccacaacatcaacaccaaccttcttcgcagcaacaattctagccttctccgcatcaacaattccagccttcttcgcagcaacaacaccagccttctctatagcagcaacaccagtctggtctgcaacaagaaatgacttcttatatagaatcccatcggagtctcctctgctcggctcaaattttgttgattttgggatatttgggagttcatcgcaggagcaataatatttttcgacccctatactcaaccaagcttagttagggaacctaacacttagtttatcgtcagatcaagcatatgttccttctctgccacattgtcgggacctcccaatgataataatgtgtaataccctggaattaagaaaaggattagaaa

SEQ ID NO: 326313 - DNA, 1096 bp, Cannabis indica
caagcattgtcatcctcggtagattggatgattcaaactttgatttcaccattgccgccttcgattgtgtattgctcaacttctacgctccctggtttgagtcagtttcttggttaagttctcattatcctctcgatgatgaggtggtgtggttggttctagtcgtagacaagatcgatgatgataacatattgaggatcgatgatgatggcgatgagatgggaggttggtggtggagcgttaactttcttcgttaaattagtggtgctaatttcaagtaccgaattaacggagtggtttcatatatttcgtaaagtacaatttcctaatatataaatatgctagttactctttgtatttatttatatttattatcatatataatcttttattataatttaaatacgtatattttattttataaaataaactagtttattttattttattaataataactcaaatttttgagttaattatataataaatcatttatgtagctgattgttattttattgttattatatagtcataattctatgtatttttttttttaaattcagatatttaagttatgatttatattttaaaagttaggctaataatagtagttgacttttattaaatttttaattagcctttaacatgtactttattaatatttaatattatattatttacttttatattagttgttaaggtgattttactttttaattaattacttaatttaaatatgttttaattgtacttttttaatgaaaaattaacattttattaatcattagactggtagagagtcagttggaacatttcctaaaccgaaacaacaatcaggatataatatagaaactcttgcaaatgagtgagctaccatattagctgatcgttttctaaaataaatagacacatttctcaacgaacttaacaaaaccatacaattagggctatatatcggtcggtttgggcggtttatcctatatattttctaacccaatctaaagttttggttgctaaaatttaagtgcaacccgcccaattttaaaaaaaaaattgtaaaccgactaacggtttgggcagtttggtcgggttaacc

SEQ ID NO: 326314 - DNA, 844 bp, Cannabis indica
atgtgctcactaaactcttagtttcggtttaatgaagttttgtttttcagcaaaaaaaaagtaaaaatttaagtcaaataaagtcattatatcaattactaggactatatattttataagaatagtaggtaactatagcttatataattagtcactttctcatctttctttaatttcacctagattaacttattttaaccatgatttatatatagattatttttcacttattaattcttcttttgtacaatttttttttgttttgtttttgggtttgtgttctttttgtcacaaaatttctatgagagaacacatcattatatatttttacattttcttctttttacttcagttacatctgtataggtaaaattatatatttgttctttttaatttgattgaaaaaaaaaaagatttaaagtaatattttttttgtttaaaacctttgcttggttgatatatagattcttctttttcttttcttaacaaaatataagggtgttcatagaaaccaaaattaattatcaaaccaaccatactataatcaaattttcagttccacgttattactcaatttgattgtcagtttcggttacaattttttgacatgatgatcaatttcgatttttaaaataaaaaaatagttaaactaaaaaattgctaaaaatataaaaaaccgtacaattagggggcgtttggtacgaggtgttcaaaataatttgattatagggaatattatgaaggagaatatgattatagggaaatgtgtaaactgtgtttggttgtgtagggtaatatgtaatcatattcctgttaattaaattaaactgtttggttgagtaca

SEQ ID NO: 326315 - DNA, 1055 bp, Cannabis indica
cattattattgatgattatattagtggaatttctaaaatttggtaaattaatttttcaatagtaaaattacatttttatgtgataagaatttgatatatattttttttattgattttgacaaataaaataaaaatatataagaaaaaaatgatgcattattagttcttaaacaaataaatttggaaaaaaaaatataagatataaaatatatattttttttttaaaaaaaaaagtttgggtcggatcagatccgatccgtataaggcgggtcggatcagatccgatccgagtatctgatccagcggggcggggcggggcagatccgtatatgatctggatcaggtcggatcagagtcggatcagatccgacccgccatgaataaaaataattcaggtgcaactttgtacaattgggttcattagaaaatttgagagagagagcatctgtctatccaaagtttggaaaacactctcagaaatgcctgagagatattattagtgtaggaactttgtctctgtattctatatattttattttctactcagattaataatatcagctgcctcctgtggagtagtcgaattacgtaattcagtgagtttttgtttactgctttgatttatatttatcgttatctttcgttatttattgcttatacgcacaacaagattgaccagataaattttcattaaatcaaaaaaatttatggttaaacgttgtggaatagttcctccaaataagaaaagcctccaaaagttattcttggaaagttgttaactcgcagaagtaagtcctggaaaactttcttgtccctccagaaaggttcctcgggatagctagccttcctctgaaaagaagattcagatggctaattttcctcttaaaaaggagtttcaataatctactccaactggctctatcctattcgaaagctccttcagcgtgtaattttggttagtatttctggaagctctcatgcacgttcccaaaagcacctatacttatgttgacatagagatctcgctcaaaagagagttggttaagttaaatatt

SEQ ID NO: 326316 - DNA, 788 bp, Cannabis indica
ttatttttgaaaaacaaaaatattttctgtaacgatttttgtttttcaattttaaaaactgaaaaataaaaatgtgttttgtaaagtttattttcatttttattttttaattttatttaagtctgtaagtccgggattgaattcgggttcaggtcagaggccgagtttagtgctagggccctggggggatttgggtcgggtctgattggagtccaaaatattgatggagagattccactaattctataagtttcatttaaagagaatcatattgcttattgggataatcagtcaattgaaattcatatttcgaaattgaaaaattaatgctctagatttttactttatgattaaaaatcgttgtttgtgcgtttattttattatttaattcttaattataatttactctgtgttatctaattaaagtataaaattaaaaagtataataattaataaaatttaataatcaattcttgtgggttcgacaacttttttagcattaaaactttgctataacaacgttgtacgcttgcaaattaaatatcagtaaattatttagagtatctcaaaacttaacataatgtctaaaataactacaatatacactattatatacaataaataaataattactctattatgatatcaaaaaaaaatgcatcactaagccaataattacaccttacattttattactgttaaatctaattaattatctaaaccaaataataatattgtgttataaatattaataattatgtggatgtctaaatcttttatttattacc

SEQ ID NO: 326317 - DNA, 811 bp, Cannabis indica
ctcaattacttccaattacacagtttgagtgtaattacatggtcagataaacatgacaaattgtgtaattacctccaattccacacaaatccaattacattgtagctttccaaacgcaccctaaaagtttaagagaataaataaatagttttctgttaaatgaatgtatgaattattattttttgaaaaaaaaaattaaaatatttaaatttaaattataaattaatttaattaattaatcatactatataaaaaaatttattagttatattatttaaaataacaaaatgaatcaaagtgtatttttattacactgaagaggagccaaagctcaatatatatacagaatatatttatagaaagaaatataaaagttgttgataaatacagctgtacagttaaatagaattgtaactaacatgaacaggattaacagagtcctaattaacaagcccaaaatggaagtttagaggcttctttttggaactagtgatggagctgaattttaggttaagccgcacgagaatacaatcaaggtaactattgatgtcgctatattctgtgattgagctgcatttagttatggcatggtcacttgagactctcaaagggaattaatgatggctaagttacgcaattttactggtatatactcttcaaatttggctgaagtagttgatatataaagaaaccgctataagttggattaaaactgtaacgtcctcgcttcaagtctccattgggcccttacacggactcatggctcttatacatgagtacgtcactctggctgcttcatggactgatgact

SEQ ID NO: 326318 - DNA, 460 bp, Cannabis indica
ataattttttaatttttttaaaggaaatatttattcatataagaaaaggtttgatgattgggataataatattcaaggatgcacatggtgtgagattctttttcgtaccagaaaaaattcacgtatagtatcttaattattaacatatatattctcaatcaatcatttattttatttttaattaaatttaattttttaagacatacaattaattgcatgttaggtggaattcaaatcttgttattagtttataaatacatataataaaattagaataataataacctccatataccatacctaccaaccccaaattaacacataaaaatatatattagttgatatagaattaattaaggataaatgaatatgttcgaagctaatagtatacacttactacttactctatatagtattcagaattcaaataaattaatggagaaatataataaaataatta

SEQ ID NO: 326319 - DNA, 674 bp, Cannabis indica
aattgatacacgtgggtgcccaccttgaatgaaccgagaagtacccgctttagtaggttatgggaaagggatgcagaaaaattttatttacctgaagcgagtttagggcagatcaggatatactacccacccaatatccaactgcaacatataatttctatataattttttaaatatttattcgtataatcgtattaaaattattaactacaaagttgatgattgatctttcttatcactgtcataataaatactttataatatagtgttctactcatcaatttccattatcaaatatcaatatcctctttaatttgttactacttacaagcataatgtcaatatatgtggttgattattctgacttacatgtcatttataatttatagaatataaagtacaaattaaatagaatttttatttcaaattcaaaaatcttttcaatttcattttgaattacactaaattattttgttataatttttttttaatctttatgagtacccaaaggatccccatactcaatagggatttccctatcctagcctccctaacagggccggccataggcataagcgggctaggcccacgcttcgggcccactcattttaggagccaaaataaaaaaattgtcttttaaaaaatatacacattttttcaataatttttaaaaa

SEQ ID NO: 326320 - DNA, 642 bp, Cannabis indica
tttttttatttattttattttacttttttctcttttctctgtaaaataaactatttttagttatatatataattactaatacaatttaaataataaaagaaatagaaatataataattaaaaagataataaacaagaaaaaaatagaaaaattgatatatgatgtaatgtaaatagtaaggtaaaataaagaaaataaattttaataaaatattttaaaagatagagtagagaaactgatgtgagtcctctaaatatatgctccattctatcaaattaagtaaactcatttttgtttgacctcacaagcttttgagctaaaataactttttatatccatgtacatttagctagaagaatagactgaatagtgatttttaaaagtcttaatattaatttgacttttctaatcacatatatcacacacacattcctaattagttaaaaatatattgttttaatgaaatagagaaaaaataaaaaaaagttgtataatgtaattaataatataaaagtttaagataaaataaataaaatgaaattttgataatagtttttaaatgataagagtaaaaaagttggagtgctctttttgttttatactgaatattgatagggaaatttgattttctatacttagaaa

SEQ ID NO: 326321 - DNA, 1659 bp, Cannabis indica
aagttgtttatattaagaaaaaaaaattaattaagtgtgtaatcgcaaattactatagaattttttaaaagaaagttcaaagttacaaaattatgcataattaacatttgtagaaaaaaaaaattatttccaccccaaaaatttgtgaaacactcttgtactttttttattttattttgtataatattatatatattccaattttttgttaattttttcaaaaaaataatattcttttcatttttagatttttaaaaaatatatataacacaaaaataaaatatatttgaaatattaacaaaaataattaacataaaaaaatacataaatcttattttaataaaaataaaacattatactattatttaaaaaatatgaaattaaaataattataaaaattaacattctttttgaaaaagttttgttattaatgaatagaatccattacaacaacaaagtagattggaaaaagaatttctcccaaccaagaacaatcattatctaatcaaagagcaaatctagccaagtcataagcacctctattagcctctcatttgacataagatacaattattactcaagaaaataggatattaaaagggaaaccctcatctatcaaatcatttcatagaaatgagatacacaagtagaataacatttgttaatagcatttgccactaaaagtgagtccgtttcaatggaatgaatatccaaccggtttgaaagagtccatttttatattgttaaattattgcattagcctccatctcttttgttaaataacaatctcgtaatgacttcaaaaaaactgcaatcacatcttcaaaatcgtcttgaactactgctcctagtccgataacagctccttccacatcatacgcaacatctatattcattttgtaagaaccaactgttggtggaagccatgtaatctaagaatttggactgttacagtcaaacttgaatgaactggtttaaatagtgaatttgtatccacttgagcagtcataagagacacctttgcattatgatattattcgatgtaagcagttgcaaaggtacaaataatacaaactggtttgggttttggtgccatgtaattccttatttctttccgtccaaataaaccacattagacaaaagatcttttctaatgcagtatatcattatgaattgctgctaaattagagtagatatcatgaacattgaagttgttgatgtttggaaaaaatattcgagacttatattggttccacacttcttttgctagagcacatttaaataaaacatatccaaccaattcccaagcacaatcacataaagaacacgctactgaggtaggaattttcgtatgcactagattgacaactgtaggaaatggcgtcattgatgactattcaaggaaagattttgattttttttttttttgggtaaatttagaaaccaaaatctattctagcattttgtgaggagaattagatgaagaagtagcatcctccatctccaaactttcttctaagcggtagcctgatttaacagtgtaggcacctagattagaaaatataaagtgtagttagtggggtttgaacttttaccctctaatctatttaccaactaccttaacaattacaccaaggttactattatgtctataaatat

SEQ ID NO: 326322 - DNA, 1159 bp, Cannabis indica
gatcgcaaggcccaatcttaaatgaaggcctcaccgatcatactcctaaaactttgccatatggttattggctaagcctaaaaaatatccaatcttgattgcttgtggccaaacaatactgagttcctatcataacacagccaccaaagggttctcatcatcaattcaaaagcctcacgagatagcatgtcaaagagaaataggagaatttcctgcattggtccctatgcacatcgacggagcatcgaccacactcccaaccgatgccacactgaattaaaccagaatagaaaaatagagtatgctcaggagtttcaccttcttcaccgcaccgagaacatcaaagaggtacctaaactttctaggagataagttgtgtagctactggtaaagccaaatcgaacatatgccaaacaaacactttcacctttggtggcatatggagattacatactccattacaccaacgagttaacctggacgaatctggaactccctcctcaacttggaatgaccatgccaatgagtatccactcttgacagtataaatcccatatatatcgtagtgtcagcaccaaccatcttttgcctcacgcttcactaatggaatagacgagattatgtccacatctattggcaaaaaaacccgttgaagctttcccacatcccaagtaccagatggaagaataaatttactcgtccgacaatcatcatcaatcctcctcgtgattggctgaaaagaccttagacgcgggagccatgggtctgtgaaagccctaacttgtgttccatccccaatagatcttcaaagaccgctccattccccagataaaacttgaccaaagatgagacaatccaactttttttgtggcctcaaggatagagcaatttgagaaatatttatgtaactttttccaatgaacttaatattagtgataaatgtggaggttactcatagtaacaagtaactcttccatatgttacaaaataatgatacataatataaattgtcatgtgttacatattattaatttattatacatatttaatctatatattatattatttaaaaataatatcacctacaagtcagcaaatgaattattgatttgattgaagaacaaacatagtttaagagttttctttttctttttttttt

SEQ ID NO: 326323 - DNA, 1428 bp, Cannabis indica
ggaacctgaaataatgaaaatcaagcgtaaaactgctccaaaagacaccaatagacgagataatgttaactttaaagacctgagacataggctaattataacttaacaagaagcaaacccaaaaaaaattaaagccttaatagacatgaaattgaccaaaaaaaaaataagaaggaactgcaatgttttataggaagagtgcagtgttgaacaaattcatatcgaaagtgtcttctattcttcaacatcctaaaagtgaacaagaagtttttttgggatgacgaatgtgaagaggcgtttgtcaagttaaaggaacatctacgatggccacctttgttagctaaacttaagaaaatagagaagttgtatttgtacttgtcaatttttgagcatgcactaagggttgctttagtaaagggggaagaaaaacaccaacaacccgtatactacatcagtatacactttgttgttgatactcgctacctagagatagagaaattagcatatgcactagtctatttataattattaaatgtaaagttttgatatttatatgtgaaacttatttttttttcattgtgcgtagctattttactatatatagatatatgtgcgcataaatcgatcaaattcaatgataactgatcgatcttattacaatcgactaccaaatattagatatctaactatgatcagattggattagattatttttgaatatccaattggatcgggtcggatgttggatggtgtgtctaaaaattcaatacatctaacatccaatcttattaattagtattttcatttattttaaatgagtaattaacttttatgcttttttatacgtaaaatatgtatgtatatataaaaattaacattaaaatttattgtgaaaattatatacgcaagtatatgcaatcaaacaagtaataaaatgataagtaagatcgtctccacagggattgcaaacaaaaatgtgttgtaaaaccaactaattacaacttaaagtaaaagaaaaaaaaataaaaatggctgagcaatgattcaaaattaaaatgacagtatttaaacttgttaaatttaatgctattgttgctagaaaaatacttttaaaaagtgtaatatggcaaaaagtggcttgaatgactaatccctcctaagcaggttttcccagttgctatagcattacctcagcattcctgccaacgataacataatttcatgcgtttatgagaattttcaaaactcacaatttaagttctaccagctagattcacataatcttatatcaaaccagattacagaacactaattaagcatcaattcttaagttatgcaaggtaaatgaaatgttcctattccacgtacaaagaaaaacctaaatctagagtttctcttgctccattcaagtttaactactagatctag

SEQ ID NO: 326324 - DNA, 810 bp, Cannabis indica
gaaattcgtcgattagaagatctccacgaatgcctaaatgataagtagttaattcacaatgcactcgttttcctttaatcaaatttttgtcctattaaattttctagcaagtttttaatgagaaagttattatgaacatttaacatggagtataatgaaatattatatatatagatgttcaaatcacttaaattaaattattaccataaatactgttgtattttttatatttcattgattatatgttttattcttttagccttatttttatataaataggggttcacctatcgaaataaactactgagaaaattgtctttcaaattttctctgtgttcatctattctttttcttttcagtttagagttgagttaagacaatgaatggtggattggggtttagggttttagacttttagtgtgtgtgtggaattgtagaggtttggaaagcttctcaagatagttggaaaaactaattagcaagttttgggtactttcatcattgcaatatacataaaacaaaaaaaaaagtaaaatattccaataacatcttcattttaaatgagttttatattcaattttttcacttatttaatctcgtattattatattattttaaaaaatacaaagtacattttgtaaaagtgtattcatattaattttataacaaataataatttaatttaaatatttattaataaattttcaaatttttaaataaaggaaaatttgacaatatatgcttaaaaataaaaaagtacactaaaattaatgctagcatttttttacattatgaaaactatacttaaaa

SEQ ID NO: 326325 - DNA, 710 bp, Cannabis indica
ttaaaaaaaaaaaatcatataataagaagtttcatttagtggaatgtatacatggaatgtcgcgattacaattaaatttgtcctataaatatatatatatatatatatatatttatataattttcaaaaagttttatcatgaaaaaaaggcaagaagttagaaggaattccacttagtttgtggtaacaagaatatgacatgttcatgggcagtggaatatggagtaccactataacttatgactggaaaatagtacctatgtacatattgcttttttttcatattcaaatcaaattgattcacaaaatacagaagattagacaaccaaaataaggttaaaaggaaaatgatagcaaatgacaaattttcaatgcttaaaaattcattgaggtcaggattaacctgctgacttttattacaaatcacaagtcattccagccattaatacacgtgaaaaaattttataatttcagaatgtgggatatacatctcattgatagtatatgacaataagatggaaaaatgccattaacaaacaattatgaccttattgatttctataaccactggcggacccaattaaggaccagtgtgggcttaagcccatgttgaaaaaaaaaaaatatttcttttacttcttaactgaaaaaaaaaaaattaattattttaattgtccacaacaaatacgcaacaaaatgagagatcaata

SEQ ID NO: 326326 - DNA, 1098 bp, Cannabis indica
ttttgattctcatgtagtcttttcacattataatacatttgatagctttaggatgtataatatttgactttttgatgaataagattgagtcttggattggtatcttgttagagaccctgtctgactcttagatcttatttaggaactttttccatgacttagatcctgtatagaaactctatccatgacttagatcatgtataggaactctgcctttggcttggaacctgcatcagaactttgcctatggcttggaacttgcaccgaaactctacctatggcttggaacctacattagaactctgcctatggcttggaacctacatcaaaactctacctatggcttggaacctatatcgaaactttgcctatgacttggaacttgcatcagaactctacctatggcttggaacctgcattgaaactctgcctatggcttggaacttgcatcgaaaatctgcctttggcttggaacctacatagaaactttgcctatggcttggaacctacattggaacttggcctatggcttggaacctgcattgaaactttgtctatggcttggaacctgccttagagattcttcccagtacatgtttcttataagaactctgtttggttcttctctggctgcatggttcttgcatggcctcggtcttatgcatttgaaacaatttttttattcttgtattatggccttaaggccctttactttcaaacaaatgactcaccaaatggtctttaatgccagctttatcttctttcaactttttgaacatgtagctgattgggaacctttaatcccaaattaatgcattttatgttaaccttgaagcgtgcctagatgcacatacttagccgttaatttttagctttaacgaagcttcaaattttttggcctaagtatatatgtgcttgttcaatgatgtgtgtgtgtgtgtgtgtgtgtgtgtgtcccaagtatcatacacacttatggtctcttggtcacttacaattcaccaagtaattagatcatttgcctgtgtattttcttgtgaggtaccgttttacacgcatgttgaaacgaaaatcaagattaactttaagaagttatct

SEQ ID NO: 326327 - DNA, 2063 bp, Cannabis indica
tgctagacactactagtatcttttaatatttctctaaactttagttaagaaaattcattgatgtaataaaagccatgtacagttatgatcatatgaaaacacgaaattctctctttgatataataaatgtttagtaaaacctttttatgaatacacatatttactaataaataatgagaatcaatgaaaagagaattattctttatatttgtttatttaattaattattaaattaaaaaaaaagaaattaattaaataagagagaaaagaaaaggaaaatttctcccactaattttttaaggaatgccattacccattaagggtaatgaaatttatttatttttattttattttttaatattaaatttataatgataattttatcctttaaagcatgtcttatataataactaccatatactataatttaactcaaatggataatttaatcaatttaagtattctaattactttcctgataaaataaataagataaatcactaccattctatttccaatcacttttagtaaacaacatattacaaatattaatttcgattattcttcatttattccgttacatttttttattattttattctgattctgaatagtaataaacgtgccaactaatcaaattatattttaattgagagattctactttaatagagttacaataaaaaaaaatatcaaaattactgacaataaataatccttaacactatatcaaaataaaattattttgattaaatataataattatacttgtatgtactttatcaatgtataataattcttatgtaaatgtatattttttataacttattataatttaaatattatttttatttatacttgatttaaattaggacttgattttttttataataaattaaaatttaattttaaatagagtattcttagataaatattctattgtactatatagagagatagatatgatgtagtactcaatatttatataggagtcttaatctaattcaatctgtactattttatttataatgcatctaatttacattatgtgcagattaatttatattttgaattcaattcaatctgtatgatattcaaatctaatctaatccaaatcgcaaaattacaaattggatcgattattttgaatttattacttgaatatttgttaaaagatattttttttcacataacgaacaaaaatataaagcaagttattgttgttttatttttttcaacaacaaattaaaataaataacaataacaatcacaaattttaaaaaagaaattatatgtataaaaatatatttttcttataattaagaatagaatatacacatttgatttactaatttttgaaatatatttgtatcatatgtattaaatttttaaattactatattttttacattaaaatactaatcgtgtataatttatttttaaatatatataattatgtgtgaattagatctcgattggatcaattacttttacatgtcaatttatatgaattttagattttccaatttaatctattttgtaaaagtacatatatctacattttgtgaattagattgggtattttaatatatatatatatatatatatagggcaagactatggtaggacttagcataagttccctaccggtagggaagtttttttggccattgattttagatcatgtggtcattatgatataaagtgtatactcttacgataagactgcttgtatacaattaaaattttatacattttataataatatataattatatatttaatttaaaaaaataaaataatattaataattaaaaaattattaattattaatttttaatttttaatttaaattattattattttttcaaagttaatttaaattgtatttatataggtatttatttttaaaaaataattttatttacgaattttgctatcaatttttttataatcttattttcggcgtgttatgtttttctgaatttcttaaaattttacaagatgtcttaaataactgtaatgtagatggccatgaaaaaaaaataaactaaaaaaatttac

SEQ ID NO: 326328 - DNA, 506 bp, Cannabis indica
tattgttgttattaatgttacaacttttcatgttataccttcacaaacaataaactataaaatgcattaaaaaaactaacattaataatgtaatcacacttaacttatactataaactatcattacgtatcgtaatcaattaattcattagtatattacaattacatgctaatcttgctacataattattgttatttgatattggtttttaaaatgctaagtatattgttaaagttgttggttggttaataatagcatgccttaaaattttaatatattttttattacattcatatcaacttagatatttataattaacattttttaaaatctcatacgtttacaatcactgtaaatgtgtattaaaagctaaagtgtcttaaaaaaaaactaattatttttaaaaggaataattacataaggtaccattgttggattaaaaatcctatgtgggcacatatgtataatgtataatgtatatgctattataaagtgtgatacaaaat

SEQ ID NO: 326329 - DNA, 1022 bp, Cannabis indica
gaaatgtggcgagaaataggtgacgattttttaatatacccttatacccgacggttttaaaccgttgggtataagggtctattaaaaaatcgtattttattaaataaatgtcgcctattttgtttactacgatcttaaaccgtgggaatactacatttttcccgatgtttttaaatagttacttaatttttttagtgacgatcgctgaaaaaaattatttttaggaccgtcacgaattctgatatttatagtagtgtctttttattctttgtgctgaggggttctctagcctgctgaaaggttatgaacaaagtggttatattactggctgcaagattgctagaggagcgccagttatttcccacatgttatttgtgaatgatagttacatttattgtaaggctgcaaaggaagaagctcacaatgttaaggatttgttgaatacttttgaattagctttagggaaaaagattaatttttctaagtcctccatttttatagttcttacacaagtattgtaatgatagactctgtttgtgacttgttaggtatatatgaggtagatgagaatgtctattatttaggtttaccttattaggttggcaagaataaaaatgctattcttgggtttcttaaagacaaattgagaaaaagaatccaaggttgggaaggacgcatgctttctcatccaggtaaataactgttgttgaagtcaaatgtgcaagcgcttcccaactacgctatgagtgttttttagttacctattgatacttgtaaggaattgaagtgacttatggcaaaatttttgtggaacacaggttcatcttaaaaaatcagtattagttggatgagttgggatcgtatgtgtcgtcataagcatgcttgaggcttgagtttcacaagtttgatggactttaacatggctcttttagggaaacaaggttggcagttgctggttgttaggttataattagcctgtgtttcgggtctttaaagttagcattatctcgtctattggtgtc

SEQ ID NO: 326330 - DNA, 663 bp, Cannabis indica
acgtaacaatcacctagtaactattcatttatctgagtacgtctgctcacatttacacagacatatcctaaaaatatacaagatatctaacaaaaacttacaacattgaaaattttttcctaagagacgatcacatatctcatccaaatctctattaagtttgtagataaaatttaaaaaaaaatctctcaaattaactattttttgataaatagaagtatcaacagaacatttccattcagatacataaaataaatcaatttcttgccaaaaattttaaagaacaccatattctataatattgcgttacggtaataaaattttgttggtattccctaagctgagattttgagctcaaagacttgaaaagaattctccaaatctgaaaaaggctcgtggacaatattccacacttcttgaacagtggaaagaaataaataagtttgtcgatatcaacttccatggaattatttgaaataaaatggatcaaagtcaggagaaagcaaaagaaccattcaagtaaaccttccatggtaacccaagcttgtagctataagttggaaaagctcttcaaagggaaacaaaataaatagttgagcaaatggagatcccccaatggatattctttttcctatgaagtaaattttcaactaaaagttgttt

SEQ ID NO: 326331 - DNA, 681 bp, Cannabis indica
aacccacatagaaattactgaagcaaacccaaaccgtaaatttaaaaaaaaaataaaaaatagtatatagagtaattcctctatggccattatatatacttgataatttataacttagagttaatttgtttcatatttgattaatttaatcgaataattgttgaatgatataaattaatgcgcgctcacataaattttttgaatagctaggttaaaatacacaatcgaatgttcgctaaatactttgctcgatggatcaccttcgataaggtgtattatttggccctatccaaccaactagcgctttaaaatttttttaaggcaatgaacggaatgtgccaaggctgacactcaaaagagtgtgagccaaacttgaatttgaacccttgaccttcaaatcttagctaggcatgccactaatttgtttctaggcaaccacctagttgatattggttcgtagcaaagaaaaagcacgattaaggttcgatcgagtaatatataatatgtatacatattaatttttactactataaaattatttttggtgtcagttttaaattgatacttataagaataatgtcatttcatagaactgacataaagttagagttttgatgtcgattttaaactgacactaatgaattttgatttctattttaaaccgacacttaaaatatacat

SEQ ID NO: 326332 - DNA, 691 bp, Cannabis indica
cgacgaagccgaacgcagaagttagtacttgcttttgccgaatcacgctgatttcagctcttgtgaaattacgggcctggggtgaatcttattgggcctgttgcccaaaaatgccgggcccatacaagaatctgaagaaatttacccaaaactgatttttgtagaaggaaaataacattatttttatgatattgcaatattatactatatttttataacgtgaaaacaatatcttttataaaacaacttaaaaacaacagtcaatcaaaaacataaaaaaagtcaaaaaaaaaaatattccgtaaatttttctttcaggttgattttaggtattttgaaaataatcccaaaatcttgagttggactatccttaagcccatgatgaaaattgaaaatgatatgtcgtttctaatttagaaacgtcatttcaataattgttaattttctattttgtcaaccaaaaactaaatgggcactcctattcaaaacttaattacacgaataattatatattactttacggtaccgctaagtactagtttcctataacatttctcaaatcaaaatgtgcaaattacaaaagtaaaaaagagctataggcaggggcggacccacattgtagcgagaggggcagtcgcccccctgaaaaaaaaaatcgagaaaaaaatttatatgtattttaattagttac

SEQ ID NO: 326333 - DNA, 1582 bp, Cannabis indica
tatttagcatgttaatatacatacttgttagtaaatttagaacatggtaaaatatattccaacacataacatctaagaaagcgctagattttgtagtaaaaaatatcatgccggtatggacttccgcacaagattgtcctagataatgggaagcaattcgatagcccaactttcacagatttctgaaatcattaagagttcctccacagtagcacaccctcaaacaaatgggcaagtcgaggtagttcgtaagacactcaacgaaaccatgaaaaagcgacttgaagaagctaaagggaactggctggaggaacttccagaagtattgtagttttacaaaaaatagaaagggcaacaactgggcagacacaattttccatggcttatgattatgaagcaatgctgcccgtcgagttagagcatccatcccgttgaagactaactaatgatcaagaaaccaatcacaccctcctggcagaattacttgatgaatttgaagaaaaaagtgcttcaacaaacctaaagctagtggctcatcaataaaaggtagctttatacttcaacaagcaagtgagggcaaggaagttctttgtagaggatatggtccttagaagagtgttcttaaacacaaaagatagcgaaaatggcatgctcagacctaattgggaaggaccatatcatgtaacaaaagtcacatattctggagcatataaacttggtcagtataatgaaaacattgaactggttctggtaccaaggtattggagcgaggagcattgaggaaatactaccaataagtgtacaaggtctgatgacccctataaagtaaacaatgcttaaacatctactcttaagtagatggccttttgagcggaactcgctcaaaggtttggagaaaacaactagtacttaggacggatgactattcctaaattacagtatgtttagaaatcatcgctcttgaacaatgtctctcagatagactacacaattcaactattttatattttaattagctaaagattagttagatcatatgattgcttttataattgaataaatgaacgttactacggtaacaacacattcagaccaatatatgaataaagctattaattatcattctatttctgtctattgttttcttttctataacaagttatataattaccattaaaaatgtgtacaaagggtttgccagaacccaattgttgaatagaaaaaattgaacttgtgcaatgcaagtgatcaagagtgatcaagagtgataagtctgctcgctcactaggggggaaactatacacgtacaaagcatagctaaataacaagctcgaaaaacaaaaacatttgcatgtgcaattatttaaacttaagagaaaatattcatttcaaaagataacaaggcatcataacttcgggattaaaagctgcccgaccaactagttgtcttgaaataaaatgaaatattaagatagtttaaaagctgcttggtcaaccatattgtactaaaaatgggcccatgggccaaactagaaaaaaaaaagaaaaacttgaaacatttggtgtaacgccctaatctata

SEQ ID NO: 326334 - DNA, 548 bp, Cannabis indica
ttattattattattatttctcttgtgatatctaaatggtatgcttctttgtcttagttttattaagttttttttttttaaaaaaaaaaagaggttttagaatttaaaaaaaaaagagagatgtttatataaaaaaatatgtgggaaaattaaaactaatggtgcagaatcaaatgtgatttatgcatacgatcgcgatgagattcagagttttcacaaagtgtttcaactcttacacttttatctcaaaaccaattggcaatgggaggagtagctcattcatcttatatatcacaatttatttccatacataaacaatgtgggactaattttatttttaataagaaataaatcatttttcactcaatgcaatgtgctttgtcatacagccaaaaattaaagcttgtttggctgtattttcagtttttagtttttaaaattgtgtttttaaaagtgagaatagaaaacagttttttgtcattttaaaaatttaatggtgtttggcacaaatttttaaaaactgtttttagattttttcttacgaaaaaa

SEQ ID NO: 326335 - DNA, 844 bp, Cannabis indica
gttgtttcaaatgtaaaaataattaaagtttggtgaataaaaagagtcttaaaagtacaaaaataatatcttaagagaaatattaaaagatattagtgatgatggtaattagatcttatatgatttaatttttcaaaaaaaagataaagatgtattttaagttattcatgatatgtggaagaattgacgtaattttataattatttgttctgaatgctacatggcgaacataagtcagtagatccgtgttgtagttattatttctccttaattactattatagaatatcattagtcatttgcaagatgacatctcataaatgtattagatattactatcaggtggcatcttaaagtacaaagcaaagcaccaaaatagtggtatattattactggtgggttttaatatcagatctcatacattataattttacaaataatatgaaaaaccttaatcaattataaaatgtcatatcattatattgttttatcttaactaccaaatagtaatctccattatttaacacacacttttcatccaagtaattatggtaataatgggctgaatagaataatggagtttttacaccatatattgaaatttttaacttttttactgtggtgcgattttttttaaaaaaatacagtgtactagtttttacagttgttccacagttgttttttgttgtcctactattattttaattgttctgttttgttgttttataattattttataaaaagacagtatttttataaaaattccgtgtcacagtaaaattataaatttttgcctaaaatgcagtattttttttttttttgtaaaaactcctacaataataaga

SEQ ID NO: 326336 - DNA, 973 bp, Cannabis indica
attgtgtcccaatgtcatgaccttaataccatgacttgagatacattcaaagctttgttttatgagaatattataaatctatctgtgctgcaaaagcggatgagttcgtacagttgatctaaggtaacatgtcggtgaccgagtatgccaccaagtttggtcgcttagctaagttttcctttgatgagatggccactgaagcctcgagaaaggcaaagttcattcgaagttttgaagaacatattgctcaagatgtgattgtatcagatttaaaagaaaagtaacatcaaggcattttaaaacccatttcgaacaaatcttaatagaggaacaacaaatgatcctcaaagggcaataaatgttattataaacttatgctttcttaatgtattcaccaaatttttatcggaagatttttagttgatagccattgatatgtgtaatttgttacatgttcatttagattagagatctatcattcttcgtgcttctttgatacttcaacactggcgacttattggtattctagttaaaggtgccattagtatttttattcttatttttgtaaacaatattgtttgtctatcttgttgattctgctcttttgagtgatatatcatcgactattgtctaatttgtctattaattttatttttctctcaaaagaaaataaaaaataaaatcaatggccgagatctttcatcctttaccacgcgtatggactagattaagcaacatagtaatgcacaaaagttatacgttattcattgtaaccaattccataaaattaataacatactttttaaattattgacaaatattaccttacttgcaagtataaagactctgattcgtggttttagaagaatgtggtgaaagccaaaactattttgaggaaaagtgcttgtaaaatgatcgtggatagaaagtgttgacttcgcttttagtcaacgacaatgagtctttttaataa

SEQ ID NO: 326337 - DNA, 1744 bp, Cannabis indica
acgtaggagggtgctaggcaccagtggtgccctttagcatttctctgtaaatatatatgatcattgaactgcctgaatcgattttaagttccttttacaaaaatttataaggatcttcaccaaaacaaagaatgaccagattcatatgtactttcttctcataactttgctggttgtggatgaaccttttatggatgttgttgatgaaatatcatgtcctagcattgccccttgaaggatttgaggaaatggaatccaagtatgtccccagaaacctaaaccgtattcatagtgcgctcaaatcgactatatgttaacttggctgtccattagggcttcttagtgcccgagcgccattttttgtagacttatctccaaagtctaaatcttggttgggacatgactctcatgtatcttaggacaatggctaagtagttaataggaaccaaaatcgatgcgaaacaaaaggatgtcaacagggtgcccatttcttgatgttggacctaggttgagccctgggatgtccacatacgacatcctcagctttatggttcatcgcttaaattagagtcactaaggtctgtttacttgaactttatcaaaagatggcacctaagaatgtcttcgctggatctcagtgcatatttgggcgcccactattgtcaactaggccatcgacaccatttccaatggtcagccacctttagttctagcggttgggcccaaggttgtttccttcttaccacatattaaaagtggtgttcatgccatctcgtcaaattttcgtgtaaacaggacctagctctcatagatgcttaaaagcatcctcaaattattaaaatagtaaaaaaaaaaaaaaaaaccttaattatgattttatttaaatataattttagaaagattgaaaacctaattttatttattttatttttttttctaatttttaatttatttatttagatttcttttttttttcaaaaaaaaaaaactattagatgattaattacaagtatcatttacttatgagagattatagtttgttatttttataaatctaaaacaaggattcattaagtctgctgatctatctaagtttatttatgttgtgtcttttcttctgttggtgagatgatatcgagacttttcaaattcttttgaaataatattttaattattatatatttaattaattatccaatatttttttttaaaaaaaaaaaacaaaataaataatttttgttaaatgaataaaatcaaagtatttcaactttttcaaatttatattttgctaaatctatacttaggggtctttttttcactattttaataattataatagtcttaattttaggtatcaatgataactgagggttcaaattactatttacttaaattatatgataccaaatttgtattatccctctcatataattagcatttacaatgttttttttttttttcctcttttaaaaggtagtggtgtggttgatgtatcaaataatatgtttgtctctctctctccagaaaaagttgtggcgtttatgtgttttgagtacatcaaaaaagaaggaaaagaatatgaagcgatcattaatataggtttattaattttcggaaatgaaaggaaacttctagtgaagtttgtgttttctggctttgtcatgatacatgattgtgtggttggcactacacataaagaaataataatgatgaattttttgtttataaataaaacatgtaaaat

SEQ ID NO: 326338 - DNA, 1142 bp, Cannabis indica
tgaatctatcccacaaaattaggaatgtgatcgagatttaaatgcttgaacatttatggaaaatatctttgaagatattctagccgcatttttaggccagtgtatgcatgttagttatgagattgatgatggtcggacgataaaatataccctacttggatattaattccagtttattcttcaaacaggttatttacgaatgataaatcacctttgatgacacatcatgaagtgtactgcttgtccagataataaaatgttcttcacgtgtcatccaggtaaatgtcactcaccctgtgcataattcgggaaaacatttttccccaagtttgtgtggaaactctttgctcgcatgtggacttattcagccactaagctggttgaatgggtgacatgtgttcatctttcacaccatatcttgatctaatgtgatttgatggaaggagtgaatatatgagtgtctcttcagtatctaggcatttaaagcattgccttgaaaaatgggcctcaattggttcaatgacgggtattgagtaccgcgtgtctgacagttgtactctccaatatgtgatgattacacctttttgaagggaaacacaaaatttaaattccaaattaccaaaccacccttccaaccacctatataaggggttagaaattcttttgcactcttttagccatttttattctcaaagataactagagcacacaaaccttttttctctctaaaatctttgaagaattattgcttggagcttgatttacaaaagccatccaagtgcatttaagagcttccgaactgtgagtaagtcctatttcttcacttttattttctttaaaaacatgcattattattttcaaactgtttttataaattttggatttttgaggctgttcttcgatgattgagattaggaaataaattagggctttcaattcttgattaagacgcacgttcatggcttttagattcccaaatttccatcaatttcctgttatttttgctagaaattacatggaatttcctgtttgaagtttctaggaatttcttaggttcatctatatttaaacctatgatttgggaatttcatttttagaataaaatttcatccttttttcttttgaatttatctagtcagcat

SEQ ID NO: 326339 - DNA, 862 bp, Cannabis indica
cgcgttccatgttgccgggcaccgaaaatacaaaattatgaaatttcactatatgacataaaactacattcagaattcaaatataacatcataaataattatttaaatatctataaataattttcataattattcttaattaactgctaatttccaaatcaaattaagcggtctttacaaatcccattcatctgatcagtcattgtcaaagtctttttcttcgaatggtgctctaaatgtcgagaaaactattgtgccattacctacggtgagctcacgaattaggtccaaggtgaccacactaaagaaacccgaagtggttctacccaaaggagcctctaaaggaaagaaagtggtgtcctcttcctcaaagggcaaaaacctaaaagagaatcctcattctgtttcatgatcggattgtgaacttgaagaagagagcgaagaggatcaagaatcaaagggtggtggatactttgatcagttttgatggctatgtggatccaattgtgaaggagttttatgctaatatcactgatgagtgcctcgatgaggactcatttatgtttggtaaagtctttgttaaaggacaccggtattcctttactgtgaaggatgtggccgaagctctcaatcttcctattggaattgagccacctaatgttgaatttgatcatcaaaaggtgtctgggtatctcactggtgataatgatgtggaactctctgacacaatgcatatgtctcaactcacctatcacaatgctgctcttaagaggttttccctatccaattggtttccttgctcaaattcggtaaatgtttcaaatgaacttgccttcttttgtataaagtttcaattggtgct

SEQ ID NO: 326340 - DNA, 719 bp, Cannabis indica
catatatatatatatgtctttgaattcctttatgtttagaatgtttactatgaacttaacttttgctttagggttattaaatgaaatgcctattattgaattaatgcaattttttgttattcttcatccttattttaattcctttcagtctaggcttaattattgattgtccatatttagtaaatatctatatattttttgaattaaaatttaaaaagtgcaatttgaatatgctttgattattaaaacacaattttatattctaggatgaaagtatttagattaattgtttttttgagttatttttcttaatgctacctttgtgattaaattttttcatagaaatattgtaacatccccgcttcaagcttccattggacattatcccacgaatttatgacttgtatacacgagtacatcactatggctgcttcctagactgatgagtggtcctacagaccaacacgagtatttccaatgtgttttgtcctcacttgcatgcttccaaggaaaactttctaagaggtcaccaatcctaaaattaccctagatcaagcatgcttaactgtggagttctttcgtgatgagctaccagaaaacaagatgtcccttgttgatataggtagaatcaatcaatctatttcaacacagttttgtgtagtctcatacctacacagtcttagattcattacacttgaccttccccaggcggtgtggga

SEQ ID NO: 326341 - DNA, 750 bp, Cannabis indica
tatatatctacatataaaaaatttgatgtttatatttgagtgagggctttagcccacatatgggctaaagtccctccgtccctgtatatatcttcaaactaattagaaataggaagaatagtatatgtatcttatatatattgttatctttttacatattagtaaggtaagactttaacattcttcttaagatggtagtaagtgttgctcacaaatctctaacggcttgatcacaagttatatttttggctcacaacaaatcacaagttctttttggctcgtctttttggaccggtggtacttttggttcattgtggctcttttttagactcgctaaccctgaattacaagcggctattttggctcatctttttagaccgattattagatttggatcgaatattcattagagttgtgtttgactaatactatgttagaatacagaaatgtatggttgagatagattgaatatggtctatgtaggataaaatacatgaagttccatctcaaaattaattggcaataaaaagagtagcctatacatcatatatatgatgctatttctcacacattagcattgaaagactaacaattcaattgttttctttgtgtgttattattgttgaaagtaggggtgtttatcaaactgctcacactgcataaacttcttgcaccgcactacactacacaaaaaatgtgatttaaaattataacaccttgctaatttaggcacgctacagtacttttcta

SEQ ID NO: 326342 - DNA, 849 bp, Cannabis indica
tttgtgattttttcagtgattttctggcgataaagccaatttcgacaaatttttcggtgttgacagcaactccgacgacttttttggcaccgaacgctactccggtgatttttccagcaccgatagcaaacactggcgacttttctggcatcaataacaaataaaattatctattgaaaacttaatttacatatatatatatgatatatcaaataccataaacagatctaaaaacaaaagaatatcaaataaattggtcaaacttaaatatgtcatatttatcataaaaacttttaaaattccatactaaacgtaacttttaaatttgggacatgtgaaatcactaaattttcattataatcacgtgttagtttctctttcttatgtgttcgattagtagtaggagatatgtctataaaatagcgttcctattgttttcaaaaaaaaatagagttcctattatgtaccaatagttctctatacataatgagatgatgtcattcaaattatattttctttaaatatttttagtaaatatacttaatattttgaaaatattgccatttgtactcaaattttctttttgacagtaacagtaagtatattttttaaaaaaaattattacacttttatacattctttttccttcaaaatatctcaaatatatttatttatctactgctatcatctagcactttaaaagattggtacaatactaaaatattttaaaaatattgagtaaatgaactgccaaagaaaaaaaaaatgagtataaaagtgtaatattttgaatacattagagatatttacttcaaaaaaaaaaaaggaattacccaatatactattttt

SEQ ID NO: 326343 - DNA, 745 bp, Cannabis indica
gaacatctcttaatggtatgtttatgttatgctctctctgctcattcgttctatgtattattattgatttatttgatatatacatatgtactatttgttaagaatattctaaatctgaattagccttaattaattaatgaaaattaaataataagattaaggaatagcagaaacgtaccggagtccatagatcttttaatttttgcatcagagtttctctttggaacttgaatttcctgatgatgggggttcaaaaatacaatatgtaaagttatgcaaatgaggaccaatatctatttattaataactaaaaaatcagtaattaattctttttgactattactaattttacccctagtcaaactggaaattgttcttatggtatccacgtattaaaatgatgacaattatgcctttaagtcataaactttatttgaaaatagaccacataaatttaacttatttatttgataacacaacacacattttatatataatctcaataaatttctaacactatttacatacaggatctatttgcagctggcactgatacaactgcatccacattagagtggtcaatggctgagctacttaaaaacccagaagctatgtccaatgcccaagcagaggttaaacaagtcattggtaagggaaacacaatgaaagaatcagatataacaagactcccttacttacaagctgttatcaaagagacctttcgtttgcacccaccagctccatt

SEQ ID NO: 326344 - DNA, 1469 bp, Cannabis indica
aaatataattattaattaaaatgtgtgagtacgtccacctagaatggtgagtattcaaagaatagacactcagacgtactaaaatatataatgaacacaagagaattatagaggtttagtcagatcacagactgcttagtccactattgcaaggaattctgccatgttccatttcatattggatcactcatttatatacaaagcaagtgtcctttgattatacaaaacttaattgtaggaatttattcctaaaataaccctacacacaacaaaggaagaataaaaaaaccaaggccaatttagacttttcttacctaatcaaacccacagtttgacccctggtttaaactccccaaacgacagccatttccctattgctacaagtcgtttttaattaaacactagaaaccctaaaatgtatttgacatatataagcatctttatcttctcaaaacatataaacaacagctaccaaaagaaaccctagccgtgaacctcccttcttcgttgttcttcactgaagaacatgaagagcaactgccaagatacaacttagaaaacaaactctagcccagattaaactaaaccccctttaacccgagccaccttcttcgtggttcttctatgaagaacacgaagaacacaacctagcaccaaatatatcccgagaaataatccgttaaatcgattcaaacccagaaaatcacaaacataaaatagctaaatacaatagtaaattcagcaaagaaaaaggagaagaaaacaccagattttatagaggttctccaaaaatgtgttgggtacgtcctcttcgagctcgcctcgtttcactatggatctttaatgatcaagagattacaatggtgggattccaaaacacacagatattattttggtaatccctaagattttacagtgttttaatactctctctttttctctatttctctctgagattgaaactgacagtagcttttctttcctttgttgcatgaacaattctccccttgagttggatatcgaaaccctagtccaagggttacaaggtttactcctccaaactcaatctctggccattttctctctggaaccgattctgatgttgtattgttctgctatggatctgattttgtgttggtctttttgatctagtctattgtgatgttttgtcttctttttatgttgctactggtttatttatcctgttgtagtggaatgcagagaaaaagagagttagttacaaagtggttaaaactttgtaactaacttaagtgttttgcctaggtatattagaggccgaaggccacctaggaaatactttttactgtcttgtaaatctctgtaataatctggttttacagtgtacaggtaataagggggtttattccaacaatttccacctaaatccccttatgaattgtgcactgtaatctctgttgttgtttgagtgtatttgagggtcttagctc

SEQ ID NO: 326345 - DNA, 681 bp, Cannabis indica
taacaaattagaggttattcttgaatagaatatttttaaatagaggttctactgtatatataggagcatttttgtaaatttttgtaaaagaagttagagtagttaaaattgttttaagcagtaattcttaaatttaatttattttgaggtgatgatattagaattattaatttgaaaagtgaaaaagtatacttctttgtttttttttttttttttcaaaaattattgctattattattattcctctcaatgtgtttttatataaaatccaaaaagaaatatctatggggtgcatatataatttgtctcctaaattacaagcatatatatatatatatatactttgtctcataaaatacacttacataatgctttttgtatataagtttgtttatttaattagaagtgttaattgtaattttttattaaaatttcttaattaattttatatgcttgaaaatgaaatcacatgctgtaatagttttttactttttacttttttttaaaaaaaaaaaaattaaaatttgttataattataatatcatgattcttgtaaatttttgaaaatttttaaataataattaattgtaccgataatagagttttcgatattttagtttaccacgtttgttcaaaaaactttaaatttatttttagcattgtaacttattcgaatatttt

SEQ ID NO: 326346 - DNA, 1209 bp, Cannabis indica
cacttcaaacacaaaaacagaattagtactaaactactaattattgagataaaaacttctaatttttgataaaaagagaagaaaagtatatgaacttgaaagaatataaattgtgggataacaaaaaaataattaatttaagtttggtatggaaaattttgttgaattgattggttttctatacaattttttcttttttacatatcaaatataccaaatgtgagaatttattgtttattatttttcatttttttcctatatttttgggaccttttttctgttcttactaaactccaacttcttcttagcaaaagtaatattaaaaatagataacttctgagaaaagatttgtattgcttccctaaaacttacaaaacttatagtagcaaaaaaagaaatacttcaatgagcagtttgtaatgtaattgatcacatgtaggtagagcgatcataaattaacaatttttaaagatgattaatgaggaaatgtataaagattaaagtttatatgaaaataaatgctatggggagattgatggtgtcacttgtgtatcttcaacaccatttaaaatattcgatatggtgtatcaatgcattacttcctgtttcgacatataagaaaaaaaattaattcaattttttatacgttataattatttaagacatcttgtaaaattttaaaaaaataaaaataatttacactataaaatgtaatgttcaattagttatgtaacacttttataaaataaaagaattacgtgtgtaaaatttaagcaaaattatcgataaactattgatataatgtcgatatcctatcaacaaactcaagacattcaaaaagttaattagcagctactaaaccatcgatataccatagataaaatattgatttcccatcgataaacattaaaaaaaattaaaattaaaattaatatttttaatcgatattatatcgataatctatagacaattcactgaaaaagctaccataacacataaaaagctccataaactcaacttatctccaaaaaattcacaaaaattaaccaatttcaagaacatacataaatttacacattaatctatgaaaaagcttttttttgaagaaaaatttacttgggaggagcaatgagctgggtggcgatggtggttgaaagaggccgaggaggaggaagagaaagatttgggtaggtgagatttggggtttgt

SEQ ID NO: 326347 - DNA, 1669 bp, Cannabis indica
atggtatttaccctatatttaaagtatagttagattaacttttaatttttccgtattgcaactttcaattatatttttataaagttacacttaatcatcgttaaacgattaaaatagttggcagttaaaagttaatgaaatatatatttcatatttagaaactacttaagctaaaatttaagtataagttagctatcatatttatagtaaatatttaaagttaaagatgtctaaaatataatggaaaaagaataaaatgtgactaacatacttaatatatatatatatatattggtaatttagtaagttttatttttacaacaataaggcaaagccgagtaaattgaaatctatatattacaaactgtaagaattatatcttttactacgacatgtataacattagaaggtttttatctcatgaaactgaatttctactatgtcaaatcccatacacaacaacagaaataacactcaatggatgagcttctttaaatcagcccctttgtagggcaggccacacaacaaagcaatttcttctaccaaatcttgataatctgtctctagttgggagtctatcacgcagagccagccaaatgattactctatgcttcgggacaataaatctatccctaatcatggcatacttcaatctcttcattattccctgctgattagtttatataaaccagagagaaaaatcaagcttcaaaaactctgtttgagaaaaaattgtctttatcttatctttcatttttgcactatttccccccaataccagctaacatcaagtggaacctttccaccaatcaacttgctttatataaacatagttgatcacttaacccaaatgttattttcggtcttagtgattgcccacacatatttcttatggcacaagaattccataaaagcaatatctttaaagccaagaccactttttttttatcacgacaaatttcagaccaagcaaacatgccccggaccattttacatctcactgcccttccaaagaaaagcacaaaaaaattttatttatcttttgaataaactttcttatggaggataattatttaggactaataaaagtttattgtgagatttaatcaatacagtcctatgcacataggataaattcctaccgctccaaattctgatacgcttaaccattatatcaactaagcaatcacaatctcgaagatatcttcatgtcaagatacttaaacggcaataagctcttctggtgatcagaaacagttacaattttatctaaaaaataagaatccgtatataaatcacatagcactaaaccccaaagacttggagaacatatttaatattttcaaaatatttttattatatacaatctttttctttagactataatatatttaatcagtataacaaaacatagtgttaggagtaacaaagtctcgttgtaaataagccagttaggggtgaatcgaggttttttcaattaaaaatcttgtttttattgtattaaattttttagtgcctcaaatacttagtatttttaaaatatatattatttttacttattttaacttttcaaattaaaaaaaaaattattgtatttattttcaaatttgaaatggtttttttcattgaattggtatatttatctttaaattaaaatattggatgtaat

SEQ ID NO: 326348 - DNA, 483 bp, Cannabis indica
gttgttttttttttttttttttttgttataaaggagaaattgaaatgaaagaaaatgattgtaactaattaaaacacacactctctctctctaacacattttaatcttttaactcttcaagacacaatactcaattatatataattttcctccaaacttatgtgaaactcatggtatagttaggataaaagaaaataataaatgggtaaatttttagcttagaaagataaaaatgtgtattagaaaaaattaggttaattaaggctcaaaacggttaaattatggataatcacaaaataggttagaattgaaaggcacaaatattacaaagagattgtctaaatcatctttcaaacactactacaaaaacaccctttagaggcggtttttaagccctttcagcgtcagttttcgcgaaattcgctaccgacgctgatcagggcgacgctaaagggtttatatgaaccgacgccatatataccc

SEQ ID NO: 326349 - DNA, 1599 bp, Cannabis indica
catgactatgtgcaaattgtcaatatatatacttaaaaattacctttgaaatcccatgatatactaggccagaaccaattgcagaccgagcagtgcctacttctccatatgtcatccatttgtaccttgaatgatgaaaagtgaatgaaaagaattacaaatatacgaataaaacttcagaaccaaaattatataagtaactcactctccaactgttccatcaacccgaatccgtgttcccagatacttgtaatctcgaaaagtatcaattgcgtgcctggatgcagaagtttaaaagtattattcagctaaatcattaaatgattgaataccggagcacataaagcaactttcttgccaaaaaaattgaggatgctcacacaaaattgtcatgtagtgtaccaatttcaggatgatcttgaaatctactgacaagcttcaaaggtgaacgagccgatctacatcaagaaaataaaattggcaaaaaaaaaaagagaagtttacaatacggccatggagctttttaattatagcaaagggagcaacagcgggataggccaacctgtacacattccactttcctgtttgcaatttttctggaagaacaacactgtagccttgttctgtgaaaaacgaaaaccagcaccgataattactatgattaaaattacataacaaactgattacctctcaccctatcacgcatatcagatcaaagaaactgaaaatcaatctgaatatattcctagacaatgcattaaagtagcaaataacttaaacaattgcagtacaataaagcaagttgacttctccaacctcaaaatcaaaattcagctataaacattttgcccaaatattaataataataatctcaagcaacaattttcagtaactttagacaaacaccaatgtccaagaacaatttttttttttttgtcttaactcaatcaagtcccagacaaaatacagctttgaaattagatgaatccccaataagggagattgtgaggaaaaaacttgtttaacataattacattataactgggggtctgcgttgtgacataaaaacaaacaaaacaaaatctaaggactaatcctattcaaataaatatctatgccaagagttttgataaatggtgccttaaacatcaaaggtaaggttggacatccaatccaatccaacttttttctcctcattaggtctaatccaactagtaattgaatttgaaaaatcatcatacacttagatccaattagacctaaaaatcctatcaatccaaaaactaattaaattggatatgttttttaattaaatatctaattacacacttaatttttaatattaacttaaaatgggaagaaaaataagtaaaaactaaatatctcccattatttaaatttaataccccaaaaaaaaatataattaaaaatttaaaataaataaaacaacacatttagcaagtaataaaataggagaaaacatcacaaaaacaaatactacaaattcaatacaaaaaaaaatccactaaaaatataattaaaatacttatttttattatacataaataaatataaatattttttaatatatataaatgt

SEQ ID NO: 326350 - DNA, 1024 bp, Cannabis indica
atacaaatatgatgaactcttacattgaggtgtatgtataatttggggagagcggagcctagaaggtagggcaacgggcaacctaacctatctattgtgaatttgtgattgtttgtcatttttgcaaagagaagtttattttatatgtatgtatgcatacatgccagctcgttaaatgacagatttttcaaatgagccactggtttattgccatgaatttcatgatagagatttaatatataaaataatataatatatcgattaaatatatgatgtaaatgttaaaaaaaatatatatgaagtaacaaattaattaagtgtaaataattgtaatatatgaggtagaattaattatattttgtaacttttataatgtcactaagtgtgtaaagagatgttaagttaaatttctacaattcaaagctataatgaaaatatagttgttattagtgttttatatttattatttataatgtgtataaatgaaataaaatcaatgggggaatgatttagaaagttatttagaaaagctgaaaagcttggtaacaagtaaccagttacgtttttttttttttttttttttttgttttttttactttttgcttagcaaagtattcttttgcaattattagctatatatatttgttataaaataatatagaataatataaaatagatatgaagaaaaaagaagaagatgaagagagaaagataatttttcagttgtttattccaataggctgagcccctatttatacaaaaatttgactagaagaatgagaaactaaatcaatgtaataaaggaaaatacaacaaagcaataatggtgataattaatttggtaatttggacatctataaataatatttcataatactcccccttaaatgtccataataattgcctccatataaaccttgctgaaaaacttagtcaaaagaataagagtatagtgtaaactaactccccctcatttaggcattcgtggagatcctctaattgacgaattttgatcttgtatgac

SEQ ID NO: 326351 - DNA, 1178 bp, Cannabis indica
aaatataatcatgtatagtaagactgccctttttcagagactgcaactgaaatctcagctgcaatattctagccttagagctagtagtgtagagacgttcaagagtgacccacaggtcacacgaggtaagacaactcatcacatgtccaaacatggattcagagatagagtcgagaagccagctgagtttggactgatctatgcacctccacatggcagtatggactgatctatgcgcctccacatggcgtatccaaggttgagttgacgagactcgccaggtttcgagcctccgactgtattatccacaaattgagggggacatggtttggttcccagcacatatatatccttcgagttcatgtgcacgaagtgcgggaagagcctgtgatctccagtaggggggatttgttccttcgagtttaatggtaagaaaggccagactttggaaaggtgaagatggtatggctggagcaggggaaatgactggtgtgttgacaagctcggcagtgggcgcaacatcagctggatttgaagttgaagacatttcagttgtggtaaggttctccatagataggacaatgaatttctcgctctgataccaagctaaattgaaggaaataacagaagaaataaaggactgataatactctgtatattgttggtttaatgaccctttttattgcactaaatacaataggaaaagtttccttttatatacaattggaatatactagaagctatcttcctattggttgatacaataacaaaattatattctctatggcccacacaatgatatgaagattgagggaatcaattttccaatgattgataacggtaaagaatcaacctagtcagcatccttgatttcattttctaattgggctcactttgggcctttcatttcagcaataagtgtagtactacatctatttatcaggtgatttattttattattacgaaaaattaataagatcataattaatattaattggttagtttatgatatatgtatatatatatatagactgatagttagtattagcttaaggattatatatatatataggttaagaacatattagctagtaaatgtaaattcaagataaatacataaggttaggtgattatacttgcacctcatcattgaaatattattaaactaatttaattta

SEQ ID NO: 326352 - DNA, 837 bp, Cannabis indica
gatgttaatgaaacatacttggtagtaaatctagatcctggtaaaatatttccaacacatacatactataatgggtctctagtaccatcatactcatggaatttggtgcaacatagctttgcagagcttctactcatgaaatgtcattttcaaagggagacaatgagtggatccttccatcctttcccattcactatttattcccatctggctttttgattccatagcaaggagcttgtcccatatcatctcttgttctctatttcattggcctgaattggagaaccttcgggagtaatctaagttgaggtacatccttttgatatcgtccagagtgcctcttcctctgcgcttggctcaacatcatccctgtttcttcgcagctaatctagcgtgcattgtgtttttgcataaatgtagattttgcgtccaattgatccatcttgtgcttgattgttatgattttgattcttatctgtggctccatcgattaactcgacctattactgtttgtttctctcttcatgttgcgagggacactggtaccctttaaggtctgccttcatttgactgtttttgctttcgagattattcacatgctctttttgatgtgccaatgatgttccttgcggtgctattttgtcatctcgagtttttagtatttctaggatttcttgccaacttgggattgcgggtgttgctgtgttattctctttctgggtgattatattagtttcttattcttggttagcgctattggtatgtagtgtcacgatatcctcttcttcgtttgtcatttcaagcttttttcaaattcttcttgaatactaaagaaca

SEQ ID NO: 326353 - DNA, 616 bp, Cannabis indica
aaatataaactaattagtatctacatgtcttatttttaaataacatctgttaattttttttgttaacggcatataaaataaaataaaagatcatttttgatttcaaatatatattttctaaatattaaaataatcaaacaagtaataatataattattattttttatataattatagaaaagaaaataaagatatgtaaaaataaataaataaaaagtcaaaataaaaattcctcaacatgtaaaaaaatggcactcaatttgatattagtgctggtagtaagagaaataaatgtatatagttgtttatatgcggtacaactacccttagctctatcatttaaatgtgtgctgttatatttgttaataattttaaatttaggtatataactaaaaattccccttaagatttatggagatagactaatctaggcaataaattaatgaagcatataatttacttaacttaaattctattcttcttcacaattaaaaatacctttaacaatattagaaattgcaatttatcacaaacacgtagaattctagactattaggtgaagagtaatcctaagatgacaatagattaaagtaaaacctaatttagtgatcatcta

SEQ ID NO: 326354 - DNA, 884 bp, Cannabis indica
aaacccaacagttccagtactatttctaaaagaaaaaacaatgatagaatgctttgattgtgtattgactatcgagaattgaacaattcaactatcaagaataagtgtcacccacctaaaatgatgatttatttgattagctctaggtgaagacaattttctctaagattgatgtttgcttgggttatcatatggtgaggatccgagaggacgacattccaaagatttctttttgcactagatttggccattatgaattcttggttatgttcttcgggttaaccaatgctcttatagctttcatggatcacatgaatcgagtgttcaatgattcccttgaaaaatgtgttatagtgtttattgatgatattcttgtatactttcaataagaagtaaaacatgagcaatatttatgaatggtcttacaaagactaaggggagcataagagttatgcttaattcaagaagtgtgagttccaattattgcaagtgtattttctaggtgacattgtcggtcaagatagaataatggttgctttggaaaaattagaatcagttagagattagtcaagactgaagactgctacagaagtcaaaatttttcctagttttgctgggtgttattgtatttttgtagaagggttttccaagatctccacacctttaacaaagttaaccaagaagaatcaacagtttttgtgggcagataagtgtgaagctggtttccaagagttgaagcagtgactaattacaacctcagttttaggttttccatcaaattgagaaaattttgttgtttaatgtgatgactccaaagagggtctagagtgtgttctgatgcaagctgacagggtcattgcttatgcttctcattagtcaaagga

SEQ ID NO: 326355 - DNA, 1421 bp, Cannabis indica
atttttattagtatatttaactatacacatttgaatttatgaaaattatttatattatttttttattgtcttacatattaaaataataataaaattaattataaagttattagatttttttttttaataaaacattaattagatattaaatttttatatcaaaattttttaattgtgtattggagcaaaaagttaaaatttggtgtaaatttaccacaaaactactttttgtgccaaatataacacaatttttacatctcccattggagatggtctaactttttcggcgactttttcgacaccgttgactttcttgacgacttttctggcgccaacgtcttccggcagcttttccggcaaaacttattattgtttacaaatatttgatttacatcttttttttttacaaaaatatggcataaaaaaacttatatagatgtaaaaaaataaaaaaacctatagcccttagtattatttatttatgtcataaaaaagtaaatttttgtaattttgtcatgtataattcttacttactaaaataattatttaggtcaaattatatatagggatacaaatatatgagcccagatgagagattttaatggaacagttcattcattcactctctctcgttctcttattttttttttttttttgagtttagcgtaatagtatttttacaatcatatattagcttaatagcttaaagttcctgggttcgaacccatgacctctcttctcaactatagataactatcctttaaaataaattttaaagttttatgtgtacacatgtccatataaagtcaaattattccatattcatttgcaagtttatttatttatttttacaaggcatgttatgataacccaatttatatttataatttagcacgatacagttcacatggaccaaaaatactataacaaaatgaaacaatatcattcaaaaaatttcaataagtttagaaaatatactatcactttgttactttgttttgttccacaccgtggaggaaagtgagagattcttagacaaaatgtataaacatcaattagttaatttttgttttaattatgaggaaattacactcattatagactttttaaaattgtttatttaaatataatatttttaagtttaaccaatttatatgatattttttagttttaagtatttgtatggtatttgatatgtcatacatatgtaaattaaattttcaaagtctatatttaatgtttttacttgtttaggcaattttttttttgacactggtaccgaaaaagtcaccggaatttactgtcagcaccggaaaagtcgccagagtagttgctggcatcagaaaagttgctagagttgctgccggcgccaaaaaagtcgtcaaaattggtattgttgctgaaaaaattactggaaaaat

SEQ ID NO: 326356 - DNA, 1078 bp, Cannabis indica
aagtataatttatcgaaggtagaatccaaaacttcagatcaaattgatcaccagcttagcctataaatggaaaatggttgtaccatttgatcttagaataatatttatatttatataatattcatgatcataatcatatcattataccatcatactgtataatattatacagtataggtacatatattgatttttttggaaatattaattaatttataatattgagaatatatttaaaataatttgttttacatgtcatgatacttttttataaggccaagttaacatgtctacacaaaatgtttaaattgtaattttgacattataaattatgccaaataatatatcaaaaaacttaatattaattaatgaaatcgtactattcatgagactataattatctaagtaaagtaaatagtattaaaaaaaaatttcttcactaataattaactctatcaaaacttaaattttaaggcaaatcttccaaaattattgtactgttaacaattcagcacttcgattcatttggccgcgttatttagatgaagaaaaaaaacaaaattgaaaaaaaaaaagtaaaaaaattaggatatttgtaaaaaaagaaataaaagaagataaagaaataattagtttttagttttagcaatgccatgtaagctaattttgagtgacatgtcaatagctttttgacctaatattagtgaattgagtgacatgtcatatattattactaagctaatttcaaagattaattactaacgaggtaaatttttttagagattttaccacaatttactctatccaagtacaaaagaaaacaatcaaatctcttgaaatattgttaggctgatttgaataagtattgttactggtttttaagaaatgcttataaacaatagtagtgcttaccactttccaaaatgtactatcattatttgtataattaagtaatgagtcccaaatcaataatcaagcgatgctagacccatggtgcctaacatcaatattgctcataatttttggtcatcttatcatgtaataatacataataataataataaaaataaataatcat

SEQ ID NO: 326357 - DNA, 813 bp, Cannabis indica
gattagcaacgagttgcacagtatgtttaaaaatcacgtaatatgcctatgttagttagggtgttacaccggcgcaatcgaaaccccaggtgtcggcgacctcatgcccaccaagcggcatcgcttctttcgccgctgttagctggagatcgcaagtcaaagtttggtggttcaaactttgaacagattttttagccacctccggtgtccgtttgacgagccatcttcaccactagacttagctcgtcgatgagaacaacctactctaatcgcccaagttgctactttttccggtgacgttttttgtagatccacccctttccagcgactttcctacgatattgtgtatcgttttgacaaacggttggcgtgagtgtgatttactcgtcaaggtggatgttttgatatacactatccctattttcggtgatgttttcggtaaaataatttttatagccactgatagttaatgtgcaccgcttaagtgaggcttgggaattccaaattgtaaatatagtcatattatatgtcgttagactcgatgttgaatggagaatgcaatggcgatgattatttagccatttgatggtatatgtgagagtaatatctaagattagactaaacaattggtgatcggaacttgagaggttaagattgtcttctggacaaagtttaacggcttgattattagacttaatttttatatgtgctgtataacattagacatattctaaatttttatgatctgcaaattatttgaaaaattaaaaacttaatctgcatatttttttggactattctgggacactgagt

SEQ ID NO: 326358 - DNA, 809 bp, Cannabis indica
aaaaaaatcgtgtcaaacatgtcaaatttgtgttatgcagatcgtgtcgcgtttgaccctttttatttcgtgtcaagtcgtgtcgacccattttcgactcgtgtctaattttctcgaccctaacccgtaaaatttgtatcgtgttcgtgtttgtgtgccgtgtcgaaattcgttttgccatccctaatccatataccacaaacttaaacaaatataccatagtgaaaacttaatatactataaatctatcttagtcagaaataattatactaaaaacaaataaatttctacattcttttttctctttttcttttctttatgttataccatagccaataaatcagtacaccacaaacaagataagagactgagaaagggtagaaagttaggataaaactttcaaggttataattgtacatttattgtgaaatttttaacagttaggtcattttactaaatatttaaaagggagggaggatattaacttatctagttttgagatttaacgttattttatatcttaacccggtaaataatgaaataaaggaataagaagtgaaaatgataataggaatagatatttaatatcattaaattattatacacacacaaatgaaatttttacaccaaaaacctgatttgcacaatttattactgttttacccttacacgcctacatcaacatttttacttatcatctttattttattacaataataccacttacacatcatttccatgcacagacacgtgtgccatccccatcatacatcaatcaactcccactctcttccctctcttttttcctt

SEQ ID NO: 326359 - DNA, 710 bp, Cannabis indica
caccttagtgtgtcatcaaattagaaagttaggcagctagatgtgtctaatgcttttccaaatgcacacttgcaagaaacagtctacatgactcagccttaaggctttaaagatcccttgaaaccttctcatgtttgtctccttcataaggctctttatagtcttaagcaagcccctggggcatagaatgacaaactctaataaaccttacttggcttaatccaaagtagatacgtctctgtttttatatggtatctctagtatccttattattttactggtttatgtggctaatatattaattataggtcctaattctcagcttattcagaagcccctctcaaatcttaattcatcttttgctttaaaagatttagggcaaattcattatttttttggtgttgaaatacacaaaagtgcataagggacatatctttctcaaaccaagtacatcactcacttgttaggtaaagtgcatctggaaggggccaagagctgtgctagtcttactagtaacgctcataaactttttcttactaaaggtactccatttgcagatcaaactctatatagaggcacacttggagctttacaagatttgaattttacacgacctgttgttgcttacatcattaataaattgtctaaatttattcatgtcctactaatgtacattgggaagcttgtaagtgtttgctcagatacttaaa

SEQ ID NO: 326360 - DNA, 1258 bp, Cannabis indica
tgttaggcactaggattagtatggtgttctagcatcgttcaattagttactgttacaacacaggtgttatgaatctgtatagctgagccaatcagagctctaagaagtcagtcagttaattagttagttacttagttagttggttagttgtccctgcatctctctactcgttcaatttctatataaagtcttttgagagatttgatggtgtaattctctctaaaaatgtatagtcgattgaatcagagttgagaaaaagttcaactttttggtagacacatcagaccaagggcttatagagaagctcttgttgctcacaaaaaaattagtgaagaatttataatttttcttaattaattacttaacggttgatatcttctgccaaatcatgtttgtcacctttaatttaactctaatttagggaggtcttttagaaaagcagtaaagagatagcttccgcaacacgaaacaagcaatgctcgtgttagtttttccttattactttgatgttttctttatcattatgtcctttgctagtgtctatcaagtatgtaaccacgatttttctcggccataactgagtgtcatgaataaacttaggagaaagtcatgcctgttatgacacagatgcttcgtgagcggtcacaccaagaattatgttaaacaatctatatataatgtaaatattatgtttttgcctactttgaaaattatgatataatccaatcattaacacatatattatatatatgtgtctgagaagctgttgttggtcactaaattttgcaatcatggtttagaccccttctgccagattatgctttttcaccttatatttttaatgcaggaaggtctcttaggaaggcagcaagagatagcttcttccacaacattaaacaagcaaggttcgttcatgtcagattgtaatttggttgtattcggtttttgggggtttaggcttgttttgtttatgtgtttagtattgcctggtttttctcttattatttatgatgttttctttatatcgttgtgtaagtctctatacagtgtctagtgtcacgggccgcctatttggacacccccaagtaggtagaacgtgcggcacttgctggcacaccgagctagcaagtcagcctaaacgcgcctgcaggcaaacaagttcaaaggttaggcacgatacatgtctcgcacatgttgagtgcaaacaagaagcatgagcaagcaaatcaaagcgtccccaaggaccaatctcacacaa

SEQ ID NO: 326361 - DNA, 766 bp, Cannabis indica
atcatgagcgcgtgacactcacgcacaccaaaaaacaaagaacaaacatttttaatatccataaaataaaaaaaaaaaaaaacaaaaaaaaaaaaccttaacctataagaaaaacaacatacacaaatctcaaattgggatatccaaaaaccaaaaaccaaaaaccaaacccatatagaagaaatgagaagaggtagtagtagtagtggtggtggtagtaaaacgacaccgtgttgtagcaaagttgggataaagagagggccgtggacggcggaggaagatgaagttttgtgtgaatttataagaaaagaaggagaaggacggtggaggactcttcccaagagagctggcttactcagatgtggaaagagctgccgtctccggtggatgaactatctccgtccatctgtaaaacgtggccatatccaacccgatgaagaagatctcatactccgtcttcatcgtcttcttggcaaccggtaatacataactacatacaaacacagattatatatatatatgtataagtcaaattcatactcgattgatgatgcttctagggtttctttttttttttactttaaggttttaatcaaattattgctaggtttagggttttcttatctgggtttttcgtggttatgaaacagtgattaattattgtagctatagctaggtttagtgttttctgatctgggttttttgatgtgtaagcttttcttcagtcaaacagtgattaattatgttatatatatataatatatat

SEQ ID NO: 326362 - DNA, 930 bp, Cannabis indica
aggtagttagttgttagtagttagcttaggtgtcaattcattattggtcacgattagctcgccactgaccgttatagatagttatagtaacttgtaatgttcctgcccttatgtataaaagactcgagacttagcccattaattagactgtaacttgacaccattttcatgattgaataacagagcatatactcaattcatttttgtagtttgtttagtgttcgattgtgtgtatgtatcatcttagattctattcttgagtgtgttaatagtgatgaaccgattggaacttgtgcaacaattggtatcagagcttgggagttcaaagtatgatcttggatcgattatcaagaacctggtgaactggacgagaaaaaaattaaaagcacgaagtttgttcttgagaaatttacagggaagaacgattttggattatggcgtgtaaagatgcgcacattaattgttggtataacaaggattacaaggtacgattccaaggagaaagaattacctgcaagtctaactaagaaagagaagtctgagatccttataaaggctcacagtgcgattattctgagtctttggagataaggtcctcagggaatagtttcgaaagagacaactgcaactggtctttggttgaaattagagattttgtacatgaccaagtctttggcaaatcgattgttcttaaaatagaaattgtattctttcaagatggcatcaggaaagaacattgaagatcatttggatgatttcaataagattatttgtaataatgaccgcatgttagattttagattaataaaggcaattagcattaattattgacattttataattatatatgattttatattgttgtgggtctcatttttagaaatgggcattagaattataacttctaaattctgaagattttattaaact

SEQ ID NO: 326363 - DNA, 497 bp, Cannabis indica
tagaaacacccctattgcaactagcggtgcaaccactttaaaaactcaagccgtgaatttgaaaaaaaaaattaaaaaaatagtatatggagtaattcctctttaaaattttataggaaaaattaataagaaagttaaaaaatataaaaaagaaaaccaagtaaggataaactagaatggtaatctggtaatcagttactgttttttctatttttaaacttttttctaaaaaatttcaataaaataactttttttgagaaaaaaaacttatacctcaaaaatcataaaataaattttccccaacttaaggaatacaatgggccttatataagctggactgtgtaaagacacctgggcctttatatttcttacgggcttgaaaagttcgttgcaggaaatgttaggtacttaatcgggggtaagttgaaaaatgccttttttattaatcaattaactaaatttgtctctaattttatatttatttgaaacatacctct

SEQ ID NO: 326364 - DNA, 626 bp, Cannabis indica
ttattgatgttaaataaatagattacattgaaatggaggtttatttagggcataaaacccaacagtcatgtggtacccgtaaagctcacacctccgtcacaccggagactcaactatgatcaacaagccaatcaatcaccaattgttggctaagtctctggacgagattgaagaaattagagagaaatctcactacaagaaatgtaacttttgccaatatatttggccgaatgtgctggcaaaatttgtcggcattaagtggctcaaccaatgccaacaatttttagtgggcagttttgccagcacacaattataccgggtaaaaattacctataccagcacaattcatgaatcgcgccggcaaaagtgttgaaataaatcgccttaaggcatgaatcatttccaatgattcatgaactttttgttggcgcaattatgcactagataaaggtttgaaacaatttagaaataattttttcgcgtaaaaaaatgtgtagggggagatttttgccagtgcatatttgtgttgacaaaaatatatgaggaaaacatgttaaatttcttaaaatggaaactatacttttattgttagggtaaaattacaagtgataataaattgtaactac

SEQ ID NO: 326365 - DNA, 1016 bp, Cannabis indica
aagactattatattgtaaacttctaaaattttttataataataatggaataattattgtagattttttagtggatggataatagatgtgtgtatggaatacattgagtttcaagttccaataagaaaccaaaaaatgggtccgctttgaaaacaacatcctaaatccaattccaactacttccccggaccacaattcccactcagtcaaagtacccattttgttaatgcatttttacacaaattatcaaaatgtatatatatattaaagaattaattttatggattttttaattatatttttacaaatctcatgacaacaacataaaaaaaaatgtttaaatccgtaaaaataatatatttttcattttgggtacttatgaatatattttccatttattaaactaattttaattttcttttatacaataaaaataagtaataatattaatatgtagacttcaaatattggatttttagtcaaataaatgtatatttttaagtacactttttaaaatcatcattccagtagattagtacatttttaaataatttacggtaaattcctttatgttttaatttttacatacataatctctttatttattttttgttgtggcaaaattcttttatcttttaatttttatacacttaaactctttattttttttatggcaaaacccccttatattttaatttttatacacttaaccactttatcttttattttggtagcaaaatcccctcaaatttatttttctttacaaatttaaagttttagttaaatattaccgttaaatactaattggattactactgtatcgacttcaaagttttactgttacatatacacaggtgtatacagtggtcatccacttaatatttaacggtaatatttaactgacgtgtcaaaattgtaaagaaaaataaacataaggaaattttgccaccaaaaaaaagataagggggttaagtgtataaaaattaaaacataagggagttttgctacaaaaaaaaa

SEQ ID NO: 326366 - DNA, 1133 bp, Cannabis indica
agattagagatcagaactctcaactcagacctctctttttagaatagaggaacccctatatatagttgctggtaggtcccctttaagttagtattatagccaactgttataaattgcaacagttttctttagattcatttgataggcaaatagatggacatactgacttgagaggttaagtgaatttaatcccaacaacagtactaatacctcttaacaattttccaatcttatcttaaagcccatttttgcaagagatagacagttagcctctaaccaaatgataaatacaaactccaagaatgaagaaaataacatctgaaattacatcactaagaggagattaatccttattatgatgatcattaattagacaagcaacaactttataatttatttcaatgataaaaacattaaaaataggttataaaaaatgcaccacaccaaatgaagagccaataacaaagctctagccactaaaactatcccttttatatatttatataattaaagaccaatttaagtcatcttcttgaactccccactaaaatttacccatctttacaaaattataagattaaataattggatattttttatttgaataagcaagggagaaaaacatggtcacacaccacaaattattttccctcttatactaagtgaacaccacacaaaatttctgaaaaataaataaataatagagaatatttacaccacacaatcacactacctaaaaacctaatttatgttcatagagacacatgttaagtctgaaataactcaattatgttttgatatcccaaaaacaatgaagtatatactgtcattggaatagtgttgaaagtaccatttataattgcatttgttatgagttgtgacaaacaagggtccctaaactttctcttaattaattgtatgccccctccaattctagaagtgacagctaagttagataccaaaatgaactcatggctgagtatcctcatcaaattcacctttcactcttcttcaagaaccccaaaatgtaaaaaaactaaaacaataaaaaaactgttaaaatatacccatgtggagtaaagttaaagaagtctctgcaaaaaaattaatacttttcattaacttctatcacc

SEQ ID NO: 326367 - DNA, 593 bp, Cannabis indica
gttattttcgtgttaattttttggaaaaaccgtaaaaaggtaaaaaaaaatattctttgaacgtaaaaatataaatattttacaaaaaatgataccttatgtaattaatccaaagaaaaaaaaattcaaagtagccagttacctttagactaaccagatttctttaaggtaaccagttggttcatactattttttttctataaaatatttttttaaaaaaaatcatacttttacacaaattgtttgtagttttcactaaaaggaaattaaagttagttgccctaaaaaataataaataaatttagttttaaggatataaggtttaatttaaaaaaaaaaaaggatataaggaaaaattttgaaaataaataaactaggtgacttgtgcctctttacttaatagagaagttgggtaacctacgtcgttctaaaaaataaataaaattatatttattacgatattctataacataaaaagaaaagagtatatgttttttttcctactttctattatggtatatgatatgcataatacggaatctgttataaaataatataaagtagatgagaagaaagaagaagaagataaagag

SEQ ID NO: 326368 - DNA, 972 bp, Cannabis indica
  modified_base (43)..(43): a, c, t, g, unknown or other
gagaaatctaacggatttggacctacggcaaaaaccattaacnggttacatccctttacatttcaaatctttgaagcatttgaaagattggatctaagttttaatcagctcactggtccaatttttcccatctttgagtggtttagcaagcatttctcgtcttgacttaagttcaaatcgaattaatggttccatagatgcagatattatcaaactcccagaattgaattatttggacctatcatataacaatatatcgggaatcataccttctcaacttgactatatgaataatataaccaatttcaatgtttcacacaattatttacaaggtcaaataagtagtgtgcttcttgatagattctcagccaaatcatttattggaaatagggaattatgtagtgttcgaacaaagaagaatggagatagctacattttcttcccttcttgctctaactctagccggagtaagagcttcatcaccacaattaagattattcttcccatttcagttttttttgccatttttgggatttgggtaatctataaaatttgggtaaggagaagaaaagtccagcctcccagtgatcaaacagtaatgaagaacggagacatattttcaatatggaattacgatggaaagattgcatttgaagatatcataaaagcaactgaagattttgacattaaatattgtatcggaactggtggttacggtagtgtttacaaagcacaactacctaatggcaaagtaattgccttgaaaaagcttcacagtttcgagtctgaaaagtcaactctaagccagagctttaccaatgaggtacaaacgttgacagaaatacgtcataaaaatattattcgactccatggattttgtttgcataggagaagcatgtttttgatttatgagtacatggaaagagggagcttgttctgtgtgttgagtaatgatacagaggctgtggattt

SEQ ID NO: 326369 - DNA, 816 bp, Cannabis indica
aaaaaatattaattaattaataatataattttttattaattaatgatgaattttaatttttttttaatataatcataattattaattaccacatccatgaaaccctgaaccagtcgaggaagatcgacgaagacaacgccgacctctctagaagcctcgacggatctcttaggaccattattcataccggatttttcaacggcgaattccttccaagtactcgtcgtaattaagtattttcgcgaccagtttccacactcctaatccaaagcggttctccagccgtggccatttttacgagctcctccatggattgattcacaatctccatcattctcgatttctccagtccgaaaattccagtataaaactcctaacgaacttctcgtctcttgctcatttcccgccgagcacgacggcgatgaagtccccattgggtactttcttatcgtcgctctcagcttctccacctaataaactcaccattattattacataacaaaactcaatacatacaattactcttatatataatcgattatatatatatatatatacctcggctttaagtttggcattttcaatacgaagctgttgttcatcggttgaattggatgggtctctggcaacagtggccgatccacaattaggacaacaagatttgttgatttgctcacgaagtgacttgttctcatctcttagtttgtctatttcagatttcagcaatgaattttcatgccgttcttgtatagccttatataaatcacccaaaattaataaataaataaataaataccaataatatgatatgatata

SEQ ID NO: 326370 - DNA, 1048 bp, Cannabis indica
agcatttcagcagtaacaacagaaccaacgtcaagaggagtcatcgcatagtttgtaatcgaaatgccacggttgactgatgaggacacgacgtcgatcaccaaagcaaccaaactcaacaatgtagaaattggggtctttttcaaggacattgatcgagaaacgctcaggccacatttgcgtgagccgcttcttgaaagcttcagagttgaaatggcggttggtcaacagcttaacagcaaggaaagctgagggttcagcgcattcatcatcagcagtgtgatcaggagttgcagagaaggagtggattttggtttctaaatcagtaaggtggagggtagcattcagagtattggacaagtcatccatgttgcagcaacaacaggaaggacgaaagctataaaaggaaagagatatttctatgtaggtaatactgataaggaaattttgcaggaaaatatttggtacagtgaatagcagaggatattcagttttatagtgatcagggtataaaattagtatcactagaggcagcataacatccagagaaaacctctccatgtcaggtaaacgaatgattgtttctgcaatgttgacagtggctcctataggatttctagcgttctctatgaagatagaggtaatcataagccaaggtggttcagggggatgggatctaattaatatacaagctaaaaggagaatttctatacagaagagattaaaaagatgaagagatcgatacaatggacatttaatcgtagatgggacacaaacccaggagttattgcaaattagaagttaacctgtgaggaagaagacaaaggacttgaatggtagagtccgtctgctaacagccacaagcttcagtgacagggaggctttgctcgagatggaaccgtcacacaatggatgaacccacggacggacttgaatgccgattgacggcgacgacgacggcaacactgacaggaaaagaggcatctcgaacccttagggcatgctactctcagcggactgtccagtaagcttcttattatatcctttg

SEQ ID NO: 326371 - DNA, 537 bp, Cannabis indica
gaatttttaacgaccaaaaagttcatgaagaatgatttggtacatgtcaaaattcggggagaaaaattactaattggtcttttatttgattgaatatatttggcatagttttaagacaagaaaagaaatagtatttttatcgtgacctatgacacatataatgttttgccctataaatttattattttttttggaaaattttcagaggagctatgaaaataattataacttttatccttcacttgtattttattaattttttgcaaacaatattctagtgtaatactaatccatggctaatttactgcaattaaaaagttcatgcatttttttatattgataatattttaatgataaaacctggaactgtctgtattttagaataataatgttagaatatttaagaccataagacttggtctaattaatttagtacattaatagttcgtttggaatgccgtattaggtcgtattatattgtattggattatatatcatatttttatataatactatgttaaactttaatttatacta

SEQ ID NO: 326372 - DNA, 873 bp, Cannabis indica
tctaattggtaacttttgtaaaacagagggtccaaaatggtatttaccaaaaaaaaaataatagtaataaaaaaagatagattagggttaaagtgatttttttgttttgtttttaagtttttgtcacatgtatacatcatgctaacatattttagatgatataattttatggattatttttcaaatatttgatgttattggtattgacaaataatggttgcaataatctccaacaataagaaagcttgaagcctcgaaataatcaacaatatttcaagtgataaagatatttatatatactataatatagtgtaattagacattggggcactagaacaataattcatgtgttgagatcatcaatcattacaaaacattggagttgttcatccacaaactcaactaattatgaaatgtcctatttccgtttatgattctgagctatatttattataatactagtgggagatacacgtgatgtgtgatgtgatttcatatgaaggttgattatttccaatgtatgagaagtttttccaatggaccttagaatttggagggtgaagtttttcattgatgtttttggcaaggaagtgttgtctttgatgtttgttagtttaatgcttcatgagttgttatgtgcattgcaagttcagcttgaatcaaagcaaaagcaaaagggagtcatgttattgtaattgtttgtcaatctcatcgtttgtataattttttgacaaaaaatagtgggagatacacgtgctccgccgcacgtgtatcaaattaaatgtaaatttatatataaattttaataattttaaaaatttataaatctggtttttttttataataaataaaagacacttgtataagtaaatg

SEQ ID NO: 326373 - DNA, 1235 bp, Cannabis indica
tttgtcatataagataattttaatataatattttgaattaaaaggataaagttatcttttaatttaacgtatggctaatattaaaagatctgatgttataattaaataatatataaatattaaataggttaacaaacttttaaaatctgaccaaaaataaaagaaaaataaaataatcaatttttaaatttaaacttcgaaatatcaaaaattaataatgatctatttaaaaattaaatattattaatttaaaattgatatttaagttttaatatattaaaaataatatttaatttgaatttttagggtttgaaatagggaaaattcgaaaaaattaaaaaaatcccacaaaaattgggttaggggtgttgttactcaggagggctgcacgtagcccatgtgcgcgcgcgggagggggctttagcagggtatcacgccgagaaaatttggcacctgcagcctgggacacgggcgcttgcagggtcacgtgggcggcatcagcgacttcagacaagctttgtcctaggcacgtgcgcgcgcacgagcacctcgtcttagtgactggtgcatgcgacgggcatccctcgacacaatttcaacctgaaatttcaaacaactataactttctcaatttttatcggaattgagtttcgtaaaaattaaaattgcttaattttccacaaggaatccaaataaattatcgttagaatgaaaataaaattattttaatggaaaaatttcttaattcacatacattcatcaaataacatataaatcaacatgaacacatccaaatcaacacacaaacaatattcatcattttatacattcatcaagtaacatataaactaacatgaacacatcaaaatcaacacaaacaatattcatcattttaaatccatattacatgaaagaaaatcattaccatggctctgaggccagttgttaaaaatattttaccaggatctagattcactaacaagtatgctgataaacatcctaaatatgaattctctaaaataatgaaaataaacacataagggttcaagaaaaccttacattgattccagcgaaataatacgactcctttcgttcaagatctctagcccttgattcctttctgtagcagagcattatcaaaatctgaacatggatctctttctctccttcaggtttggttaccaccgtcttactcactatgattgagtacttgacttgctatgtgtgggtacgac

SEQ ID NO: 326374 - DNA, 780 bp, Cannabis indica
attcttctctttattggtttgtcaatattaacccgaactcggaccctgagaaaatctctccaaacacccacaaaattattaggatccgactctatgaacataccaatgaaattcccgagggccgttacaacactaagtgtcatgttacccgattgtagatcatggagttgaacccacatatctatatgattaatctccaccaaccgtgggttatcaccctccttcaatctagtaaatatgagaggtttgcgatcatatgtccaaggactcctgtctataactctttgtatgtcgatctcatgataaaattgaaagaggaataaattcgagttgagttctttcacatacattcccatccccggctgccaaagaaacgccatcatattctgaaaaacgttaaagtctgagacccgccccgtcaatagttttcccaccaagcaccaccttgtgtcgatcacaatctcttcggtcctactcaccggaagccttagcacttcttcctcttcctcttcctcatccagcctaacaactccttctatagcctccatatccctctcgaaactgctattcgatgccataggaatactcacaaaaataaaacaacaactctcaagatagagagacaacaaaacgtatcaacagatacgactattaaatataccattgtgtactgaatattggtctttcttttttaaataaataattattaatactatattataatagaattattttagagtaaatataatgttaatacatttattacaatttgaataaaat

SEQ ID NO: 326375 - DNA, 1667 bp, Cannabis indica
tacattaagctttccctcttcaaatatttgctatctcgccactaccagagcttagatcgctaggtttcaagttgaaaattaaagaaaatgggtagaaaagaaaaaaaattattaaaggaagaggagaatttgttcgttcttttgttaaactgtttactgatataacttataatatatatatatatatataaaaatttatcgtacggtatgataagttttaaaaaaaataatatattaataacaacaatattaatattaataatattaatattaataaaaaatttattattaatagttatcttattatttcttagccactaagaaatctctacttctagagtatttagcgaatttcgagtaccctaaaataatttcggtatttctaaaatcaacttatctcaataatccaatcaatatttttaattaaaattgttgtgacatttttggcctccaatcgggtctctaggatcgccgaacctaaaaatattttttatttcagatttaactcatattatattcacgtatttcaaataaatctctgtaatttacagattatgaatatttatccacttatcagatctttaggctcgccggacctgaaaatatttttatattatatatagctcatattacattcacaaattctatataaatctccgtaattcataaattacgcttatttactcagttatagtaaaaatttaaattttatgctgaaatagattagtaggatcataatctcacttattacctgatcaaaacgtaatataaatataaaccctaattatttaccattagacttattgggatactacaatgtacttctttgtagctacttgaaacttgggaagatttgaatctcggagagttgaagttatgagttggtaatggctatgtatgtacttacgtattgatgatgcatgttattatgctgtatcaaatttactagttaatttaattctaatacttccaattagttcagtataaaagtatatacgagtcgatcccatgaggactatgtttactctattacgcaaaattaaacaataataaaaaggggattgattttaattttgctagaataaaatgaacaaataaaattaagaaaataaataaaatacaacactacgatattcaagaaatagttaaagggtaatctccaccctcagccatcatctttaattactaataatgaatgttattttaattttacaatcaaattattaatctcgaagacaatgctgaagcaaaaaattatctcaatttccctattgcaattaatcagggcgaaacactcaataattaactcttttaacttagataaagctttgaattcaatggagatagattaatccaggcaataaattaatgaagcatataatttatttaacctaggttttattcttcatcacaattaaaaaaacttttgacaatataaaaaattagaatttatcacaaacacttagaaccctagactattagttgaatagtaatcctaagatgataatagattaaagcaaaacgtaatttagtgatcatctaaataaaatttaaacaataatcatggcattgaaaaaagaataattgaagcaattcaatatattggaaagtaagaaaataacattcatcatagaaattaagaatccatgtcttgggttttgaaataa

SEQ ID NO: 326376 - DNA, 1150 bp, Cannabis indica
aaaaaatttaaaaatttatatactttaaatattacaacttacctatattataaaaataaaaaaataataataaacaactcacttaaatcaaatgtataaagaatctatcaactacgtactatataggatttcaattaatacttacgtaatagattccctaggagaaacttttcatttccaaattaaattattattttaaattgttcaattctatttttatttttaattatttcttttttttttttttttttggaaagaaatgaaaattttcattaaaggcaaccacacatttgtaattgaaaataaaatttgagaggttccatatattaattaaaatagtattattaattggacactattcctagaattattaaaatagtttttttttcttacactcaacaaatattatatttatattattattgattattaaggttcaagttagagacataagcttataaagaagggaaaaacttaaatatatatactatatacatattaatgtatatattttgtgttaaaattaataatataactccatgtaataaggataggatttccatcatgtgctaattgctttacacaatttaaattaagttaaaacaaataattaattaagaatcttcttagttaggtgttctaataataataagctatatatgtatatatattttttgaaaactagttaggattaattaagcccactatttaattaattaatgtgatgatgataaagatgatgatctcgtcgtttactttaatttgtaggtcaaaagtaccaacacataccaataaatcaatctttattaattattatatatatatatctatgcaggttaattacgttacatataagctagactagaataattaatctacactatgaaattcagatacttcccaattattatataaaaaaaataacttattaaacattgattattttttttttattaaagggtaaatagtgacataagtacttaaagttttatgtttgtaagagcatctccaaggagtctcatcaaatttagtgtcacactatcaccaaatttgatgttaaaaactaatcttcactccaaccacaacaccaaaaattaacactaaaaaaataattccttaatattatataattttttaattaaaaaaaaaa

SEQ ID NO: 326377 - DNA, 1066 bp, Cannabis indica
tgtcagggtattttgggtacaatacgtataaaaagaaagaagtatgtttcaaataaatataaaattaaaggtaaatttatttttcaacttacccctttattaaacaccattcgcgccgcatatatataaaaaaaaaagaagtccaaccaatattacgaatttattatgacatgccataattttgattctttaggcaaccgttttaaatcaaataaaagtattaatattaattggagattggattggtcagtagtactattggaatatatgacactgtagttctacagttactgctttgttcttatcttctttgtttggttatggccgatgaatgaagtgtagtaaaaacaaattgaaaatatataaataataatgatgatgatgatgggtgtgttttctgaaaacttaaagattttaacatgttccattttggcttgcctatatataatcatatagctaggttactatatagtacacttacacacactatatgtatatatacgcaaatgacattatatacagtagtagtgtagtgtacaatattgttaaaaatggaaatcatgcaatgcatatatatctagttactttagtgaggcgcttgtttccgggtatttgccttttgggtcacttttaccaagttcatgatgtgatagtgaacagtgcagtggtgatattatatttcttatattatcagtagtggaaaaactataaaacgactcaagatcagtggtcttaattaatgtacaagtaaatgttagtccacacacaatcacgtgaggctagcaacgtatagagagtattgaggtgagtagctcaggggagtcatggtatcgaatccggatatgtaactttacaaatgtaatataaactaaaaaaatgttacacatactcaatttatatatttgtatatgagtaaataagctcttttaaattttgtgttttgtaaaaattatttgttaaattctttgtttttaaaatgataaattggatattttgtttttcaaaataatatactgaaaaaccgtgtttttgcaaatgtcagttgtatataagaaaatataaaaac

SEQ ID NO: 326378 - DNA, 775 bp, Cannabis indica
acattgcaatgaaaaacaagctactttcacctcaaaaataacccccttaaaaaaatcaaagaatccaagttgaataattaccctttgggctagttttccaggtgagtcagtagattgactgtgatgatctgcattacacaacaagatcagaaacatgccccaaaagaaaagaaaaagaagaagaagaagctttgcaaagataaaataacatatttccacctatcgaattaaccctccttgtgaaatgtttgaaggagaacaccatgataaagctctgagtgcgatgaaagaaactcccaaatcggtgagttgggtgaaagaagtggagaccttagattttgaagcctctactaaagaagtttggagtaagtttaaatcaaactaggcttggacacccactacccatcttgattttactgaaactatgaatattgggggatcaaatagtagctaaacttgaatttgatgaaattgaaagagaagtttaactctcaaaaaattctattgtttatattgtgttgggagccaatcctctgtttagagttttcaaaggttttgtttaatgagtatgggttaatctggcggttgagaaaattgctagaatgcactcgggatttactttggttagtttcacggatgaggaatccagggacctcatgttggattttgtgccctaaaaaaaacccatttcaatataatcaaatttactaattaataaagatcagaattcattttatgttgcatggttcacattatttatttcatgattataaat

SEQ ID NO: 326379 - DNA, 1210 bp, Cannabis indica
ataccaagaatgttactgaaggagtgctgagcatgctcaggagtattagctaggagagaaagacataaccgatttgtcttctttaagcaactgtcctgaggcccgatgatagatgtccaatgctctttctattgcaacacaagacctgtcattggcttgacaaaaaagtaaactattatctgcaaataaaagatgtgtagctgatagagcattgcgggcaacagctaagcctttgaggtgttcaatggattcctcatattgtaagagacgtgagagatcttcagagcatatcttttaaagttttgaccatataaaaatattttatagccatgactttaattagctgttgaatatatattatgtaatatcctattaattagcattttcttttcaagaaaactaaacatcaataaaacacagttttttttactacaaaaaaatgttttcttttttcaaaacgcgattttaaaaacacaaaacagaaacaatgctgagaggtcccaaggctttgtttggatcttgcattttaccaagaaaatcgcttatgagaaaaatagtaagaaaaaaatgaataagaaaaatgttctccaaatttaatattaggctaatttgcttggatcttgaattttaccaagattttttttatcagggtaaatagtaagaaaaaaatgaaggattttttttttctataaatttgatattaccacatgttagaaaaattaataatatacctaaaattaattagtctaatactaatgtataataattaagtatgcgtacctaattgatgcatagcaattagtccaatactatcaattaagtcttcctccctagatttttaaatcagaagaaattttaatttatctaattatttaaaattatacaattgtaataagacaatatatatttataaagttaagaagaaaacttaactacataatatatattagaatttttttaataattttttggtatatctgtaataaaaaatttcataaaattcttagtctattaattcaagccaaataccacaaaatgaatcctctcttcaaatccatggtacaaatcctaaagcaaaataagttttagtcataacaaaatctcaattaaaatttccttcattatagtattgtaattatatcagtgtgttaagatttttagctatatatatataggtgcacgtttaatgggtattacctatgaatgggta

SEQ ID NO: 326380 - DNA, 711 bp, Cannabis indica
tgaaatctttcctttaaaaaaaagacagtattataccacattatttttttatttgtttttgatgaaatatcaacttgattaaattaacattctgagtacaaaacatccagaatagcaactggagcattagacacagaaatactacgaccagataaggaccgtgacatcctagaaacaatatgtgctagacggtttgcggatcgtttaacaaaacgaagttttattaaaggcatagaaagcaaaagagaatgacagtcttgaaccagattcccaaagatggagcaaagggatgagtgattgcgaattgcttggatggagattaagctgtcagattctagttcaacatgttgccaactttgtcgtttaatccagcttaaggcctctttgatacccataatctcgacaacctctggtccaaaagtactataaaagcagtgagctttagcttcaatcagagaacctgagtcgtttttggcaatcataccatagccatattggttatcactagcaaagatcgcatcatcaacattaatcttgattgtatttgtttccggtttagtccagagctcagctctatcaccacaactactagagtagatataggatagagaagtgttatcctgagctttacgccaataatcaagagcaatgcgagccgaagttggacattttgcaacagtgagtaccatatctttccaaaccattgagttt

SEQ ID NO: 326381 - DNA, 1048 bp, Cannabis indica
cctacacagtctcagaatcatcccacttgaccttccccaggcgatgtgggattgcacagcttacccggtatttccccttacggatcacgggactactgactgtcacacttaacaaattcctcgtaaaaatatctcaacatcagcacaagaagaagtacttccagatgagacgtacgctccctggaagaaagaccaaggcgtacgcagaaaggaattcccagatagaaaagattccagttggagtcgactatcttgaactaccttccaatagagcacagttagccacccgaaactcctttatgggggaaggttggctttccttggagaaccatctcggatggacaagctagacttttgcaactcctttccgaaagacctctaggtttccactaaattcattcgaatggacaagttagaatccaataaagagcacccttctgagaggcagctagctttccataaccagaattatacttagaaattttatttggaagaaatataccacaactatcattttaattgataaataaatatttattattattttcaaattatttctttttaatatgttatgctttcgagctaatctattcgtgtttacgtgcacattgatcaaagtttcataattactttatcgcacgtaaatcgtttacctataattattcaatatcattataaaaaaagcaattgttgtgaaatatttttgcagaatccattttaaattcgataaatgtattgcttgtgaagtttattcgtgcatatcctatagatctccctgtcattgattattggaaatttgaaacatatattcataagaaatgattagttaattacattgatttcaaaatttgtatattttgggcttgccgtgccgtatgtctttaacatatgcatcggtcggtttaatcgatttgtattacattttgttcaactcaatataaaaatcgggttacaaaattttaagtgcaacccaccaattaagaaaaaagaaaatattaacccgcccaatgaaattggtcggtttgatcgggttaacccgtccaaaccg

SEQ ID NO: 326382 - DNA, 1122 bp, Cannabis indica
ttttacttttttattttttattttatcttaattatttttttaactttttttaaaaaaaaaaaaataaaaaaaattatttaatattctccaaaagattaagtttgttagacagatgtgtggcttaagattgatttttttaaattaaaaagagatttattaatatttaaaagatttgtttaattttttttttggtttaatttattaggtttatttgttaacgtcagatcaaacctaatcgtcaaatttaacagaatattctatatattctgttaaaccaagaaatattaaaccaaaaaataccattaaataaacataaagatataaacttaacaaggagacatcagtaaacatgtaccgaaacccttttactatcaataataatttagttgcatatatattatgtatatgaaatatacatatatatatatatatatcatctattctttttaattgatataattagaggccgataattgaatatatgctgttacgttttctataaagaaaaaattaagggtatcaaatttaatttttactgtttatatacgtcaacaaaatatgttactatatgctaaaatcttaacttttttttttttctggtatttacagtaactatgatcgatgcacacgtacctaagtcggcagatgacatgtcgtaggtaataatataatattaaccaagtgtatgtgtatgattaattaggctaaagttttgtacatgaaatccaacgcacataagtcatccacttgtcaacatgtcatacgacaatgaactcgatatgacatatacatgcaatcagacaatcaaattaacgtatgttcacaaagggtggggatctcttgccttttgcctttgccaaagccaaaaaacacaataatagagaatttgtactaattaagctagagtaatttataagaagaagacacaaaaagagaagatgaattatatatacataattctacagcgtttggctttcaattcccataaaaccacttaaatatatatattatttgtatacaaaataaacccaatatataataataaccatatataacatatcattgagacaaataatttaactcctactacaactactactactactcctctctctctctctc

SEQ ID NO: 326383 - DNA, 1009 bp, Cannabis indica
atatctaattaattagattgtactaatttttggagatgtaagagacatattttttttcgaaaggaatgtaggagacaggtaaaaataatttattatatctctaactggtttgcactaatttaattacgatgtaagtttgctatgttgttgtgtgttttgctatgttgttgtgtgtctttctgtagtattttctctatattaggaacagaagtcacatgtcatttgctcttgttataaataaatgtatagatttgtataatttcttaagaaaaaattattttttatataatatataatagaaataaattatacatttgtggatgctcctttttggagtggcatcttctacctcaaaagcacgaagtttaatctttcattaatgtttatacgaagtcatacatcaatgttgcatgaatataattgaaactgttactttatttcttttttataaagcatcacaataccatatttcatattatactactaaattaaaacacaaatttatatatataaaaagtaaaaaatattagctaacaacgcgcgagacgcggctacctttcctagtattaactattagaatctttttcactcatagtccctccaagttgtaggttggtaaattctaaaaaacccaagcaaaaatctttaggcttgaaataaaaaataataataagatcaagttacattgtacaaatatcctcgagaatagccaacttcccaaatatgcaggtataagttctcccatgctctccaactattaagctcataattccataccatttgatgacatccaaattttattaggacttatagaaaatttggaagaaaaaaaacttaagcgagaagaagaataaaaagttttgttaccatcttcagtgatgagacccaaaaaattgcaccttatatatagatagtatgtacgttcaaacttaaaaaattaaaaattgaaaataaatatagaaaaataaggaaataaatcaatacgggttttttatttttacattttaaa

SEQ ID NO: 326384 - DNA, 632 bp, Cannabis indica
ggtagtaaatctagatactggtaaaacatattccaacaggtagaaccaccgtggggcatttcagggacaattggtccactacagaccttcgatgacgattacatgccaaatatgaaaaataaaaaagtgaaaaagcaaggtcacgtggaggtaaccttaggaaccatttaagtgacaagatgagagggtgtgacctccttgaaactggcactaaaaggttagaagaacagattactgcattgaccaagttggtcaagaaacaaagtggggcattattggatttggaagatgaggtcctgagccctgttttagaaggattgcgaagactccgctctcggaaaacttcaagatgccccacatcatattgtacgaagggagaactgatccacgagctcatttggctaagtacaacaagatgatacaagttgtcgcattagtgatgacgccaaatgtaatatcctaagattaagaaatggattagggaactgtaactaattaaatatgtattattatggaattatattattatataatttattatatgtgaattaatttgataaatggcatgttaagaccccgttggtgagctaaggacatttttcgtaattttgacctgagaagggtaaaactgt

SEQ ID NO: 326385 - DNA, 936 bp, Cannabis indica
accacaataattttgacacctacagtaaagaagaagttaatcaacaactttatggactcgttaacggaaaatgcaagatcacataaaacttcaagttgcataacattttcgttataaattatttttggttttataacattcaatacattgactatcttcacctaatatgcaggtgaaaccaataaacgagagcatgtttgaagtggtacaactaacaaggtcatgggtagtcaatctaaaagaaaagacatgcaattgcaatagattccaactagacaaactaccacatgttcatgctcttgctgtgatgaaagagatgaacttgaatgtttataattactattcacagtattacacaaccaaaacatggcttgaaacatatagcgagttaatatattttgtacacaatcccacaacatgggatgtaccacaaaacattaaagatatcattgttctgccacgaaaccagaaaatgagatccagaagaccaagggaaaagagatttatagctgattgggatacaaaaaatagaataggtgcagcaaatatggacaacaaggtcacaactgaaagacatgccacaaccaagcaattaactagatacaacacatttatttgaattatttaaatttctatgtgaactcttacatcatgaaaagttagtttgatagattgctattactttcttgattgaaatagctttttcaaggttgcagaacagttgctagacagttgagatccttgctaaaaatatattacaattagatttctactaaattggtttttaagagttagatattagtttttttaaagttgtatgcctgagcaagtatactaaaaatgttcttgataagttcataacacatttggtgttaacatgaaaaagaattaacatactagaatgattaatttaaaattgcataacagttgctaatc

SEQ ID NO: 326386 - DNA, 585 bp, Cannabis indica
agactcacaaagtcagcacactttgttccagtgaagtctacttacaacacagagtagtatgctgacttatacatataagagatattgaggttacatagagttccaaagacaatagtctttgatagaggttcagtattcacctccaagttctaggagagtctacataaggcaatggggacgcgattgagattaagtacagtatttcatccccaaacagatagacaatctgaacgcaccatccaaatactcgaggatatgcttcaagcttgtgcactagacttcattggctcgtggagtaagtatttacctctaatagagttatcctacaataatatttatcaagctacaattggaatggcaccatatgagatgttgtatggacaaaaatgcaggtcaccacttcattgggataaagttggacaaagacaatatttaggtccagaagtagtaagagaagcttcagaggcagttgaaaaaaatacgacaaaggatgctcacgacccaaagtagaaagaaaagttatgcagatctgaaaagatgggaggttgagttttccgtaggggacttagtgttcttgaaggtatc

SEQ ID NO: 326387 - DNA, 1343 bp, Cannabis indica
atcttgattttagaaaaaataaggttagtggaattacttgaatggtgcatgaataccactttggaaaatatgtggtttgtaaatggaatagcaatacattatttaccttgtatgacttgcaggaattgtgcttaaattggtattgttaaaattaattgggcaaaagaatatgttaattatttagagaatcaaaccttaaatactttggaaaaaggattatgacattttaaattcctagttgacatcatcaatttacaacaatactcatttgcaccattatataacctttgcatttttaaggctaatttaataagtttagcttattttctgtgtagtttgtctttgttaattttttcttacatattcacataactttattttattttgtttaaaccaatttgtgagtaattagttttataaactaatttccaattttcaatccctgtagagacgatactcgatttatcactttattacttgtcaacaattgcgtgcacttgtgtatatacaattttcacaacaagtttttggcgctgctgccgagatcgaacccgggccacccacgtgacaggcaggaatacttaccactatactacaacgaccaatcatttgacccttgtacttttgtgtttccctctttggggccaatcatggggaacagtctcaagtaaatcatgggtacattcaagtgttgacccctatatttcattgggtgcatgatttaagtcaactgggccctcactttcaagtcttaaacccccttataagccagcccacttccacaatcattggcccaatagttaattccccatccgtattcaccatcactttcaccctttttcacaacccagccgattgccaaacacgagaacccagcccccactccgacgcaccatcaccatccaacctcccatcgaccaccatcaagctccgtcccaatcctctttcacctaacccaaagcttcaccgtcaacagctcgtcttcaccatctttgaccatttccatcaccaacctaaaccattcccctcgcctgcaaatttgagttcacccgagcaacactcatcaccaaaccccacggtatgccccatctccgttcaaacaagccactgtcaccctcctcatcactatccacatcaccacgacctaactctagcaccataatcaaccagcagttcatattcctccacgcacagccagccgtcgaaactgttggaaatattttaccaggatctagatttactaacaagtatatttcattgacatcctaatatgaattctaaaacaatgaaataaacacgtataaagtttacgacactttgcattgggtgcagcagaatataat

SEQ ID NO: 326388 - DNA, 1877 bp, Cannabis indica
ttattttttaaaattttttttccttactattatttttatatttaatttttaatactttattttgtattttattttctataattttttctaactcatatatatattttatttttttaaagaaaatttcatataattttttactttaattcttttgccataatatttaaaatattatttattttaatttgataagtatattttttaagagtataaattaaaaaaaagagttgagaaaaattataaactttatataaaataaaaattattagaattggtgcgtttaaaaattattagggtataaataaaatttatcatttataattatgaatatggccgttaggattaactttaaaaagaaattaagggcacatacggataaagacagagaaaaactaagactagagtcgatgagggcccacaactccgcatttagcgctccacgtattacgccgtgcattagccgtaccattttctgtatactcaatacacttgtatgctgccagttcatctacgtcagctctcatgtggagaattggagttaataatatattaagaaaataaaatacgtcaactatgggagacgattaggttgattttatttatgtgttttttttttttttaaagataaatgttaaaatgtacttaatatatttttatttataaatactgttattggtctaattaaatattaggtcttatgtagtttaatgtaattttttttaatgagtatcgttaactaatcataaaacgacatgtttaaaaggtctaagtacaactaatgtccaatatcaatgcttttttttcaatacataatttagtggtaaaattatagaatgaaaaattatagagaaacaaattaggattagattaatatgtgatcagtcgtcgatgataagtacacattaaaaacaaaatattaatatataaatattatttctatagcatgcatactccatacaccaattaaaaaccaatagagctggccatgcagggactttttatttatttatttaatattatagaattcaattatggaatcaggattagtattttgatataaagtcaacctatgaagtcaaaagaagaccacgaacatatttgggataagatgtatatatataattagagagtgtatatgtttacatatataaaagaagattattaggtttgagcatcaagtttttgatccctactatagttataactatgtcattgaaaataaatttaaaataataattagcttccaccttcataaaataaaaaaaattacgtaataaaccgaaaaattataaaaagaaattacaaaaatatattaatacggaaaacaatttcatttttactctttgaatttttttattataaaaatatattttcagtaataataatatttttttttgttattttatagtttatttatgcttgtactatagtcgtcatatttttatttttctggttgtttctgattattttattgttattttatagtggttatgaggtagatttttcgttattttttaagttttttttttaatttttgccgaacaaagtgtatttttataattttaaaactttacaaaagtattttataattccaaattataaataaaacataaaaataaatttttaaaaattctcctcaaataaaacagcgtaaataaattttttaaaaaacagataacatacctattattaggattgttcatccaatccaatctgcactaaatgcggattttatattttgaatttaattcaatttgcacaatatttctcaaatccagtctaatcagtggcggacctagaatttaattggagggtgggcgcaaattttttcaatataaaaatattccaaaaaacaagtaaatataaagaaaaacaca

SEQ ID NO: 326389 - DNA, 1277 bp, Cannabis indica
tttttcttttcacaatatcggagccctgagcgattgggggcccgaggcgcatgcctagctcgcttaccctcagggccggccctgaaaagatgacattatagaggtgataataacacaccttatctttatcaattttgcatgagttttcccaccaaatctttccatttccattaatggttccaccacctgaaattactaaaccttgaactctgtcaaagattagccaatgtcttccatctttcttgtaatctgataaatcattagaagcttctatggttcccaaaatctgaaatttttaccccaaaattagtgattttgtacatatatgaaaatatgttcattgcttttaagtagttaattaactcacctgaactataatgtttttagacttgcaaggacctgaaaatctaattggctttaaaagataggtattgctttcaggcacaaccatggaagctcctcctttagatgaacaagctgccttccaagccttcaaaaaagcctaaaacagaattccaaaccaaaatcacaagatgacccatgttcatacatacatacatatacatatatatagactatatagtactcaaatgtagcttaagaaagcaaaaaactttaatgggcaatcaaaattagcaagctacaatggacaaagacttgttacctcagtgtcatcatttccatcccctttagctccataatcattaacattgatagtcttaagcttatttgaatcagtttcatcaccaactttcttctccatagttaaaatatcaacactttccttgatattaatccctttgaactttgaaccatcatcaaccatgtcaaagtaagaaggataagcttgttgaagaaaatcattactagatgtttcctcaacaagattattatcatgaagttttaccacttcttctaaattgcccatttgaccaaatgatacaaataaagagctgagaaatattagcaacataacaatgaatgaaagcaaattatgcctttgaaaagccatgtatgtatgtatgagtagtgtattgaagattattggatgatgtgaattaatagatatataatgttttagtacttgtgacaatatgtcccaaaagattggattttgaatatatttatagggagagaaagagaagttaaaggagccatttgagaccctcttttctagtttgatatgaactcttcaggtatggtttttagatacagagagattcagacgttttctttttggtaaattatgactttttgcccataccatacaacatcct

SEQ ID NO: 326390 - DNA, 940 bp, Cannabis indica
aattcatatttaggatgttaacaaacgtacttgttagtaaatctagatccttgtaaaatattccaaacaacttgtatcagagccatggtaatgatttagtttcatgtaatatgaatttaaaacgacgaatattgtttgtatgttgatttggatgtgttcatgctggtttatgtgattatttgatgattgaatgtgatttttaaaatttttccatgaaaataattttgttttgaatctgaaaaatatcttatttttatggaattaagcaatttttatggaactcgattccgataaaaattaaaaaagttatgaatttttgattttttgggtacaagaggtgtcgagtgggtgctcgtgtggaccaagcactccgacagggtgaagcaagtgcgtgcggaatttagaaaattcctttttgaatgtgcccaacgctcggacacgagctcctcctggatgctgcaatccgcccgtgtgcatcctgctagcgcccctattctctcgcacgcccaccttgcagattgtacttgcgcgtgcgtagggaggctgcatgcaaccttcctgggcagccaagttactctacacaaagattgcgaatttttgtgatttttttcacaaaattcaaatttttgttttcaaaaacctaacaatcaaaataaaatattatttttaataaatttaaacttaaatatcaattttaaattaataatatttaatttttaataattttatgatattttgaggtttaaatttaaaaattgattatttttttataaattatggtcagattttacaaatttgtcaatttcttcaatatttatatattatttaattataagattagatattttaatattggacatattttaaattatatgatacccttatcttttaatttgaaatattatattaaaattatcttataagatatattaaataatta

SEQ ID NO: 326391 - DNA, 983 bp, Cannabis indica
atatcacttctgattaattagtgatacttcctaaaatttattatattaaactatgtaggacccgatacttagttaaactaatagtgatattaacacacaggaggatgctagacatgctctttaacatttctcataaataaattttaagttataaaatagaagagaatacatatactttatactattaaatatcatgcaggcgtgacaatagtaagatcaagcagtaaagtaagtttattacacatctctctcaactctcaaccaaaaaataatttgtaatactacaaatcctaattttttatattcatttttctaatcctcactttaaaaagtcggctctctttaaaatccatttagataatttaatttagtcacttttaaaaaatttgctaaataattccaagttaatgacaatatctataataattagactttttaatttaatttaatttttaagagagagaaactgaaagaagtgattggattataattaaatgagagagagagaagggatatatgtaattgtaaatgacaagggagaaatgacaccaaccaaggcacactgtccgtagaagcttaggtgggaatgaccaaacgaaacaaataaccccaaatctcatccagaaacaaacacccatctctctctttgtaccctccatcactctggaccgtctggtagagctacactctttctctctctctctctgctctggatgagagaggaggagtcgtgttttgattgaggtgtgtttgggttgagcattctttctcgattcttcgaaatttttgttcttgtgtgaagctgtagccgtgaaaatgaggagaatggtactgagcttcaccacttctgttgaagctctcaattggtgggatgagatcaatgaatcggttcagtggcaagacggcatcttctactttctctgcgctgcttatgcgctagtttccaccgttgctctggtcactctctctctctctctctagta

SEQ ID NO: 326392 - DNA, 1147 bp, Cannabis indica
ttttttccgtcatcagaaataatgaatattcaaggaaacttgtggagaaaaccacaaaactcgaagcccctcaaaacagggcccagtgcccaagttgacaatcaacctagtgcgctggtttcgatcactcaaatgtcaaatctgattcgaccaaagaatttggaatagttaaaaatggggtaggatacctcgtcctcaagtttaagaacattggaagtatcaaaatgagatctcgggagctcgagaatgagaatctaatgcccaggttgacaaatggcctggtgcgcaggattctgattctatttcgaccatccgtctagttttttactataactaatacccatgaaattagagaggtctaatttacaacttcgcatttctcatttcgaacatggtaaactcactcagaaatgaaaagtttcgagtctctcatttttgtagaacatcaacctcttcgagaactggtgaccagcttcgccagagcacataaaaaaactaagtgatgttaaaatatcacttaggcatcttaaagtacatcacttggacatcttttcacttacccaacatccagattgacatatgtcaacctggacgttgggatgtcagcctagacgttgggtcatgaactgccctctataagatagtcataactcactcaatattgatctgattgatgcgactcaacttgcatttcaaagctaattcaatgctctataaagtcatatcttacacgatattctaagtcaaatataatggcagagagagattgcatgcattggactgctatggcaaaattggggttctttgcatttgagactcaattaattaaggtagcatatgtaaggatatattgggtaataattttataaaaataggtaaatttgaattaattttaatacctagctatttgtagttaattgataacttatccccttgattaatagaatggacccttgacaaatttataatttaaaacaaattttttacaacaatttatcaaattattgtattcaattaacaatacaaatttgtgcattcttaatgggtattacccatgaatgagtaaaattgaaaaatttaaattttaatgtcttaattttttatctattaaaaaatctctcaaatttatatcatatgggctgagatt

SEQ ID NO: 326393 - DNA, 1278 bp, Cannabis indica
gtgactaactctaataaaccctcttcacatttgggcctgaaaagtgtgggtataacgaacgacctttaagaaaccacatggtcaaacgtgacatttaaaagaatctcataaggccaaatatcgtaaatttgtgggtgtacacatcgggaaatttgtggattttgaaataggtcaaagatcccaacactgaaaatagacacatattggccgaaaggtcctaaatgaaagttaaaggggagacagcggaaatttttatgtttggctcgtcttttttggatggggatcacaaatggctttttatgactcacctttttggaccggcggtactttaagctcataacaaatcacaagaggctttaatatcatattagaatttgggataaggtgaatgatgttctatctcaaaactaattgataacgagaggagtagctcattcatcttatatatgacaatttattaacacacattggtaatgtaagactaactctaataggttacaccacccacaaaaaccgtcacacataagccccttttatttgttttaattccgttcttttttactaatttaggccaaacaagagaaaatattaaatctgaacagttaatttttgttgttattgtataaggaatttcaagagaagcaccaaatgatttgacatttgaattgagataatcttcttgaactctcattgtagtagtagcagacctagaattaaagttgaggggatgggtttatgaggttgcttaagttttccaagctcggtgtgaagctctgaaccacacaattgaaaatgatacgatcgtatataaatatgtatgttaaaaattaaatgcagattattaaatgtaaaaagtgtgtataaattttgtatctctataactcataataactattatgttgatgtcgtggttttgggagagccaaatcttctgttccaattttttcatgtctctctatcccaatccaattaaaatgttccacttcaattaaattgtatatttcctaacagagtgaatatatttttctttccaaaataaagagagttaatatatttaaggactattttattttattgttaataataatttattgtcatgtcactattttaaaaaaaataataaagacacttgaataaattagattttaccctaatatattattaatattaacgtaaattgtaatactaatacatttaaaaaataatatattattaatattaatatttaaaaaatattaaagataacacagtttaatttatttaagaaaaaaaagaaga

SEQ ID NO: 326394 - DNA, 789 bp, Cannabis indica
tacgaattttttgattttatttatagaatatatagtttttttttttttttaatgttgtatattcatattaatttgtttgttgatttttttgttatttgtatgttattgttttgatgatatttagatgttattttcatgttactttattatgtaattttcttattgtttttgtgtgttgtttttacgaaaaaccgtaaaaatgtaaaaaaatttattaaacgtaaataaaatgtaattttttttttaaaaaaaatggtgacttatataattatccctaaaaaaattgttcctttttaaaagtatacattatctgttaccaattttaaaaataccatatttttttttttctaaataagtgtctaaatatatataatttttttattgcctattaaattttagggctgagatacactattcatttttattgatattattatcattatattacttttgataatgtttaaatttttaggaaatttatagcataaatatttaaattagtgagtttgtgttgttaataaatactcattgtaaaaattgcgggaaaaatactcattaaaggtcaatttttaagatttggttaatacatattcattccatctcttttcatcaaacacttcaaaaaaatgatctatttttgtctttaaatttaggatgttttgtaaacatatactataacgtcctcgcttcaagtctctattgggtctttacatctacggaataataactcttatacacgagtacgtcactctggctgcttcctggactgatgactgaccctacagacca

SEQ ID NO: 326395 - DNA, 695 bp, Cannabis indica
tgatgggctaccaaaaacaatatgcaccttattgatataggtagtgtcaatcaatccatttaagctttcttcaactttgtaatcccatacctacacaatctcaaaatcatcccacttgacattcccaagcaatgtgagattgcacaacttactcagtatttctccttatatatattaaaataggatatataaatattgtactattaactaaaataataagaccaaattctcaatgatcagtcttgattgaagttgtcattaataaaattcaattgatgattacactcctaatgtaaataaggttgtaccttacatattatattaaatgagattgttagaaaaacatgtataaaatcttatttttcaaatgggtactttgttaaaattagagtaatttgcggcataaatacctaagtttatcttccagttgcaatttaatacctaagttaaaattttggcggcataaataccttccgttacactttgagacattctgtaggtaccttgctgttatcttgcacactggacaccagatggcatgacacgtcatttaaaataatgccacgtcatttaaaataatgccacgtcatttaaaataatgtcacttcatcttattaaatagccacctaatattaaccattaaagtaaaaattaaatttgctttacaaaaaatatttacataaaaattaatttaa

SEQ ID NO: 326396 - DNA, 900 bp, Cannabis indica
gaaaggctggcaacaagtacttgtggagacggactgtatgggagtagttcaggcaattagaagtttgctagacatggtgtctctgtttggttgtgttattaatgattgtaacaacttctttctgagttaagaaatgtctctgttttctttgttaaacgatcagcgaataaggttgctcatgcttttgcaaaagcttccctattttattctgattgtacatttcacctggaggatgttccggtggatttgctacctagtttggtagcggaatttgatggttaataagattaacttttccattacaaaaaaaatggaagaaaagggagtaagggattgattccctcaacaaaagtggataatttacctatttaaacactaaagaggattgattcttatgaattttattctaaagttatcatgtaacttactcccaagttagaagtactaataatagaattaaatttgttgtgtaaatatgttggaaaaatattttgagccagcatcatttatttgtgataattgtttttaataaatattaatttagttacagaaagtaatatatttttatttatatattaaaaatgtttatttcaagaattatatatgagtataatatagttttattttattatggtaaattaaataataatattcaaattattaagtcatcataacctattttacaggcagacaatgaagtggagcagtggactcactacgaaaaagaaatgtcacttttagtgacaaccttttttagttacaataaattttttttgtgactaaatgtgacttttagtcacaacaaaaaagttatttatactaaacatagtatttaaatacaaattgtcattaatttagttttagtcacaatactttttgtgactaaaaatacatttagtc

SEQ ID NO: 326397 - DNA, 961 bp, Cannabis indica
acacacacacacacacataggcttatactctccatcactgagctttgctaactccattctaatattgtgatcttaagagagcaaccttagattccacaacactagtgatctgagcggtattatctctggtatcaatacaaccaaaatgggagtaggtcattacccactaacttaggggaccaaacctctataaaatctagtgtcttatttacttttctattcttattgtgcaacatgtggcaggcatcagtaataaatatgactgcactgtcagttggccaaatttgaggtcaacagtttgctgctttcaatgagagcgagttgttaatttatctaatgaaacgtcatggttaacacgaggagagctctggctatgacatcgtcctccttgggtcttcctcaagatcatatggcggctaattctaatgttcgtgttccaataataattggaatctccatgaacccaacggatgtggtcacctccacaatctcagtaggcaccataaacctagccaccacaactggctacgtcgacacaaccaatttcgtttgtctcaataaccaacctttgccaccaaaggaagaccctccactggcaccttatactaagagaatggcccacgtggagcaaccccatggcaccacaactgaatatggtcctttgtattacgcgggagagacaggactaggaattggtgagccaaccattggcgagccccatgtagacttgggagaagatctcaagttggcgagacttagagaggtcatatgtcaagtcagccaagctgaagaattgcacgttgtttgctgcgatgtattcgcacaatagagatacaaatttctgagatggatggtgttggaaattattttaccaggatctagatttactaacaagtatgttggattaataacctaatatgaattctaaaacaatgaaaataaacacatataaagttagaaa

SEQ ID NO: 326398 - DNA, 768 bp, Cannabis indica
aaatattaagtaaattgccacgtgacaatccctaattggttcaagtcatgaatttttaatttttttaaaaaataatttatatgtaccaataaaaaaatggcacgtggataatgatttgacatttaatgttcaggtacctacagagttctagaaatataattcaggtattattaccgccaaaaattaatcttaggtatttaattgcaactaggagttaaacttatgtacttatgctgcaaattactttatttttttatcactcaaaaaactattctaggtcgagttctggaatggtctgaagttaaacccatggacatcgtcttagtgtttgatagattaaggtgagtaatttagtatattttaaaattttcaaaaattttgtcagatgtcataaataactataacatacacgtctataaaaaaatttactaaaaaattctcgtgaataccgaaataggggtgtatccatacacattttttatgagaaattttttcaaaaataccattttttttatattttatttacaattttatgacttaaaatatttatttacaaaaatgcacttttaaagtttttaaattacaaaaatacatttttctcaacaaaaagtaagaaaccaactaaaaaataactagaaattaacctcacgacaactataaattaaccacaaataaaatgtgaaacaactaaaaaaataactttatgccaactataatataactataaaacaaccaaaaaataatttatattttactgaagagatattt

SEQ ID NO: 326399 - DNA, 1515 bp, Cannabis indica
aaagttcggggagaaaaattactaattagccaaaataaaaattccctagagaataaacaagaaaattcagctaagctcaataatttgggtcacatttaaatgggctttggaccagcccatttctggttgtatgattgcatagtcctacaacattacactatattggaattcctttaaaaaaaaaaaggaatttcaaaaatactgaaatttttaaaaaaattctcaaaaataggttatactacaaaaatacaaattatatttacaaaaatatggattacaagtttgtaatcaagcttttacaaatttgtaaatttatttatagaaactttttacatgtttgtaaacactttaagttttttttttttacaaaaacaggtattgtatgtttgtaattaattatatttgcggtaaatacggatttttattatttttattctaaaagatggtgcaaactgcaaagtgtaatttttccaaaaaaggaatctcgaatgatcccctcagtacttctctttcagagggtaatattaatttattaatataaataaaaaaagatatattatctttataatttattattggaaaattttaaaagtacaagaaaaatttaaaagatatatgaagaaaatttggaaaatatgataaatgaccccaaattatattataaataaatgtctttattttaaaatttgtaaagaaatgaccattttacactatttattatttatattattttttttaccccaaaagaattcttattgttccaaatcttcaaaagtatatacagaaaaaggttaaaattatcaggaaagtgggatttaatacatagcagtatatcaatgatgtttttttcctctcaaatcactaacagtctatttaaaaattgtacttgaccacactctcttaacacccttacagtcaaatagagcatgctggataaactcaagatgcaggtcacaacgagggcaagttggggaagggtaactatttttgtgatataggttaacaatagtgggaagggtgtcagaacaaagaagatagataaaatgcttaactttgggaggaatgttctgcacctagaaggacttccaccaagacttgaggaggtcagtgtttgaggcagaaggcttggaaacattagctatggatatggctagatggtaccttgttttgacagtatagtgggaggtggtatgctgccagaaaagagtatctaagtgattagtgtcaagagggggaagagacaggatagcatgaacaatatcattaggaaagtggttgtttaaaagggtaatgttctagccaccatcagggaggaggaggttagagacatggataaggtgattaggcaaggatatagggagaaagtggcagtttgggatccaattgtcatcgagcattcgggtggtggctgttgggctttgtgccctaaataaaactctatttcaatgtaatcttttctattcaattatcaataaagaaacagatttaatttcattacttgtttaatgtgttatt

SEQ ID NO: 326400 - DNA, 798 bp, Cannabis indica
atatatatatatatatatatatatatattgattgattgggtaaatgtaggacttttaggtcgatggctttaaggattttagaagaacaatgattttgaggattttaagagtgccttttagcttgcattgaggtataaatcactttatttatgtatattagcttgtattgtattatttttatatttgtatatttttttagtattggtgatataggggttcgaatttttgggttagtgcacaaaaaactagcgacgatgctcaaaaaaggagcagtggtgactaaaaatattaatccgaaaatattataagatgcaaattaaataatgtgtctaaagttagcaaataatattttgattttagttacaacactgtttagtatagtattaaaattgaatgtttaatattataaggtgcaaattaaattagctaggattgtcgttgcgacgaatggagaatatgtttgttaaaggagtttgaatatcttaaatattcattcatagtgaattaggttatgaaattaaatgtgtacaacttttgaaaaggtggtgaattatgtattgttacatgagacctatgattattttgtattattctggattgtttgtagtaattatttgtaggttcaaattttgtttataataaattataaatactaaatatttacttgatttcactgtttagatcgaagaagcagtacagtacgatggtgaaatgatataaatatcatttttctaacttatgatttataaacaattaagtattcacaaaataacctatttttgaattttgaaaatatta

SEQ ID NO: 326401 - DNA, 876 bp, Cannabis indica
cattatatttactattttttttcttgtgcattaattataaatagtatgctattttatgggtattgcatcaatctatttggagaactgccattaaatttaatttatctatttactttacgcaaacattaataaaatcatatattattaattaacaatttcattatgatcatttgactcaatttttgtaattatatgctctaatatatttcatttagattaattagtttaaaatataagtaacatataattaattttgttattgagagtatatatatatggtgtttttttagtgtagaacacaaactaaaatattataaaaaatgtgcgaaatccttatttatatataatattattcaatataatatatttactaaaaaaaaatattattcatatcattaaaaatgaaatgaaataattactatagaaagatatatttatatataactaatatatagtaaaaattaatttatttatcgaatttttttttactctttactttttattgcatttttaaataaagcattttgtatatggaatttatgttttgattttctttttatgggttttatgaaagtcatatttttgttatctttagcccaattttcatatttttttttttttttaattttttggagctacagctacagtagcttacttttgaggaaattacattgtatacccactttaatttacttgttttaaattttacctcaattttcatatattttagatctacccacttttatgaatgatgttcccattagacccttaggttatgtaaattatatgctagacttaagtagagagtgatggtatattagacaatccactaaaaaaagtaggtatattttaataaaaaaataatatgagagtatt

SEQ ID NO: 326402 - DNA, 500 bp, Cannabis indica
atatatataatatatacacatatatatatatatatatgtcttatctttctttccccagccatggcaataaaaaaaaattcttgtcctaccaatattaataatagtaataataatcatttaagtatttatttaaatatataagtttatatatatagcagtgtcaagtagtatactactgtctcaattaattagcaaatggccagattataattagatactaattataattaataaactcacaattttctttaactttggcggctaaaaatacaaataattgttgcaatttcgaagaaggtgttatatatattaaaaaatatttagaggagaaaaataaaattatcaataaaattaaatatgataatttttttttcacaaagtgaaattaattgaccatattattattcgcatttaagaaaattttgtagtgtaattttttgtatcatctttataattatttaaaatattttataaattttaaaaaatttaatacgttgaaa

SEQ ID NO: 326403 - DNA, 554 bp, Cannabis indica
ttatgattgtttagtggtcatttttttgtctttacttatgtttaatttgtttttctgtaatcccgaaatgtcacaaatgtaatcgttaaatgtcgcaatatatcgatattttccaggaaaaaataatgttccatccatctcgcatttcacatcgctacatatcgcgaattgtcgtgaaatattaccattataaaaatctgaaaaatagttattcttgttcttgccatgtcgacaagatcatcgatatatatcgtgaaaatgtcgttaaacatagatagagacaattattattcttgttgttgccatgtcgataaagtgatcgacatatatcgggaaatgtcgttaaacaaacacatagacaaatttgttactcttgttgttttcatgtcgataaagtcatcgatatatatcaaaagatgtcgttaaacaaacacatagagtgctttgttactcttgctgtgggcatgtcaataaagtcatccatatatatcgaaaaatatcgaaaaatggcgaaaaaaaatacacagacacaaaaaactacaaaatagatttca

SEQ ID NO: 326404 - DNA, 1114 bp, Cannabis indica
aaaaaataaagaaattaacaccaagatatatactggtttaagtccgatagatcgatgtgatctatggctctattccatttctgaaacactagtaaatcttctttattgattgagcaagaacaggtacaatacaatcaagaaggattctctgttgagttctctcaaagtgtttctactctcacactcttacccaagaatcttctttatctatagaagattcttcttacaaaacctaaatacaatctctcttttttctctgtacccctctctctacctctcaatcttttctctctttaactctcaatctcaatctgaaccatctgaagttcatccttttttaaatgcttaagtgcggatggtatttatagacttaggatcaagattctaaagttggtggctgcaagaattgacgtttgttttaagttagttaggaaataactaatttaaccaactctccttagagtgagatctccatgttagcataagtcttagtgcattgaggaacataaatgagcttccggaatcatggaccaaaaacactcgttgaaggagcttccggataggatagagccagctggagtcgactatccagaacttccttcccatgaggaataactagccaactagaactccatccttgagagaggctagctattactgaagacccttcttggaaggacaagggagccttcaggactagcttccgtgagtgagtgactttacaggaatgacactctaacttatgtcttatggaaatctttttatttggagaaattatactacaaaaatctttagtaatacaatttatatatgtcttaaaatatgtgctacataagatgtagtactcaattgcattcacaaacttattacaatgctgttaaatctaaaaggaaaagctccaattataaaagggaaatttgaaaaactatactttaaaaaccctaatattttatgcttaaatcaatacatttcaaaataaaaaatatatgacacttttatcaaaaactcaagaataaccctcacataacaacaccccaactctctctcttcctctatctctcaagcttctctctcaaccaaaccctcaccattctctctgcccacttcgcacgaa

SEQ ID NO: 326405 - DNA, 1119 bp, Cannabis indica
ttccaatgacctttttcattgcagtagaaacactttcctttaagtgtagcatcaccagaaggagcagcctttttattcttcatggcttttgttcgcttcttggtgttcttccacttctgcttcgttttggtaacaggtttagcaacagggctgaaggtctcattgaagtcaaatctagcttgttggtgaaagcccttagccacaagacgagctttgaacttgctaatggatgcatctgggttttctttgatcctgtatacccacttacatcctataggaattctgtttgggggtaatttaacaagaatccaagtgttgttccttttgagtgcagtgaactccatatccatggcatgaagccatttggggtcttttagggcagtagtaatggatgaaggagtgatggaagccattagaacctttggttttcttatgccagacttggaacgagttttcataggatgagcattattgcatgatgttgcaggagcatcagagtgtgtagcagcagagggagcagcaacaacatgttgctgaggagaactattgctgatagaggcaggaacagctggagtagtttgaccagtgtctgaagatgagatatctgcagaaatattagttggtaacataggggcagtagacttgtcaagaggagttacaccagtgaaaatattagatatatcaggttgaggaacttgagcttcagtaatatgggtaggtgatatgtttggtgagggattaaagagagttgtgatgttgggagttgtaatggagtatgtggcagtgggatgagtggaggttttgacaggtagggtagcagttgtcaagggagaagagtgagtgggattaaatgaagtaagaggagtagaagttgagtatggaaatacatgttcatcaaaaaacaaaaccacatgatatgcataaacgaccctcttttgacagacatttatagcctttatgtgcaaggctatatcctatgaaggtgcaaggctgggatctaaattgaatcttagttttattgtatggtctcaagttagggaagcacaaactgttggatatatattaccaggatctagatttactacgaagtatgtttgattagctgttgggttttatgcc

SEQ ID NO: 326406 - DNA, 716 bp, Cannabis indica
taatttaatagttaaattatttttttagttttaataatatttcctcattttttgtttgctaaatagaaagtagaaaaataattattagtatttgataatagttttcttgggacgatactcatgcttatgcactactattacttaaaacgagacgtatacttacgttacaaatttttcatatcaaatatggtagagtacatttgcattcctatttcccttggctatttccatgcatgtatctctgtgctttatcacaaatccattcaagttgcctagcatgagtttttctgttgggcttcttatttgcctataatttataaataagtttcagcttcttcgtatatcagaaaatctttttgttctttatcacggattcttcaatgaaggccctttaaaaatatttctattcttcagggttttgtggcatatcaatatatcaaaatatatatatatatataggaaagcattcaagatttatgtggcatactccccttctttctttctaatttatctattttgtagttattttagattttcatttcatatttgaacttttataatttattaattaataatatcaatccattattacaattaggctaactagtaatttttctccctgaactttgacatgtaccaaatcgtgccccctgaactttttggccgttaaaaattctcccaaactattgagattgttaaatttaaggacttttgtc

SEQ ID NO: 326407 - DNA, 851 bp, Cannabis indica
agctactacgcaatcaaaaacagtttccaattcaaggtatggaagtcgtgctctcaagaatatagtcttgttatatccaaatttcagctagcaataagaagttagcacttgtaccaggataggaatatgaaatagccaaagtcgtgcattattaaatgcacattaaataactcacctcaagaattacagttaatagaaatattcgaactcagtaccatataggcaatagcaagatgtgaataataactattaataggtgagattggctagacaagaagtccatctcgggatatatagaatacacaatgaaagttgttcagaacgagtaaacaaagagcttgtaactcattaatccatatactcgtgagtatgttcaaggaatgacaacaacatcgttcatcttacttttgacgcattgaagtaaccgcctcgctaatgcctttctaacgacaaaagagaaccgcgagatgtattgtatcttaacacttagcatttttcctaaaaatacgagtaaaaaagataacatgcaatcggcgagaacaatctaacacagtcagcataattgtctgtggataaagacaaagaacggttgagcagttatatattatcccatatgcacaaagataaaacgtgaggattgtccacgtttcatgagcgattatgaatgcgtagatctaaggaataactgtcataccgtacatctataaatagggatagaacccaggataaaaagagaccgccaatctagagaaaaaagagatattattgctacttatatcattatattatgtatttaaatattactattcttaataagatagactcgtagactatgaagatttaacttcaaa

SEQ ID NO: 326408 - DNA, 714 bp, Cannabis indica
atatgtgtatattactttattttgtagaaacaattcaatataatgacttgatgattattatatatgttatgatattttttaataagatttttttttgttttgtattgttaaaagtattagtttgatttttaaatttttattataatgtttaataattatgatagtataaaccgctcaaactgtatcgtaccataccatattttcgcagtttagtttttgcggttttaagatctcgcggtgcgattgctgtttgagaaattataaaaactgcatatgcggtttagtttgaaaaaataactacaacacgcaccactcgtaccatgaacacccctacttcttacacacaatgcatgatgtgtaattaatctcaaccgtacaactaaaagtaatatggtcacacttaaaaatataaatagctaatatttattacaaataagtattgtacattttgagtatgtatctaccattactcataaaataatttttgggagaattagtttgcttttaatacatagagaggtatattggtggttgagacttttctaaaaaatatatatatagaggtattttttattttaagcatatgaagaaattaatttttgtttatatagtgatgtatattatagctaaacatttcatattatatgtcttattctgtgaaattttgtattttaatattcacagtttaattatttaattaagtcattaattaaa

SEQ ID NO: 326409 - DNA, 1578 bp, Cannabis indica
gaattggcatttaaaaggttaaattagaaaattggcatttttgagaaaatgggaatgaaaaataactaaatgggaaagttaactgagtgaactagtgcagtatatgtgaaaatcattatgagaacggtttttttttttattatttaaacaagtagcatttagtttctgatattaagaatattaagttttaaaataaaataaataaatgtactacatctggaccctccacgtgtccttatttatgagttaacggaagtggtagtaacgggtgtaagagaatcgtaacattagatatttttgcctctaaaaataaaaataagatatttaagtgtataaaatttgatgcattaagtatttatgtcgcaatttacttatttttcttttttctatatagtagaagtttggtaaaaagaaaaaaattattaaaaggaatacaaaatatatgttaatagttaaaaatccatatagcaagaaaaagacacatgtagaagataatcttgtgcatataattacataaataataatttagatgttggcaattttttatagaagactatctatctatctatatatatatttgtaagtactatatatattttttgaacaagattatatatattttttgaaataaaagattatatatatttttttgaggttttttatttttatattttaaaaaagttttttttttgtatttttaacaattctacatagagacattcatagtatggagcaatgtaaattacaatcaaaatctacataacaacccacatagaaataatcggagtaattcaaaccataaatttgaaaaaaaaaaaaagttaaaagttagtatataaagtaattttcttatatgttttttgtgattttttttgataaatcgtatatcctttcaaattaatatttactcttgtatataataagtaataataatttaattatgttggttcaaatagataagaaaatttaggggtatttggtatgagatttaaacttgatgagaatgagaatgttaaattacaataaattttagtaactaagggatttgtgtttttgagtgaatcttactttttaaattaaaattgtggtaatgttaatctcctccaatacatgagttcatattcacttcaactttactccttccaactttactctctccaactcaaatttatataacaaacatcgccttggtagtatttggttggaagacatgaaaacatagctagctagaataaaaatgacattctaatactttaaaataaaaccaaacaaaagaatgaaataaaaattattttcattccatttgatttcattacatacaaaccaattgccaccttagaacctacctaaaaataaaaaataaatgataaaagaaaaaaacttgctacgagtactaagaaaaaaatacatgttaaataacaaaagatagccacatcactactacaaacaaaggcatttaattctggtttttaaggccttttatcccggttttcgctaaaatgaaaaccgggatatatgccagtgggataaaaagtccttgaaaaaactgggataaaaagggaccttttatcccggttt

SEQ ID NO: 326410 - DNA, 609 bp, Cannabis indica
ataactctttataatttaaaattatacacataatttcataattaaaattttattacatataaccttaatttaaaattattacacttatttatttagtttgtttttatttaaataggttgaatgtattttctaaaaaaaaaggctaaactcctccctcttttactttttggataaggagtcaattattgaaaaaaccaagccatagtcaaaaaaaaaacaaagccaagttccccctgaaaacaaaacaacctccaactcgaaaagaaaaagtcctccctccttgcttccacttgttttgtacaaaattgaaggaccctttcacttgaagacccttcactagtcatctcctatatttatgaattttttagaaaaatccgagagcaatttctaatttaagaaaaataaaaatcaaacatcaaaaatagagaaacctatcttcgtccctctcttctccccattgctttctttgattttcgtcgttgtcttcaatttctcagcaacaatataataccctaaggtttatgaactatattattatataatatgtttattctgtcaatttgtaggtattttctaacaagtccgtatagtatagtcacaaccgggtat

SEQ ID NO: 326411 - DNA, 790 bp, Cannabis indica
tttatttttttaaagattatttgtttgttaaatataaataagctttgattttctctttcacaaaatcttagtttgttttaaattatttattggatttttcagtcatctgattagcttcgtgcccgagtaagtccacgtgcgacccaaaagatctcgcgcggacttgaagggtaaatgttatctaaatttttacacgatgacgtggcattcatctaggtgacacgtggagtacattttatcacatgaatgggaaaatcatactcttagtaagccgtacagtaaggattaatatttaagttcacatacaaaagctgtgacatccgagcagggtacgcataaacatccaactaccaagtggctcacatgtaccgactaggggatgtgatttataaattttagagatacatctcatttattctcaatcttgcaaataataatataattcctaaatttatgggatagattcacatctttaaagaagaaaaggcaatctgccaagttttcttttttgcttattgtaattatagaaattaaattagttttctattttatttcttattgattaagaaaactaatttcatgtaattgagccctataaatagtagattcaccttgttatttagggagaggaaattcatttagagagaacactcaaagagagaaatttcgatccaagagtaaattactcagagattattgtaagagcttttcaagagagatcaagacattcttgttcatcttctcacaagtcaatacaactaaataggagaaggatattaccatcaataaa

SEQ ID NO: 326412 - DNA, 1165 bp, Cannabis indica
cgtaggtttttcgagagcttctccatctgttatcgagagaacttttccaactgtcatgggagttggacacggtttcaagtgagtcatgttggtcttgtggagaagttcagagatgtatttcgattgagttaaatacatccctgtctcatctctataaacttcaatgcctaagaaatagtgcagcagccccaggtcttttaaagcaaaaatctaattcagttttgcagtgaatagtttcaatttttctccattgttacctgtaacaattatgtcgtcgacataaatcagcacaaagattatgacagaatctgctttgtaaaagaagagtgatgaattggccttggaatttttaaattcccacttcagcaaagttgatctcagcctctcaaaccaggccctaggggtctgtttgagtccatacagtgacttcgtgatcttacacacatagtctggtttctcaaggtcctcatagccagtaggttggtacataaagacatcatcttcaaattctccgttcaagaaagcattgttgatgtcaagctgtctgacatcccaagcttttgctacagcaatggtaagaatttttcttacagtcgaggctttaacaacagggctgtaggtttctccatagtcaattccaggtctttggttaaagcctttcgcaactaatctagctttaagtctttcaaccaatccatcagcatttcttttaattttatacacccacttgttccctattatgttcatgaaggctgttttgggaaccatcacccaagttttgtttcttttgagagctatgacttcctcatccatagcccctgaccatccaggatgtttgagagcttcttcaacagactttggttcttcaagcacagtagcacacttagtctttccaaagtaggctttgggtttgaaaattccatcctttgagcgagtgatcataggatgtgtaggaactgctgtagggacttgacttacagcagtaagttcgggtttttccttcacacccatgttgtctccatcctcctcttgctcaatacctggtatattttcaatatccaccatttcatcatcactgttagtaactgtagtaattcttagggctgtacatcggtcggtttgggcggtttatcctatatattttctaacccaatctaaagttcgg

SEQ ID NO: 326413 - DNA, 764 bp, Cannabis indica
tttcaacaattgcatttgcagccccatgatgtagttgtctttttgcttaagtattagccagactgttaattattttttaatgctgcccaatattattattattattattattcaaatattttaatattattattattatttcaattcaaaataaaatatttgatgagaaacacattaaatataaatatatgaatgtgtatgtgacccaaaaataaaattacaattaatagaaattcacaaaagttaatgatcataaatttttttatcattaattaataaatatgactttttttccatattacatggatggtatttcttttacaaacttggcttatcataattttatacagctagaaatttatacaaagaaataagacaattatgttgaaattgattgcttggttatataaaggccaacaaaagcctaattttctctgttaaaaagttgtatatatattataaatatatacttcccccttgctcgaataatatattggaattaatacattgcatttgataactattgcaacaaaaaaaataaaatcttttcttgagtaaataattttttgtattttggtatagttaatttcaataattattctaaattttttactcaaattaaaatttatgtttggcagttgaaatgtttacaactagttaatagatacaattttacccaaatatatttatatatcaaatcagaccaaagtactattttatttaaaaaataagtcatttttcaattattttattatatattggta

SEQ ID NO: 326414 - DNA, 733 bp, Cannabis indica
taagataattagagattaagaagccttaaacatcgatcaaacacacagagaaaatgaaaaaaaaaaacacataatgtagtgatatggactacatgcgtgaaagaaagcaaacgtaaaataaattaaaagcaattaaagcattcaatttaaagatcagagtagagatcttcaggtttccttttttgcttattaatttgtcttttactcgattccccacttctttctaacatcaacaagaaactcatacacttttttaccatcaggaagagctttggcaacactctctctctgaaggcacctattggcccaagcaatgagttttgggaactcagccacgatgctcatatttccaaaagtttcataagctaaaaccagctgtagaatcccactagggaaacatccaggaatccaaaactctctcccccaaagtaatccttctctccaagctctccttccaaaagcttcaacatctcaagcaaatcccttttcccaccctctttctcttctccatttgtggtccatatcttcttaccagccccatatattagggtttataaaacacttaaagaaatatataaatcacagatctaaacatattcctaaagtgctttaatatagaaaaccctaaaccatataaatctataaagcctttgttaaattaaagaagaagatgatgataaaagatcagcggaagcactaacctgaagccattgttggagattgcagagaaggt

SEQ ID NO: 326415 - DNA, 1222 bp, Cannabis indica
gatttgacacggctaggaaaaaatctttcattacagtattgaaataattattatgatatgacatccacttactatgttagagaattatttaataaaatttgacattgtaattgctgttggtaacttattcgaaatagtgaaattcaatgccacatattcggttaacatagtttatttaatgccattagttaatatacgttcacaaccaaattaatttttacaataaaaatggagtgatatctaaatattcggttatgaggtgataccatactgtatttatgatgtgacgtagtctgtacaactattgatgtacttcattttcaaactttaacttattgaaatatgtaagttacagcttgtgatatctaaatattcgcaatgaaaaacacctctaaagaccttccgtttccaataaagggtttaaacaatgcagctaatagtgtttgtggttttataagaaaaaaacccaacaatacgattttatataaatgatcagtacctttttaatttttcgaaagaagtaacactttgataatattctcctatcaattcacatagtgactcaaatcattaagttgttctatctacttccataacctaaaaatagaatcacgttattttcaaagataaccctaaagaacgatttaaaataaattaccagtaccttttttgtttttttgaaataataaatattttattaatattttcccatcaatctatatacggtcaaatcagtaggttgtactatctacttatataaaaaaaatacttgcgtaaaaatatattattactataaagagacctttattatttgttaattaattatgataaaccattttttaaatgatacaagtatattttttgtctacagaagggtgcaaagttacgtgatgcttgatttgaggtatttaattaggatgctttatttgacaaagtaaatatagattgtagtgagatgaatttgtatgcatactataatatcgacactcttattacatgatgctttatttgacctaagactgtaaaaacgctgacgatttcttcccgcgtctcgattttgttccaatgtctggcgcacccgtgattgagtgtgtcaaatatcaaaaccctcatcccgcaatggccttgtggactgcgagaggtagaggctcagttggatgacacatttggcagtgttggaagtagttccatccagcctaatccacccattcgaagcctttgt

SEQ ID NO: 326416 - DNA, 822 bp, Cannabis indica
agattaaaggtatttattttatataaaataaacaccatgaaaataaagtgttttataaaattttggagtacaaataaaatctgcctgtaagtatcttccatggatgtccaaatattatatccaagcctcattaggaaaagtaaatttgatgataaattcgccagtgtttggttggaaaaaaataaaaaaaaaatgtatatctcttatatgttatttggtattagactgcatataaaatacggtttgagattctttatttatagtgtagttacaacttaaatttttgccacattatgtattgctttttaaatttaatatttacagtttaaatcgcactgcattatatattataaatataataatttttacaatataattttttcttcatatctaaacaactcggatatttacaaaatctaaatcatataattaaagttaaaaagaatattcatataaattattctcacttttaatttattcttattaatattaacatattattattaatatataaaatatataatatatattatataatattttagaaataattcaatccaataacttgattaaagcaagttattcagcataattatttacttactaaattatccattattttttaatataaaaatgaacaacgaaaagaagattgtttttttaacaaaataataaataccaaccatgagtaaaattctatgtatacctaattcattaagtatttagtacaagacatattttacagacattattaaacttttgtagagtacttgagaatgttcgagtaccttatatatatttataaataattatatataaaaa

SEQ ID NO: 326417 - DNA, 709 bp, Cannabis indica
tcgtaaattcatgagtgattttaatcactttgtacaaaaaaaaaaaaaaaacttcttacttcatttcatttgtcttcttattcaaattgttgctaaaacaccttcatttttccaaatatggattcctcatatcaattatttttccccaatgaactaatgcaagtgatacatggtaataattgtttcaccaatatggcacgtagaagtacccagaaaagactcgaacctcgctcttcgtgggagcaaaacaaaaccacatgtctgattgtttgagctactcctttcagtctcaaatcaggattgcttttgtctagatattcgggtcgcagcaagctcgaattaaagcattgtgaaaacatcaggcttaagacccttagcctgaagttcttcataaacactcactgtttcatccaccattcccgcgatcccgagattgagtattagtttgttatatgtacaaagatcaggaaaaatttctctactctgcatttcaagtgcctcaatcaatagttcataacaaaccgactcaacatacacattaaatcatcaaagtctaaattaaccttatcattcaatcaaacaatacaccatcatgagacataaccgattgtgtacatttcacattcaaattcttagggaaacttacaaaaatactggaatttgagttaacttttacaaaaatactgtcacacggaaatgttttcaaaaa

SEQ ID NO: 326418 - DNA, 763 bp, Cannabis indica
taaaatataaaataaaatatattgttgaagaatttttacaattacttataaattaaattacaggaattgattatatcaaataactaattaaaaatttaaaatataaaaactaattacgtaaaacaacaaattaaaaactagtatatataaaaatcagttttctgaattaattaaccaaatcaaaatctaaaacttagaaatcacttatataaaacaacaaaacaacaattaaacacaaaaaccaattacttaatacaaataactaaaaaattgaactatagacataaaacacataaaataataaattaaaacacaaagactagtcactttaaaaagaaaataagacataccacaaatgaatttttaacaaatgacttgcaaaaattatatcacagaattcattcacattgaataacaaatgacatgtaaaattaaatcacagaaaccaattacattttataaccaattaaaactctaacacagaaaaaccaattacgtgaagcaaccaaattaaactaacacacgagaatcatttacatgaaataataaaattaaaaattaaaacatataacttagttatgtaaaacaacaaaaccaataattaaacacataaattaattacttaatgcaactgactaaaacataaaaataaaaacataataagatggctaaaataatcaacaaataattgaaactcaaaaatcagttgcttaaaaaaaaaaacataccacataaaaattcttaagaaataacttataaaatt

SEQ ID NO: 326419 - DNA, 878 bp, Cannabis indica
cgcctaaggtagttagggtgttaccctttaacttcaattatttaaaaaaatcgaagatataattataggcaccaagccaaaagcaatgataccagttttaaaatagttttatcttcagattttaatttattatggaaaaaatcaaagataaataatatatttgtagtagtgtataaaaataaaatagtcacaagttatagatatactaaaatatctatatattatgattaattataatcactacctaacaattttcatttataaatatacaaatttatatattaattaatattgcatgcttacttatgcttttgaaggcaatagcagcgcttttgagtataagactaagagaaaatatatatatctacatatatatatatatttatatatatatataaaaataaggtcctcgtgcttaatcaaaacagtctacaatgcaatatgtgtcttttgcctttcggtgtttcatcatctcttcactttttttttgatactattcatttttattcttgtaatgctgcaattaataaggaaaatagttccttaataataacataaaagatcaatgcatgtgtttgataattaacctagaagagcatgcaacatgaggcccaattaaattagtgtaatgataggtttgctcaaattacgtaccatatatatcattttaactattaacttttatgcatttaattagtttccacttttttcgtttatgaagaacatgcctacgcgttattgacaatgtaatacgatacactaataaacatgaacctcacataacaaattctcacatataggattcttttgctaatatatattacacaatattatattatatagtattatatttaattgtattttatataatattttat

SEQ ID NO: 326420 - DNA, 2031 bp, Cannabis indica
cgctatcggttgattactttttgagttcaacacaatttattgatcaaatttacaaaaataagaaaataaattaagattccaaattaaatctgagtactaaaaataatggtcgtagaaagatgtgaaaatctgtactcaaaaaaattacttgtcgtttttccacatatagtgcaaaacaacacgtcacggagatttgaaaatttgctctacaaaaaatgacatgtcatttttccacatgtagtagaaaacaacatgtcgtacaggatcatcccctacctctagccgagtctttttgacccaatttcttacacgtgggtcctgtggacctgatcaaaacccggtctgaaaatgcaattctgacgaccgaaattcgtatttcaattccaaaatgatctgaatgaaaaaattaagagatccatatagaatttaggcaatattgatttcacaaagatagttcaggtccgattgtgttctacaaagaatattctccagatttcaatgttttcaaaaaagtttttcatgcttaaatcgatctttaacattatatgaatgtaatattgcataagagattagaattaaacattgaaaaaaattcaaattttaaataacaatggctgtaaataaaaaaaaaatacatgtatatatattctcgtatacaatgattatatcgattcaaaacatgataaatagataatatgatattctaatcaatattatgtaataaaatcaaggattcatttatataaacatatatgcaaaaaaatatatgtatatacaattgtaaatatgaatgtatatatacaaaaataaaatttattattttaatacttagaaaatattagaatcgagtgtatataactatcctaataataatatatacatatatcaaaataattaaaataaaaaaacattcatggatcggtcaagaacaaagagatgcactgacaatatatatacacgtatataccacaaaactcaaaataatcaagacagagataaaagatactctgatactaaatgttagaattttttatgaaaataaaagcatacagtcgatatgaaatatggaataacattacatatcaagtgtttatctgatcaatgaaatagatcgaaatacttttagtcattgattctttgatcgcttcaatcccacaggagctttgtatctacaaaagaaaaaaaaactagattattgtgggtaattaagcttccaggctctctctactctctttagatgaatttactgtgtttcacagaatgagaagtgaggtcggagattgataccctatatttatataggtgagaccttctatcaaggtctctaccacaattaatagaatattttgataattaatttaggatattaaatctaaaaattaaatgtttggtaaatcgtaatctcaccatatatagaatatcaaccaattaattgtgataaaattcaatgaatataaaatattcattttattatatacaagtataaatcattgattgattttatacttaatatataaaatattataatataacacacttagaatttaataaaatctccataattgggaaattatttctctcaaacacttatttctgacaataggtcccattgagcaaagcatgcataaacataattaataattaataaactataaatgcaccagtaagttctatattcaaatatgcggtcattaaaatatcaaagttcaaatcattttttactgcctgcaattcattctctgcgagctgagcttgtgtgtgtgtatatgtgtgagagagagaattttctccattgttttgagaagagaaaagaaagagagttagtaaaagaaagaaattaaattcaagtgtaaaagagagaaaatacagagaagattatttgccaaattactcattggcatgaaatcttgaagaaactgaagatttgtacttggttttgatgatagtggatgtgaagacttggtttgaccgagtcaaaccctatagatataataaataaataaatttaataatatatatacaaaaaaaaaa

SEQ ID NO: 326421 - DNA, 1522 bp, Cannabis indica
  modified_base (360)..(360): a, c, t, g, unknown or other
aaaagtggatcaagacgaattcttatgtatatcttattagaagaatcttcttatttttttttattattttataaatacggttctgctttctaaaatataaagcagatttgtttttccttctcttccattttataggacactgcaatcatctcaaaattattatattcatttatttattacataacaagattcagaaaaaacaatcatcatcaagctctggcgtacctaattaatctgttaatacatatataatatatgtctacatcttttacaatgtcatctcttcttttagtgtcaatttagcaaagccatgtcaataatattctattcaaataggtcggtagttaattctaaaaaaanaaaaaaaaaaaaaaaaaagattaatttttaggggctgctttaaactggatcaaacattgtaagcattcaaaatttggaagagcaatttatattgctattgtaaatggttgtgtatacaaaatttgggaaaacaatataggcttttggaaccaaaaagtctatacaataaacacaattgtaaaagaaaaatttacataaaaattattaataaaaaaaattacaaaaatacgtctacacgtgaaaattttttatttttactatttaaatttttttatttacaaaaatacatttttagtttaaaaaataaaccgttttatagtttatttatagttgtcatgaaattgtttttttaattattttttgttatgctataattatttatatagttgatttatagttattgtaaggatgatttattgttgttttttatttatatttttactttttgttgaagaaggtgtatttttgtaattttaaatttttacaaacttatatttgtaattaaaagttttagaccataaaattgtaataaaacataaaccaaaagtattttttaaaattccccattgtaataaaaagggattaaaaaggaaatggataactacataaagtaccattttttgttaaaaaaaaattacactttttacgtttacagaatttctttttaaatttttacgattttctatagaaacaacatgaaaacaacatataaagtaacaagaaaataacatataaataacatcaaaacaataacaaaaaaataacatcatgtatgttgattataattctataacctaacatcataaatataaaatttctaaaaataataaataaaaacattaagaattaagaaatccttacattgatggcagcgaaataatatatatgattctttccgtttagatctctaacaattgattcttgtgtgtagtagaacattatcaagatatatctgaacatgaatcttctcctccatcgattgtgttcatcatattcttctacaaaggcctgagtatcaccttgaatagtgtggcttgatactcaaatacctttggaacaatatttgtgagagagaaacttagtgattttcaatatatacaaagaaaaaagagaagagagtagtctaacaatgaaaacttaggttaattctctcttctcatca

SEQ ID NO: 326422 - DNA, 1676 bp, Cannabis indica
ttgatttgaaaaaataatcaaaaaccgcaacacccgcactgcgaacactcctattgtcaactattagagaaatttttatataaaaaaattatcaaatcttatgtggatgaaaaataaaataaaataaaataaacaatatttcagcatgatgtgtgtacttttgacaactataaatgttagctcccattagagatgttctaatatctcttttcatcctcacttccattgtttcactttcacactttttttagaataaggtaatggtattacaatcattttaataacttaatagcttaaaaatcttgaagttcaaatttatgacctctctctttttcctattttttcttcccagaccactaagctagccttagtgacttcttcacttccacatttcaattccaaatacttcttctaccctttaagaggatccttattctcactcccgactcttcaattccagaatccttattctacacttcaaacttacaactatttcttgctcaataaaccccaactccatatttgcatcggctgttgatgattcttctcaccaatcattttcatcaaaggtattatctttacatgtgtacattatacataattctcacttatcttttttgagattttctttctcttaaggatatgatttttgacttgtgtttcctttttcttaaaatctcacatagaaatgaaataacattaacaatgatgtgtaaatcatattagaatatttttaattatagaataaaataaataatagattttgagatttatgaatattttatattcattaaatctagacaaaattaattatgtaatattctacatatggtcagatttcaatattcattacccgatttgatttactgaattaattatcaaaatattctgacaattaatgtgggcacagatactgatggagtatctcatctataaatttagggtcttggtctccgagcttttcactcattctattcaaaaacagtaatattccatctaaaaagagttgagagagcgcggaagccgaaactccaataccgaagctatcgcaggaattgaagctcaaacatcaatgactagaggtattttgatcatttaattacatctacagttttgatatgtttacagtttattccgcattacatatcgtttatatatgctttattttcatattatatattatagtctaacaaatcacacttaaatgtgatacacacttatgtgtggcaagtcacttttaattagtgagatacatcttaaaaaaataataaattttttcatgtatatacaaaaaggcaattgaattacaacaatacttacagtcgactctatgaatattaatacaacccatatactaaatattatcaaaatatcacttcttctactacttcagccacacggaacaaaacaaacaacctcacacacccaaccttggatcgaccaacccagcaacccaacacaatcgacgaaacccaactagaagaaaactacaattaattcgcccttggtaagttaccagtttgcgagtcatgtctagaaggcaaaatgactaaaagttccttatcttaaaagggaaatcatgtcactaaaccacttgagatggtacattcagatatttgtggacctttgaatgtgcaagccaggagtggctatgagtattttgtcactttcattga

SEQ ID NO: 326423 - DNA, 861 bp, Cannabis indica
aaatgatataaccatgacttaattctctacaattatctttttttcttctctagtgtaaatcttttctcatccaacccagcatttgagcatatatgatataacatatatagtttttttttgtggagatataacatattgatgtgttgatccctttactactacaaaaaaatttcatgagaaatcaattgaaaaccgtgtataaaaagttcattattcggtttgtaatcgacctcttccatgcaatgatttaccatataaaatatacatggtagattggttggcgcccaatcaacttatggtgtggaagcaacatgcatattccatagtagggtcaattttaaaaccaacccattaattacaaggagaagaagtccttattacaaattattatattatttaatataattatatgtagattaaaatatggtaatatatattattacgtgaataatgtatattaactgtttagtaaataaattgtgtaatatgatttatttaacttaaaattgtaatctacattttgtaacatggagagaaattacaagattaattgcttttgtaacttcttttggttgatcatatttttgtgtaataaaaaagatgttacacaaaattgatgataagatttaaatattatgaaatatagttgttacaattatgttaatgctcattatatgagagaagagatggtgtgtttaaattccaagtgtgatcacctaaacactatataaaagagtactctaatatgttcatttggacgagaaattttctacctaaaaagcatattgctggaaaactctaaagcttgataattcctaaaactatttccatgagagttcccttagtgcttagagatagggg

SEQ ID NO: 326424 - DNA, 769 bp, Cannabis indica
attttatagatcactgttttccgaaatttatccaatttatacatcccaagtgtagaaacctgaaaccaaagaaaacaagcgtaattcttttccaaaaacaataataaagaagaaaaataactatcaaatgtgacccaaaacttaggctaaaaatagcctaacacaaagcttaatatgggcttggcctgtgaagtggggaatttaagtccaaataatttaagtgaaagttcatttggtcaattgggccgtaatgttgggttaaaaggaccacgtgcaggtcatgtgggtaatgctcaaaatgtttatgagcagtcgaatggtggctttgaggatagggattcagagattaaaaaacgcaaaactcatggagaaggtggtgccgaagagattgacagagcaagaaggtattttaacaaagggaagcaagttcttgaggattttgggtcaacccaggagaatggtgcttttgcttatggtgtttcggaagctggggatggggctagcagatcaaatgggggccaaaggaagagagtgtcaatcaagaataaagcttggcgacaggctaaggtgaatgcgggggtggcgattattgggtgttcatcggtggagagctcgaagattccagcttcagatgaggtgggggaggcgagtttggtgttcaatgccgagagtgtagttcaaaaagtctctgggatttcaggtttgaattctgcaaatggggttagtatttctacttctgtggatttggtttctccaatatgtattgatg

SEQ ID NO: 326425 - DNA, 1241 bp, Cannabis indica
ctatagttcagggggcatttttaacgaccttaaaatttcaggggacataatttggtacatgtcaaagttcagggggcaaaaatcttcagtagcctttaaaataatttgtttggatatatgtctaatttaactattaaatcagttattctttttagattaatttatctagctaatttgaaaatgacacaataatataacttatttgttataaatttatagttttataataatttaaaataagtcataaacaaatataaatatattaaaatatataaacatgtcataaatgtgtcaatttcaatcataactttgtttatatatattatatatagtttactttgactgaataagcattatgtaatcacaacaaacaatataatattttttaagaccaaacaatataaattgtaatttgtatttaaaagtatatttcttctgtagtaattattttttaaattgtgttttttcagtgacaagtgcacattggaataaattatatgggttctcgaagcaagaaagtgagataattttttattacattatctttttgttggctatacaaactataaagtacatcgagtttagattgttcggatttaaaactctcaaacaaaagattttttctttttcattaattaatgaaaaggatgaaaagcaatattattaattattttagtttaagtatgtaaagtttttttttttggcaattttgttgccaaaatatttttaatttatggtgtgatttgttagcttttataaaactgattttctcagcttatttagatatttttattgctcttttctatcattgaaaagattttatattcagttgttcttttctttgtttggtaacttcttgtaagagaacaaattctctaatagaaagttagctttttatagaaactttgactatttttatttttcttaatgagttcgattgtgtcttgataagatcaaatcaaatacactatttttggcaggtatcaagtccaaatacatgatcggacacgtttttggcaagtttccttttttggtctggtttgctgcagcagaacctgtctatgatgctgcaaaacagaattttcttttaggaatgtttgtatagctgtagattcgactttgtggttgtctctagggtttctttgttatataaatagaacttagaaagcagccatttgaatcatctcttctagctttcattttttgtattttctcatttgtgaagagagagttctttttgt

SEQ ID NO: 326426 - DNA, 1052 bp, Cannabis indica
taaataaaaatatattagtgaggtatcaaaaaactcatcaacatctatcaagtacatatactcaatgctaatccaaaaacaataacattttggatgatatataataactataatataaatttttaaatattttttttaatttacaatttaggtcactccggtaatttttatgtgaattttaattacgatttaggttgctctgttaattgttacttaaatttttataaaaataccaaaaaaaaactgcttataaaaatataaaaaaaaactcactaaaataaaagagaaatatgctaagaaatatcaaaaaatgcctaaaaatctctaaagacacttagagatagaagctaagaaataagaaaaaaaaacttcttctactatgagtaaaaaaaactcaaatatataaagtagtagtacttaattcaccattagcatacattatgttacactattaattctatattagaatagagactattgctttagggttcacatatgaaagatttgaagaatattaaataaatcccataacaaatttttttaatcaataaactaaattaaaatgaatctaagcaagactgagaacggatacattttgatggaggcttatcagtactatactactatatttatttgtttattaatttctattgaaaggacagtactatatataattatataaattgttgtttatcatattttcattaaaaaagagaaacactatctttttccaagaattggatctttgatctccaatgcataatcgaatcatgaaaacgaaaataatactatataataaaagagaaatgctaatgcctaccaccctccctatatattattatcgctattggtccaattaagtatcagatactttaatgtaataacttttatagagtatcactttagaggtgttagacactactagtgcccaataacaatactcataatataaagttaattcatagggtgcttccgtgagtgcataaatattcacttttcgtgttttctaacatctagatagttataatctaaatattcacttttcgtgtttt

SEQ ID NO: 326427 - DNA, 903 bp, Cannabis indica
tccaaaaggtggattaggtctatgccgatcagaataggcggtagggagttaagtgctaccttgatagaaatgagcctagtagattttgatattattctaggaatggatttcctatctaaatactcagccagtgttgattgcaagaggaagatggtgatcttccaaccggaaagtgaagaaccatttgtgtttgttggttcagttcggggatctcggatcccggtgatttcggccatgtcagctagggagttactgcatggcggttgtttagggtttctagtcgtaggtgatggacattactcggccagataccattcggccagaagaatagtatgcataaaaagattgaaaagggagttagtgagaaggaggggaaatattcatcttacggctatactacaacgttgtagtattggacatacaaggccatccaagagttgggcaacgagtacgcagttaagacgccacatcgctttttgagaatggtcaactgggagagtaagcctaagatgatactcggcaaggacaaagtgatttgatttttcactagaaatgtatgtttcttacgctttacatttatttcatgttaatatccatctattaatatatttgtttttattttcaggttacagtttactccgtgttatgtctccgaccgaatgagagtgaatttgtgaattgtatcattggcagtgaggctcctttatttattgacttggaggaactagtgttgggtgatgatgggcaaccaacagatggtgctttttaaagccagacccaaaagcttgtctctacattggaagaacgagcagatgcaacccgaatctttacgagacactacaccacctgcaccttctcccaccacctgccaccgtcttcactaccagatgagtctcggtgttt

SEQ ID NO: 326428 - DNA, 1859 bp, Cannabis indica
tgataaaataatttccaacattggatccccgcatgcgatttgaaacagctgtagaacctatggaggacaccgaggaagtaagtatgtgcgacctcgaccccactaaagttatcagcctagggaagaacctggagtcggaggaaagaagtaagatcattgaaacgttaagggcagtcatagatgtttttgcgtggtgccatggggatatgaccggcataagctcccatgtgatcacccatgtcttgaatgttaacccagacatgcctcctgtgcagcaaaagagatgccctcttgatccagtaaaggaagatgccttagagaaagaggtggataagttgttaaccaatgacctaatctgggaagtgtactacccaaaatggctagctaatttggtgttggtacccaaaccaaatgggatgtcgcgtgtttgcataaatttcactgatcttaacaaggcttgcctaaaagactgcttcccgttgcctcgaattgatcaaatggtggacgccaactcaggatttaagctgctatctttcatggatgcctactccgggtacaaccagattaaaatgcatgtcgcgaatcaagaatgtaccagctttaggaccaacaagggggtatactgtaacctgatcatgccttttggattaaaaaacgccggtgcaacttatcaaagaatggttaaccaaatgtttaaaaagcctctgcaaagaaatatggaggtatacgtagatgacatgctagttaaatctaaaacatgcatgggccatgcagatgacctcacgtagtgcttcgaagtggtccgaaggtatgggatgaagcttaatcccaagaattgtaccttcagcgtcaaatcgggaaaatttctaagatttatcgttagtcaacatgggatagaggcaaaccctgaaaaaatacaggctttattgagcatgccttcccaaataaacacaaggatgtgtaaagcttgactgggaaggtggccgccttaagtcgattcattttttcgtcgatcgacaagtgcattcctttcatcaatattttaaaaaaaaaaatagtcaaaaattcgagtggactgaagaatgcgaggaggcattcagaaaactaaaagagcatatggccaaaccaccggtactgtcgaaaatcggctcacggagaagacttgttatcatacttgggcatcttcgagaatgctattagtgcggccttagtccgagaagaggacaagatccagcacccgatgtactatgtcagtaagtgcatgataggagccgagacacggtattccttaatcgagaaattagtttttttccctcctgatggctttaagaaaactaagaccctacttccaggcccatcccattaaggtacttacaaatcacccgcttcggcaagtcttgcagaaacctgaatccttagaaagactccttaaataggtcatggaattgagccaattcgatataaactatgtcccgtgcatctccataaaaggacaagccctgacaaacttcataacgaaatgtaatgaagcagaagcctgctctagtaggccagcccagtagatgtcggtatggaaagtgttcgccgatggggcgtcaaatgaaaatggatccagtgctgggacagcaatgatatcgccagacggactcaggctccaggccgccctatgctttgcatttccagcttccaacaatgaggccaaatacgaagtgctaattgcaggactaagactggccaaagccgtaggggctgcaagggtagaagtctttagtgattctcagttactggtcaaccaggtatcaggagaataccaaacacgtggagaaaaaaatggccgcttacgtagcaattgtcagaga

SEQ ID NO: 326429 - DNA, 1174 bp, Cannabis indica
gaggcgaagccacctaggatctgatggtctgttgtattctgtttgcttttatttgtaattttcacttcatctgtaaaactgtaataataaaggttacagtgaggtctaattttaacagtaatttgtaacatcaatcgaaagatgtcgataagtttgataataataataataatcacttttaaaataagtgcatttaaagctattgcattcataaattgttgtaatctcatataatggtcatccaaaattgagaaaaataataacacaaactttataacaaaaacaaatctaacatgaagtacaagtagaagaagttcatgtgttatgaaatttaatgttgttacttttgaaaaggaagaatttggtgatgcactaaacatacatacattctgataatactatttccttttagttaattttgaagttaggcactaaaactcaagtttgagatattaatctctaaccaataatcataatcaaaggacactaatgtattctaatagagggcagaaaatgagtagtgatgtaagtagtcaagtttggatatgattattatttctactaattggtttatagatacgaactctgttgatgacagtgcaagaaataagtcaatcatgaaaataaaaatttcagtagcaatttctccaaccgaacagtgagcttaagaaaactctcataaagcttagcttgataagtaaaagcaactttcaaggagaaattgacaaaaacaactctcatctattctaatatagagattaaaaaaaatgagtagtgaagatactaataggcctccagtgacgcatgtgcatgggaagaaactcataaaaattattgttttcatttctttgttagaaataattgggatcacaattgtatatataaaaatatgtattggggtcatcaaataaataagtcaaatttatgtggtctattttggaataaagtttatgacttaaatgcataattgtcatgactttaatatgtggataccaattagatagtttatgatttgatgaggggccaaattagaaacaattaataaatattaccaactgttgtaacagttggtaatataataggtattggtccctatttttgcatcgtatcgtcgttttacagagttcctgaatccccatcaccaggaaaataaggtttaaaaggttttgatgca

SEQ ID NO: 326430 - DNA, 600 bp, Cannabis indica
atatgaagcttacaatacatatacatgagaatatatatctattatatgtatataataagaagagtgagcaagtaatatcccacaaccagaaattgagaaaggagaatagactttaaatgcgttgtgattctcgaatatttaatatcagttcaaatattaatagaatttgttttattataattttataatatataaataatattttattattttattaaatagaaattaaaagtaatttctcataaaccaaaaatttcaattatataagcacactttatataaagtagatacatattctcataaataagaatgacgtccagaagtcaaaatcaatcaaaaacaaccaattccactgaagaatcacagaacgaattaaatacatacatatatatattatcgaagccccatcatcccataaattaaaatttaaacatgacagaatctaaaaaaaccctcaaaaaaaaattacggcagcagtaataatataattcaaagaataatcaaacccttaatttataaaatccccaaatattataaacaaaatcatcaaatcttcaataaatttagcaaaaaatagctctggtaccacttgttaggatt

SEQ ID NO: 326431 - DNA, 773 bp, Cannabis indica
acactatatatatagctacaattaaactaagagaaagagatgtttagtttaaattaatatatatgaaaacaaaaatgtagatacaagaaaaaggttttggtgatgaaatattattcaatcaaagttataattttttcttggcttctcccgacaaagcatggtggaactatctttatctttcccccacctcacaatcaaagttatatatataaaaatatttatatatatatatatttatatttatactactttttttcctaccatttagtcatttagtcaagcctatccctaaaacctttcacattattattaggtagtacttgatcaagcacctactatacaactagttcaagtgactataaaagaatacatgtgtgtattggagattttaagttcgactcttaaattacacattatactatataaacgcttaaatataaaaagagtgaagtagttattgaaattaatattttattgcacttataataatataataaatagttatacatgcaataaaaaattaaaaccctacttttagtataatggattatttagataattttgaaaagttgataattttctactataatttatatatataaaaaaaattatgctaattaaaatgtttagcctctgaactttgatatgtatcgaatcatgggccctaaacttttcaggttgttaaaaataattctccttaaactattgaaattgttagattaagaatttttgtctaattttagtaagaaaagtctaatatgaatgaaagttca

SEQ ID NO: 326432 - DNA, 597 bp, Cannabis indica
ggcataaaacccaacaggtgtttcaggcacgatgccttcttttgtgccagggaacccttcgtgggagtagacttgtgcctctcattacacgggggctgtccaacaatgcttgtcccaatattcaagggaggattgggatggcattcagggggttcctccactaggcttgtgcaagcaactcttccgctcctctgtttgggtgagttttctttcttccatcttttcctttgttatcttttttctcttttgtttaatcattcttcatgcagatggtcgccgcgtctcaagaggtgctctcacaaggttgggccttggggatttcctcaacctatcacacacccctgggtgagttagaatttatcaaaggtgaaagggaccggcaatccaccctagtggcctcccacgatgtctgcatctaagaattagagggtaaactacacagcagcaaaggaggcccaagagcaagtagtcgcagaccttgctatctatgggtgactataaggtgacattcaatctgtcccttgacaaagtctacgagggagcaagacgacacctgttcccaacttgttgacaactgcgcacagcttgctggcagct

SEQ ID NO: 326433 - DNA, 891 bp, Cannabis indica
attggggcgtatcgaggaatatcgcttccaaattgtccaaaataacataaaaccaagaatgtggtttttatgtagggaaatacatgagtgacatcgttacacgtgcaaatcctaacaattatttaaacgatcaaaaagttgtaagttttaattattaattatcttatttattatattaacaaacaataatatatatactcacgtaaatatttacttcttttttacagtttgggaaaaagaaaatatacgattcaaaaattgaattgttgtcgttacagtgacagtggataaaataattgctggcagtgattcacgaaagcttggattgatgctgaaatgtataaaataatttcttctctagcttatttttgtatgttaacttgtaattttatatgtttaattagatatattaacttgttaacacttggactaattataaaatacttgtgtaatatatttagtcagaataaatacatttaagtatattgttaatttattttttaattgtatggaattaatttaaataaattaaattcatgaaattatattaggttttaaaacaaaaaataaattgatttttataccctatggctttgtatccatatgagctttgggtctacaaaagataaccgaaaacaaagttagtacgggtaatcggacttccaaactctctctaacgttcttagatagaattattgttttccacaaaatgaatagtgagatcgggaacttgtacttaatatttatagataagatattctataagtatatgtgttatattatttgtcaaaatactttaacaattaaatcaaacaattaaaatatttaataattaaacttaactataattaaaatatttaattaattatattttataaattaaattaaata

SEQ ID NO: 326434 - DNA, 835 bp, Cannabis indica
caccaccatcgccgcgatcagtaaactcgatcgtcttagcagcggagtctgattcagtgcacttcagacgaaacccactgttctcgatcgataaagactggcgggaagaatgaaaaacccaaccatcgacagcgaggttgtggtggtggtggaagccgcattgcctggtcgaaacgtcagtgtagaagaggttcgatggcgacgcagagaatccaggcgaacaaagagacatgtcgttttcgtaaagagaagatttttaacagcgccggcgacggtgagagggtaggacggcggttgttggtacggactgaagtgaactgttggagttagaaaaaatgagtttttgagtgttgaccaaccgagagggaaggaagctttgatcaaatgcgatgaggtccagagttagtggcttacgcgtaaacattcgattggttagaaattgtttgaaagttaaaaattttgatcacgtaaaagtttgaaaaataaaaatgtttctatgactattttttttaacaaaaataacttacataatgtaaaatttttagtatgatcattctattttagtagaattttatatctcccttctaaaaatattacctcaaaaaaattataagagtgaatttattcattaattaacgaatatatatcatatataattatttttgtaatttcatatgtgatttgattattttaaaaaaattatacttcatgtattactattattataatatattttaattaaattataataagatttgatatgtaaaattgtttatttaatatgatataattttgaatcaaactacataaatatatattattaatattatattgt

SEQ ID NO: 326435 - DNA, 1003 bp, Cannabis indica
acatttaatataagaaagatatattgtacttgactattagctagattaggtttgatcaaatgattcaataaagttttgaactttacatattaagaaattaagagcacaaaatccatttatgtttttctatatatatatcaatttgtttaatttgttaatggtgagctaaggtatatattttcaagtaaaaaagagtcaaactataggaaagtagctagattttaattataattaagaacactataattgaaattaaatgttaattagcatgagagtgacacattatggtcatttgcatttgcataagaacatttgtcgatttcatgtttttggtggccataaaaagtgctccattacaatattattattattattattattattattattattattattattattattattttctcacctttattgaattaatgtgtctatatatataaaaaaaatccactctttttgctgttattattattcttttcaaaattttatggagggtatattttaatctaaaagaaaatcaaatattagagcacttctttgtttatgacgtttcagttttttttaaaaaggaatatatgaaagtcatgaacttcaaataataaataataaataactagtgaaggctattttggatgatcaagatctcatgtgatgacatatattacttccaaatatttattacccacttcttcaattctttaattttattattataagtatattatataattaataagatgtataatatggccttttgagcaagtgagagaataaacactatgcacaaaacaagcaaatgaggaaaacccaaacaaaactagttagcatataatatgttgctgaagtcatatgaatatatatataatgttacacaaatatatatatataggtctatgtttttttatggtaattttaattttaaaattaaaaaaaatgtactaggaaaaaattaaaaaaaaataagtaattttgatttttctttttttaaaaaaaa

SEQ ID NO: 326436 - DNA, 1028 bp, Cannabis indica
ttgtattttttaaaatagtactccaagcaaattttttatttaataaaaacttaataataattgaacctcgagattttaagactaaattggttagattttttgtatctattcatgttgaaaattggttttaagttgattttattaaaaaaatgataaaaatcaagctcgggatattattttgtattatttttaaaaaatataaaatctaatttattatttaattaattagagagtacaatcagtaatttttctaaaatataaagtttaaaataatatttattaatatttgtatgattatatatatttgttaaaaattatggttattcttttaaatattttctaacataattatattatgatttgctggtttctataattactttaatatataaatatagatattagagaaaattgcattaattacttttgttaaactatcaaaaaaattattttactaatgaataaatactaaaattttactttttcaaattaaattatgaaacattacttttcttgtactttagtaccaattgttaaattttactcttttgattagttaatattaatcaacatattatttttccttttcatatttttaccataaaaaatataaagttttaatttttatccactaatataaaatggctaaatttatcatatttattatttataaaataatttttatgtaatatgagtgatctaacacctcatgactatatgagggactcataaacaacctttgaaaatatctaaaataaaaaagaaaaccaaccctttaaatttgggaataatccaacggctgagattgatccagccactaatcagtgatcacggcctcaaacacaagtggtgttaaatatctcctaagcaaaaatatctacaaaaaaacaaccccacttgcggagtggggcccacaatgtgccacgtcatcagcccaatctaattcccaatgccatagatcaaatgttaaagcgccattgatcaataccacctttttttttaattatttttattatttatttattttg

SEQ ID NO: 326437 - DNA, 519 bp, Cannabis indica
tttgttgtgactaaaagtaatattttattttattatttttttttttgatacatgactaaaagtaatatttagtaacaaaaaatctatgttgtgagtcttgtggcttataagttatcattaaagttcgtattttttgtagtggtggtttattttattataataattttaaatataatataatatttaggtaaatattaataatataaaataatgtaaaatcttaataaataaataaattagctatgctcattaattatttattttacatttttttaattcaaactttgtcttttaattattttcagaagaaaatttagaataatggaaagtgatattaaacaagagtatgtttatagagttcaccgaaaaaaaaaaattgtattagtgtttaaatatatatattaggaaaatttgagtttttatgctttatttttctatctaattaaaaaatcattcatttttatattatatgagctagagttgtttcatcggctaaaaaaacaattaagaaaaaaaaaa

SEQ ID NO: 326438 - DNA, 1257 bp, Cannabis indica
actctgcagctacaacctagctatttgacaaaagtcccagtacgcctttccaagttctaacttttaataagtattttatgatcacacatatataatatatgatctttaccatatttgatatccaacaattaatccatttactgaaattatattaattaatcaatacatatatagtacaatattagtacgtacaaactgcttaatgacacatgttataatatatatatttaatatgaaccacaaagccaggaatagtacagttcagcattgtctagaaacaaactcgatcatcatatatcattataattaattttgttttaattttaatatatagaatcaatttgctttgcagatagaaaaaagaactaataaatacaaatatatatatatatatgtacataattaattaataaacattgctatgactactgtgtaccattgctttttcgtagcaaaaaacccattaacatatcacatacattttctattttaattaattatactttatttatatttattattatcatatgcaggtcatttatatcatcatttatattcatatcacagagtttggagatctatgctttattatattatgtattttaagttttgtgggcgcagatttaattatgtacacgtataagaatatatatatattatataaattaatataaccaaacaaaaaattaaataaaaacaagaggccaacacaaagcatatagtatatataatagtgtataatcaaatctagtctggttttaattttgactgttcatatgatccatatataatatataaaagagtcttcaaatataatatgaagaacatatcccatttcgaaaaaataaataataaataatattatatataatatatattcaaaaccttatcatggtacatgtagtattcgattgtatattagtaaattaatttataattaagccgatctatatatcttttgttaagaaaataacatatatcattatgtgtttatatttagttgtgtacgtaagtaagccattttctatatttgaaattaaataaaatatatatataatatatcattatttatcaaaaaaatatatataattatttaattagtatatattatatatgatgtgctcatgtgctattattaatatctttgatttcctattataaagagagtttttctgacccaccattaaaatcgaccatattatataggaaaattataatttaaagattgagttattttatataggtgtcgtttggtaa

SEQ ID NO: 326439 - DNA, 1044 bp, Cannabis indica
ggcttcaatgacatatataaggttgagatggaagctaaggagaatatgattgaatcgaagcacaagagaagctacagaaagaccctcttaatgcaacattaatgaaagaagaataggaagcttgtgcttgttactccaagaagcatgctgcatattcctctttcttagcttaaaaggaaaaaatcaattgggctaagaatggggataaaaacactgctatcttttatgcatcgttaagggcaagaagactgcaaaacacagttctctccattgaagatgccaaaggtaattggtgtgatacaccagacggggtacaacaagcttttcttgaatactacataaagttgttggggtcaaaatggaaaatatgaagaaagtccatcaatttgtggtagaccttggtccaaaaatcacagctacacatctagacatactgcaggccaagtacactactcaggaagtcaaagatgcactctttgctattcctggaacaaaatcctcgggacatgatggatttggcagctccatttatatatataattgggacatggttggcgctgatgtagaaagagttatattgtcattcctaaactcagggaaaattcttaaggaaatcaatgctaccacaattactctcatttcgaagacaatttgtcctggtaatgtcactcactttagacccatttcttgctgtaatgttatatatataaaattgcttctaaaatcatatgctcaaggcttcgattgagtctcctggatctaattgcggagaatcaatgtggctttgtgcatagtagatacattactcacaacattatgatctatcaggatatagttagattgtatgggaggaaaaactttaaacagagttgtatgatcaagattgacctgagaaaggcatatgatacaatagcgtgggatttcattgaagagatgttaggggattttggattccctcagaaattttctcagcttataatgactcgtgttcgaactccaaaattttccctatttcttaatcttgggaatattttaccaggatct

SEQ ID NO: 326440 - DNA, 961 bp, Cannabis indica
atgacaacaccacctatgatgatttggtgggtaaggcacaacgagctgagggcgcaatagagtgcacctaggagtctccagagactcaggttgttggtggggcttctaccctcctacaccaggctttagtatgggaggtagtggcttgaccaatgactagaaaagaaaggcacctactgcatctggcggctcaagtcagagcaagtggttgggagggaaccaaggtagacgcaattgttaggacagctctgaaacccaatacacttacccataatgccccagttgtaaaaagcatcatctgggagagtgtagagggtaggggtgcttctagtgctgtatgctaggatactacaaaagggattgatcccaactcaagaaggaagaatagaaaatcgcagcgaaacccgttccaacaagggtttttgcgttaactcatgctgatgtagaagctagcccctcagtagtaacaggccagctctcagtcaacaacttttccttctctatgttatttgactctggggccactcattcttatatggcagccagaatctttactaaattgggtagaccacatgatagttatgatacagtgtttggaaccctactgcctagcggagaattagtcatctccaaaaggtggattaggtctatgccgatcagaattgaggatagagaattgagtgctgacttaatagaaatgggtttagcggattttaatattataatgggaatggatttcttatccaagtactcagcgagtactgattgtaagcggaagatggtaatcttccaacctgagggtgaagaaccgtttgtctttgttggatcggttcagggatctcggatcccagtaatttcagtactaacaacaagggaattgttacgagaaggatatttagggtttctggccgtggtattggataccactcggcctgagtcaattcggccagaagacatcaag

SEQ ID NO: 326441 - DNA, 528 bp, Cannabis indica
aaatctagatcatggtaaaataagttccaacaataacttgttgtatgtagtataacgggtggaaactctttttgttggttatcctccaatgccttcttttaatctttcgaaatggaggtaatgtctttcgaaatagtgaatctctcttcaataatttttcatagtttttgtgataaaagataagtcgttattataatggatcaaaaattatagttttctccataaaaaattagaagaggtaaggaattaagagcgattggagtcggaattcatggttatgagaaaaaaaattacttctagtaatatgatcgaatggagctctaataccattaatggtttgttaatttgtataaaaataaaatagttataatttacatttaatttatgatgagttagatgataatatagtggtatatagttgttatgctggatagtagtggtagtgtataggtactgttgataagttgatgatagatggtttggatggggaaaactaaaaaagttgtatttgtgttttgtataattaaa

SEQ ID NO: 326442 - DNA, 1197 bp, Cannabis indica
cataaaacccaacaaactcctgcaataggtgtcatccaacatgttgacttcttatgggatggtaatgttgggttcctctaagaactttatgggcaccaaatttgcgttgttggcaatggtgctactcgccagatgggtaagtgcatttgttgtagcctttgacctgacttagcatgtctttgtttttgctcaagtaggccaccattttttcacctcgagcagtgtattcacctaggacttcattcacaactagttgagaatcgctgaatatatctaggtggtcaacccgtacttcatgcgccagtttgaggtttacttttaaggtttcatattcagcctcattgttcaagcctttgaatccaaatttcattgatccgtgcagttgtttcccccaggtgttatgagggaaacgcctgcaccaaacaattggtcagtgctgcttccgttaacatggagtttccatggtagttcttcaggattttactgctatggttgctctcgcttcttctttggctgtttgttttctcctgattcttgagatatttcaagagagaagcttgtacactcagccacaaagtatgcaagggcttgagcctttatggctgttcatggttggtatgtgatctctaacttgccaagttcaatggcccattagagtaatagctatgatgcttcaggtttttacaaaacctgttgcaatggttggtcgctgtacacctttataaggtatgccttgaagtagggccttagctttctagaagctaagaccagactgtacgccagcttctctatgactgggtaccaacttttagcgttgattagccttttactaatatagtatacagggtgttgtccaccgtcttcttctcctgtgaggacaacactcacaacgtgctctgtgactgtaaggtacacgcttagctcttcattgtctagggtattggacaacactggtggttcagccaactgtttcttcagctcctaaaatgcattttcacattcctctatccactcgaattttttgtggcctctgagaatgttaaagaagggtacacatttgtctgtaaacttggacacaattctgcttaactaagtaatgtggtttactaggctttgtacttcttttatttgtggtcgacttcatgtccaaaagggcttggatcttattcgggtttgcttctattcccctggcattga

SEQ ID NO: 326443 - DNA, 1758 bp, Cannabis indica
ttaaaccataaacatgtaacattcatgtaatcataattcacttcaaaattctaaattgataacttatcagattataatgggttttatttagggcacaaaacccaacaaattcaacaatcatttgtatccataagttaattttactctgaaggggctagtatgaaagggaacctgtatggaaatgacttgatttcaactctatcagggtacaatgaaacttaggggaagactatgggaagccatattaagcaagtctcatcaatgggaaattaagactttggtcgtctccggcggtgggacctgggtctagtggccaagctccattcgtctccggcggtgggagctgggtctagtgatacctcgaagatccccgtttccagatttggccatggtcgcggctcgaggaggatgaagatggcgacatctcgtgagccagctggtcgtggttcgtctctgcgtgctgcttggataccgaagcacaagcctgcatctcgagatttgacctttactctgttgggtaatttggctccgactgacagtgtagagaagggaaagcttcctgtaacttttcctatgttagaggaatgcccttttgaccgttcctctattgtactattggttttgaatgttggtggtcaaggtgatattgggccagttttgaacactagtgggtcgagtaggcttatggctgcttgtgttgatttaaatggaattggaatagtacctcacgtggataatagtgtgcttaaaggagggttgactttgaatggaattggaagtgggcaaatttcttgtgggcctctggttattaatgataaggaggttggtgggtcgagctctcctcttaatgaattgggccaatatgatttcctaagtgttgggcagaaggcactttgctctaccaacgataataaggccttgtgtaatttttttcaagcccaagaatcattgctacaagggcttaagcattttgggaagttggatttggatgagattagaaccttgggaggtgacattggtgttaaatccacttctaagataaatattagaaccactcctttcaagaaaagaaaactttttaaagcttctgcttccttatgttccagatctcataagatgattcagagacactcgggtgttatccgagacttcccttgcgacacaaaggaacaagaacaagacagaactttcaagattgattttgaagaaccttctgaagtttgttcggatttcttatctcgctctgacgacattttaaagaacccgcttattggttcgcttgtgattgaggcatttggctctagctcatatgttcactctcaaacccctgtggaggagaatgtcttatctcctccacaagagccatgagaggtgtagcgtggaactgtagaggtttagggtagacttctacagttctggagttgaaagccctgattcggtcgtgcaatcttgatttcattttcattaccgaactaaaagtggatgcttcaagtatggtacgttcccttaagaaacttcacttttatcataatattgttgtgccggcagtgggatgtgcggggggattaattttagcttggaaagagggctttgaatttgaaagtattgatgtttctaaaaatcagattactggttttgtgtactctgaccctgtaaggaacccctggctgttgtcttgtgtttacggtccccgtacttccatgaaaagaagaaattttggtctagcttgatggttaatggtggaaaatttggtggccc

SEQ ID NO: 326444 - DNA, 707 bp, Cannabis indica
gcgatgatggctcgagatggaacaacggccaccatgttaccaaaatcgcttcatcctgagtttgtgtctgcggatttgttccctcctagaccccaatctgtaatagaaataaaaaatgaagacctaaaggagggtatcatgacaaagatttttgttttcaatagttttgcaattgaggccttaagagccatgtattgggacaaagaaaataagattcgaccttctcgcgttgagactttatctacttttatgttaagtaggtttgaggctgcattatcagaagcgaaagcaaaagcaaaagcaaaacccgagaaagaaagggtttatactattttgcacactgtaaatcttcatccaaggatgaatccacccttggccgaaaactcatttggaaatttcttagtgtacgcaggcacacaaattccagcctcgagtattaagggggaagcttccattactagtgggcttgcgatgaaaataagagaagcagttaagagattgaacaaagagtatgttagtaaactccaaatgggagaagagggtgaattgagtatgatccaacaaaactcagaaagtatagagaagagaggaggtgaagtcattgaatttttggttacaagtttgagccgattccatttttatgaaattgattttggttggggtaagcctgattggtttagcacaggtgcttggagttttgataaaat

SEQ ID NO: 326445 - DNA, 647 bp, Cannabis indica
atgactatgaagaaaaaaattgattaaaaaattatttcggatgttaaaacagataggggtgtatcagtatatccatttaaaggggtgtattgtagaattttcctatatttttagttctttgatggaatatttattaaattaatttaattaatattcataaatatattttccaaactttttcggcttaatctgtatatattgtgtgattatatttgcttggtttattttaagtataaatacaggaaacttgacaaaacttgatagagttgaaaaatgattaataacctatcatgctcgaccaaaacaagcaaatttgggttacaaaacatcatgatgcccttcttataaagtccttttaatttaagcacaaattaatgtataaaatatatataattcttccctaaaatgccaaaagcaactaagttgttgatgataatgatgatataattaaattcaaaataatactaaaatttatttgtaacataaagcaagtcaaaaatagtgtaaatttagaaccgacaccaaaaatttgactttttataattgtagaataggtgtcgattttatgaactgacactaaaaataatataagtacaatacaatttgtagtagtcactacaaaaaatcttacttttaatcacaacaaa

SEQ ID NO: 326446 - DNA, 564 bp, Cannabis indica
aaaaattaaggaggagttgcatgtagagaaggatggctatgcaaaagaaggcatttttgtaaatcagaccctgaggaatgaaaaagaaaaggacaccagatggtgacaaatcttgagacagcctttcatattcagtatcatgcaaaatttcgaagcccactccactgtctactctcaaacgaatctcctctgttccaaatggaccccccctctccacacactttttatttcattcttaaactaaataaaataaaataatccaaaaactcaatagtttcgtgaacttggagcgtttcgctagctagtctgtgtgtctacattctacagtctagtcttactttttaaagagagaaaaagagagagagtaaggaactcatgaaaatcaatttagctctctctttccatatttgattgtttctccaaaacactcaaacagtctttcaaacaacaaaaggaagatttggctatcatacataaaaatccaccatttctttgaaaacatatatctatctgaatatactctttttaacctttaccttctctaatttcagacacaaatatagg

SEQ ID NO: 326447 - DNA, 1241 bp, Cannabis indica
aagatagtttatggtagagggtttgcaatcccaatatatcctcacttgctctacactctcttgtgttctttcgaccttggacaactagttggtgattttaagtagctcatggaggataaatgctcaataacaattgtatgtttattgtttaatttaatgctctaaatagaatgtacttttggagattatgagcactgtttgtgtttattatcactcattatgtgtataattttcaacaatatactcaagcaaaattttatttcattatataattatagcccatagattaataactagttaatactgagcaaccaaaccaccatcagatactccatccaaatctccattaagtctgttgcagctcgacctaatctctccatttgtgccaatctaaaccttgatgttccccattttaatcatggacaccacaaagctctcaaaaactgcagtttgattggttgtgaagttatttacaatggaaatagtatctgctccgcttgtcaaacacaattcttgatccgtttggagaagcccattttgagattgaagatttgtaaaatatatgttgtcgaaggtgtttggtgttgaaagatcgagatctgttaggacactcccattcccaccattagagcaaaactgccttggattttctaacaaagttgagttgagtgatgggtcaaggcgaccaatgttgttaaagtcatatagtctgtggatgaatgttaggcatttgagcccttccaaatgtgtgagcacctaacaattcagttaagttcttaacaaaattagtttacaacttagattatgattttagtcaattagagtgtcaaatagtaaataatacaagtaatagtcaaaactcatatatgcaactaatacaaaagaataacataattaaaaaaaagtttacaaaaacccaatgtgataatttaatttttttgtaataagtaataattatttaacacttacgtgatgtataattacacattagaaatttatgaaatttgaaatgtaagtgagaagtttactcattcagtacttgacatattttgtttttgaaaaattgagttattgcaaatgtcaataatatatatgaaaatataaaattgtatacgcctgcaaaagcagaatgtaattctgttactgcagaaactagttttgcagcaacaaaccagaatagacagagtataaaaataactacagaaatttaaataacttgacacaagagatttgtacgtggt

SEQ ID NO: 326448 - DNA, 592 bp, Cannabis indica
aattgtctactttctaattttctaacaaatttgtaagtttttctttgttctaaaagaataacctccacatcttttttcctatcagaaactttttataacataattccaatatgaataattattttcatttaatctcacactaattgcctgaaggaaatcacctatattattagctattgtagaaataaaacaaattgcaaaatcttctaaatacaaaattgatgaaaatttaaaattgtactgcgaatatgaaactcaaagaaattaataccaatcaacatcacgaacaaaacaccatgcaaaaattatgatgccatgataattatttgagaataataagaaataaagaataaaagatttaaagagaaaagtaacgaaattagagtttcagtcaaccgcaaaagtaaaaataaataatattactaataagcaaactttatatagaaaactaacataaaagaataaagtaataaaaaaaagggtaaataccattttggaccctgtgttttgcaaaagttacagattggaccctgtgttttgttaaatgacaaaatggaccctgtattttctaaaatagtaaaaataggaccct

SEQ ID NO: 326449 - DNA, 712 bp, Cannabis indica
ggttatatttagtaatctggttaaaaataatttatctagtgttttttttatagttgattacatcatatttagcttatattatttataacaggtttttcacaattctttttatatgaatacaaaattaatataagtatgtatataagaacgttatttttgtttttgtatttgtttcattttgtttatttaactaattttttttatttttagaaatctctatatgttcgtattcgtttactaaaatcgaaatttatttgtttaattgtattttcatatatgatagtttaataaatcattatatgataatatataaatttacttgtttaatgtgtgcacgtgattgtaatatttggagaaaattgttgttaaaaatttattgttctgtataattagtttttattccgatttgtctttaagctttattttcttgtctaagcattcatgattgcatttttttttttaattttgtttgctgataaggacgatcaggaggaattattgaggtcaccgtagctaaagaagatgatcaacaattgtcgtttttcaccctgacatcatctgtgcagtcaacaaaggtgaaaaaacagagaagaattattttctggtttttttgtgatctattttcttacaaataaatcacaaaatgaagaaaagatcgttgatagagtgattcgcaggagagatcgtatcttttgaggagtgatttgtggag

SEQ ID NO: 326450 - DNA, 830 bp, Cannabis indica
  modified_base (788)..(788): a, c, t, g, unknown or other
gccaaatatcttgatattcattgaccttaatagaattatattaatttagcaatattattcaacatatatatatcaatgaaatttagatacagattcatacttaccaaatgataaactgaatttagagcaattaacacacatacataaatatcatttacttgataaattaaaacttcacttttataaataaatatatatacacacatttatataaaaagtataatgatgacaaaattaacttctttctcttctagttgatctgtcatgtagttgtctggacgagacagttgagagcactagcaatacatttatataattttcaataaaaaaatctaccacttctataaaaatcaatattaattaatacccaaattgcatgataatcatagctagctatagctggttttggattttgattcgaagacaaattcagggccatatatattttaatgggtgatgatgctttgttccccagcaaaagttataacatgatatgttgtattcatatatatatatatatatatgtatatgggtaggaccaaataataatagttataaggatttcttcgaacacactctgattaatgcagggcaatagagcctctctcggtggtgatgagaatcaatgccctctttatttagaaggatccatttatatggaccactttgtatatatcaaggtatattcaaattataatggcttttctatggatgatatatagtcacaaagtaatggtgggttaataaagccagagaatatatgtgtattttactttatctttatatcngaaaaacgaacaagagattttgaatgaaaatgtttaataaag

SEQ ID NO: 326451 - DNA, 744 bp, Cannabis indica
ttttgacaattagattaaaaataagttattttggataattttcctaaaaataattattacttaatctaacaattaatataaaacatgaaaaatcaaggtccaattttttttcctaatgtagtacaaaatctgttaattatgatataagaactaataatttacaccaaaaaaaaaatttgcttaaaaagtcttataatttatattatttatattaatagctaataataactgatttataatatgattatgtatgtttgtcaacagattaaacaatatatatggctactagtgaatattttaaaatcctaaaatgtgtcgtaaaataatattaaatatagagaagataaaaagaaaaagagaataagaatttctcagtggtttactaattacgtgaactgctatttatacaaaaattaggactaaaataatgtaaaactaaatcaatgaaataaagcgaaataaatttatgctataattaatttgggtgatttggacatccacatatatatttatataatatttcataactctctcttgaatgtctataataactgcctcattaataaccttgctagaaaacttaatatgacaaaaactcgaccaaaaaaaaaagagtacaatatgaattaactccccttcatttaagcatttgtagatatattctaatcgatgaattccgatcttatatgtcgtcttctcaaatgttgatgctggtaataactttgtgaataagtatgcatgatt

SEQ ID NO: 326452 - DNA, 656 bp, Cannabis indica
tatttatatttatatttatataacttcttcttttctgtattccaaataataataaagatcccgtcgtgaaaaacgtttaatatgtataagtacatgacaaaatgaatgttattaatcttattaattattaatttgttcaaaaaagtattaagtattcaagtacttgatgatcactatatataggagtggaagttagcccaaaacttttgttttcttttaggttgcataatgcatgatgagtatatactttattgattatgaattagctaaactcaattttatctattaaattataaattgtttgagagaggtgataatgaattctatatatcaataataatatatatggtagtgttcatattcttgttaactcgccttaaataaatattgggttgatggaagtaaaataataatgtaatgcatgcatgttagtatatatattgtatatttaattacaactttaggttgtacgtcctgtttagacacgttttagttcctaggtaagtgggatttgatcaattcaagtatgagaatgagatattattataggaatatgattttgtcccttaacgtactttcacggaatgtattccatagtacattagatggatctcagagtacattaaatgagtgttagggtacgtttctacttttta

SEQ ID NO: 326453 - DNA, 2161 bp, Cannabis indica
tttcccgagagttgacttttgactttgactttgactttgactttcgggttgacttttgactttgagctttttgaagaccttttttgaatagggtcttgacttgttgaacccttgatgaatcttttgctcttatgaagtatgaagtagtttatatacttggtgaatctacttctttgattatgtttgactttaccgagcaaatatagatactctgtgaacttgcttgcaaaataatcaagaaaagattagtaacaaataataatcaaatatttgtttatcatcaaaataaatgagtgaatgacttttggtcaacaatatcctcattctacactaccgaattccaagcttgacgacctcatccatagtggacatgttggtaagtctaatgaattaggcctgctcgggaccacttggctcaccatctgcacctaaattggatagtgtggtatggcccttatgcggagcaaggtgtggtgcttcctctgcacctataattcagtgacatagctaactgttatcctgatttttatccacctgatgtggcatgcttacctggacagtatcaatgccacatagcagtacaactcactaacaaggaggtcgagttagcaccttggccaacgagggttgtaacactcaaatgggacaacaagtgaaaactagccacctcaagggggctagccagctaggttagaacctggcaagactttagtgcacatcttaatagtggactacaagctagacagcaaattaggcattaacaacccaataaactagatggaaagtatttattttgaaggggtattttagtcttttgtatttaatcaatttaatatgtaaatatctacttattttatcagttaattagggtttaagctctcctatagaaagagccttaactcaaaactgaaaacctacgtctaattctagcttccaagccattgagccaccaaactcaaagtctaatagcattctcactctctctctcacacgcccactatagcatctctcagcacttgagatttgccatctttgattcctacattgtaactttaagagagctatattagatccctcaataatgatctgaatagtattatctctcggtattaatacaactaaaggggagtaggtcattacccactaacttagggggtcgaacctctataaaatctttgtgttcttttactttctatttctaatcatgtaacacgtggcaagcaccagcattaattcaactctgctatcggttggcaaatttctaagtcaacaatttgttgctttcattgagagcaaattgtcaaataatctgatcaaacaccatggttaacacgaggagaactctggttgcaccatctacatcatcagaccttcctggaggccctttaaatgtagatcttgatgtgcatgttccaaccacaactagaattctcatgaacatagcagatgtgatcaatcctaccaccacaacaagcaccttgaatctggcctctgcagctgaccaggataatgcgaacatctggtggatttgaacagtaggcccttgcctttgagggaggaccctccactggcacctcacactgaaggaaggacccttgggagcagccccaagaacaacaccagatctcgtctcaagtactatgctagagaaataggaccaggcattggcaagcccatgtaaacttgggagaagatctcaagttcgccatactgagagaggttgtttgttaggccgacctaactaaagaaccatgcatagctgattgcgatgtattctcttagtagagacacgaattcttgagatggatggatggatggatgattaggagtacattttttgatctcaccaggcagagttggatcaccgcaacagagaggtcaatgacttgatagggaagttcaatcagagaaccaatggaagaggtcagaatctcatcaaagatccaatccaaggaagactagttgatagattagggaggatctatcgacaagctgagcaactaggtgttggattatattttaccaggatctagatttactaccatgtatgttatttaacataataaatatgaatttctaaaacaattgtatcctttctgtagcagagtatcaccaagatctgagcctgattctctttctcttgaatttggattcttcacag

SEQ ID NO: 326454 - DNA, 1546 bp, Cannabis indica
taatactcttgaaattgagcctaaccatatcaggatttcgatcatgtgatctaggatcaacttatgatattgaattgaatagatgtttacggtaagtttcaaaatctaattcaaagttcaatatcggtccattccaatgcatactccatgcatccgatactggtaaactttgccaatgtcctggaaaggacataacacttttccaaggtgtaagaatacctatcgctgattataccatgtcagtctaaatccagtgttctgacaaatcagggaatctacttttgaacatataataaagattatattccactgtgctgacaacactataatctttaaccaactcatatgttctggacttaaaaagaattcatacattatatacacatataatcatgaaataaatcatgtgaaccatgcaacataaaatgttatttctgatctttattaataagtaaatctgattatatgaaatgagttttatttagggcataaaacccaacacttttatcacccgccttgccaggaataccatctcacctatcattcctcatgccaaccctttccctgcacttcttgagaaaataactactcaggaaaaaggcaaaaaaattgctactattcctcaaactttgcctatctttccaacatttctctgccccatcatcaactattgcctaatctctctatttaagaaaataaagccactgatctgccttcatcttcttctagtaaaggcattgataagcatgttactctaggccctactctcctttcatcatcttacactaaaatctctgaagaccatggtaaatcaattaaggataagggtgaatcaaggctcatgaatgcaatcaatccactgaacattgactcttcatttaatagatctgctacaagtgttcctatagctcctattatgcctacccgctgcctacacacatatgactcatcttcaccctactacatctccattggatcaagccacgtcaatctcagttgtgactccaacaatcaaccttacaccagaagtctcatctgctgcaactcaaccaattcttcactcaccaaattccatactgatgaatgaaattagactgtaatctgtgtttgctaaaaggaaaattgttacaacaagaggaagtgttcgatctgtcctgaaacaatgccgcaccagatcatctcctctctcagattctacaaccaaccctatgcatcaacaacctcatccctcttctgaaatgtcttatatttcactgatggcggatggaaggatgcttctttggcgcaggctgaaattcagcctcaccaatcatcatgaatatcatttcttggaattctctgagcttgagcaacccgagagcattcagacaacttcatttgctcatttctcaatgtaatcttgatgtaatttttactatggagtctaaacttagtgttgggtctattaataaattccaaaatgttttaaaatatcctaatggtattgaaagtcctaaattaagtaggtcttagtgggggtctgttggagtttattttaccaggatct

SEQ ID NO: 326455 - DNA, 1174 bp, Cannabis indica
tgatttgttattcttgaatcctggaggatatccatggatcttgtagcatttttcaatggtatggccacgcacattacagtgcgtacaaaagggtctgttccttgtgtgtgaggttttgggttggaattcttatctgactgaaaagcaaaagccatgttagtgttggaatcatttccagaagaaagattacctttctggttttcttcttgagtaacaagatggaaaacatgattagcttctggtaatggatccatcaagagtatgttgctgcgtatatgagaaaaatggtctgaaagccccattaaaaatgacatgatgtactccatgtggtgctgttcttggagcttcttcacaccaccacaagtgcatccattgcaggtaaaattgggcctatagttggacaattcttcccatatcgtcttcaatcgagtataatacatgttgatggtctgattttcttgacgaagattcatcaaacttttcttaagattgaatatgtgcggcccattttgctgatgaaatctgactttcaaatctatccaaatagcagccacagattcatcgtaaagcaaactagaagaaatccctttagaaactgaattgagaatccaagatataacaatgttattatttctaatccaagcattgtaaagattatattgagaattatgaggtttaggtatagaaccatccaaaaatcctaatttgtttttgacagagattgcaagctgcatcgcacgactccatgatatgtaattgtcttgccctattagaggctgagaaacaagaatgttaccgggattgtcgccatggtggaggtaatacagatcagaaggatcctcaagaggatttcttggattgatgacttggttgttttgatttgcagaaatggcagaacttggaactccagtttcaactccaatttcttgattgtcactagacatcattgattagggaagaacactggaaagggtttccaagagagaaagatttgattccacagagtaaatctagtgaaagagaacacagatcagtacactaccattgccggaaaagaagacgcggcctggtaggagagaggcagaagcgtagaagatcagtggagaagttgttggaaattattttaccaggatcttagatctactcacaagtgtgttgattaacaccctaaata

SEQ ID NO: 326456 - DNA, 758 bp, Cannabis indica
gaaaagttacactttcctatctaaaaacttctaagattaattaggattttacctcttgaattttgacatgtaccgaatcatattcctaaacttttaaggtcgttaaacaatttcaatagttcagggggcatttttaacgaccttaaaaattcaggagcatgatttggtacaagtcaaagtttagggggcaaaaatcctaattagtcaacttctaaatgtgtgtgtttgtcttatattactcttgaactatgactacccttgcatttttttattttttaaaaatagtctctgaactatttacagtattgtaaattggtcattttgtcaagttttatcacacgcgctaaatagaacaaggacatggctatttagacacactagtgctatgtcaacgctacgtgcttagttaatttgaaaaaaataatttaagttttttaatttagttttaagtattttttgtaattattaattgactttagtttaatgatcttttaaaagtacatatatatatattttttttaattttaaattatacacatgacgctgatgtggcaactggttaattaattatatcatcattttgtttgttatgtgtgacaaaatttgacagaaagactaatgaacaattaatggattatttttaacaaattaaaaaatataggggtacaataatacacattcatagtttagagataaaaatcctaaaaagacttagataaatgttatatgtttagtgtgatttaaaaaaaaaaaaaaaa

SEQ ID NO: 326457 - DNA, 914 bp, Cannabis indica
tgcttcagtgtctcatattcctcctggatgatcgtgggttgcccggagggacctgtcctgatagtttccctcttggctcccaacctaagtctcgaaaactggtccatccctctcaagtggcgtgaccgctcacccagcacctgtatcataatagaaatatttgcggaaaattgcgcagggtcgacatattgcattggtgggcaatattggtcggcgctggttcagtttcacgaatctcaactattttggccaacaaaaaatttgaacaaattgttagagttaaatatatattaaaaatacagatattggcagcaaaaccacccgaacttaaaaaattttaacgcttaaccaaaaaaactaaaatatttacagaaaaacttactaaacttaggttctattttgctctacacacttctatccaaaaatttcagttaagtgccacattgggctatccacgggtacacaaatgtacacgtggcaaatttttagtggtccatgtaatattatttattaaaatattataaaaaataatttaaaattataaaaataaataaattataaaaaatattttattttattttattctttttttttctcttctttctttttcttatcctttttcttttcttttcttttttttcctaaaaaaaacaaaccctaatctattacactaccacagtcactaccacccacaacaaccaccacttcccactaccatcaccacttcagatccaatcaacacttaagaaaccaaaaaaaaaattcctaagatttttatatatattcagctaaccaaatttaaatctttatctaatttattcatgtaatacccaaatttatacatatacacatagattatttgatccaactcaaattattcaagatagaaacacaaaagtaaaacccaaattaca

SEQ ID NO: 326458 - DNA, 1855 bp, Cannabis indica
actttttaaatgattacaggggtataatcgtattaaacccttttaaaaattacactcttcgagttttggcagttcaagacttcgagacgcatcattgagcatttaatgctctgaccgttcttattttccaatgttcccatctgttagatcttatttcctttgatcgaacggtaattattaatttggtataaaattgaaacaaaacatctatttcaccatttttgttttttcaaacctccaagctttctgaaaatcacgattgcttccccttctaaacttgcatgccctcattgtctctgacctacttcctgcgtgtaacatcagattacatttccagtctcagaaatttttaggacccagtttctcaatttttgagatttcaatcgcgtagttctaacttttccagaaatttcaaccaagacagtaagtgatacacttcctcttcttactaattttttctttttgtactcataattttttttcttgattgatattccctatctgcattattttgttattataggtaattttgattttgtttgtttgaatagttttagggctgacaaattttaggttatttgattcattggttttttgggttgaacttgtgtttaacttttccagaaattagggtgatattgtctgtaaatatgtcccaatctattctagaaatcacaatcccagaattcctagaatcaaattatcctcaaatttctattgtaccatttagacccaaaatacatgctatccagttttttgcacattgacgtggcgagacgaccgagggacacgtgtctcacatttctgatacctgggtggaggtaaatgtccctagcagcctacacataattggtcagcatctatgattgtcaattacctgagcagagttgtaaagaaggcatgtgaccaggtagaagactattatgtcgagccacttacaaaatataattacttcagaatgatcttgttatgtccagacatgaagacaatccctacaaacgtgggattgagtcagagaaatatgacaacctattctagtttcctatttcgtgtattgtaattatgtaatcattgtaatttcctattttaagcattataagaaaaagggaaaccatgtctcatgcattaagcccctataaatagtaacttagcctcactatgaaagggatcgaaagaattgcttcagagaaaaaatagtgatctaagagaattacttagagatcaattgtaagagctttcaaagaggaagaatactttgttccttctcttaagttaatacaatcctaggggagtaggctattaccatgctcacaaggtcgaacctctttaaaatctggtgttctttttactttatcgatttcgttctcttttaattatattattcaatcgcttagtatttgactcactattgttggctaaaagcgaaatcaacattttagtgctttcattgagagcaaaaacacaagttttttgtcttaagttttgacaggcatacaagattgttgtacaaactcgtagaggccttactgatcaaggtgacccgatggtgatagatcccaacgtgcagactcctagaaacacgaaaggagcactagggacaaatcccgagcaggttaatacacaaccacctactgtgggccatggagtgacttcccctcaggctgggatcataccaggcgtgcaaaagactgggaacaccagttcagcagccgatcaatccactcccaatactgaggtcccatctaccactaatgtttagaggccagttgaagatgatactgaaatccaaaacctcctagcagcccttgggctcatgcaaggtcataataacgctttgcaccatgattaagaggat

SEQ ID NO: 326459 - DNA, 568 bp, Cannabis indica
gaaaaaattagattcaattgtcaactgttcctatcgaaaataacaaataacatcccgaagatcacaatttgtattgttgctaaagaacacggaggacttaacaaaattaattctttgacccgaagccacctcataagtgtgcaaaagctccttaacattgtgtgcttcttcctcagtagctttacaatatatataactatcgtccgcaaaaagcatatgagaaatgactggcgcacctcgagcaatcttacaaccagtgagcaaaccactttgctcataacttcacagcaaactagagaagcattcagcacataaaataaagaggtaaggccataacgaatcaccttaatgcaaaccccgttgagcagcaatagttatattaatttggtgtgaattttacacttttttaatgtataatgttttatttttagtgtaataactttaacaattaatatcaaatatatttcaccaaataaatatattttacttaaaaaaaaattactattttctattatttacattaataacatgaaataattagtttatgatataattataataagaatat

SEQ ID NO: 326460 - DNA, 867 bp, Cannabis indica
ttaaaagtgagaatagaaaacagtttttttgtcatttttaaaaatttaatggtgtttggcacaaattttttaaaaactgtttttttagatttttttcttacgtaaacaaggtttaaggattaaatgagatggcctctaatatttttcgtaattgtatctttataacttttgggtgtctctcccatggttaatgacacactaaggttaagatttccaaagttgaattttttaaactttttgtatatatttttttctagttccatgactcgaagttgcaaggtcccatttggtttagcttctataagatcttttttagcttttagataaaaaaaaatcattctaagagtgtttggataaaaaaaaattcttttggaagaagctaaaatttgtagcttttttaagaatgacttttgagaagctatttttaaaattaaataatttatataattctaataggctgcttctataacgtgtcatccttaaaagggtacgtcaatgcgcctcatatctgtttaaaaattttagttctttttctttttataatcacatatgctataattatgtagatatcttataaaattttaagaattacgaaataatttacaatatacaaatagtttttaaataatctatttcacacacatgtacaataaaaaagtggggcgaccatgactaacatataggagtgcatcaaaaatatatccaatttacttatcttagaccattttcaatggaaaatttaaaatttgtactaaatttagcacaaaaaatgagtttgtgctatagttcgcccactatttacaattgtgctccaatacacaagatgtaaaataaagaaaaaataattgattatattgatgatcattt

SEQ ID NO: 326461 - DNA, 649 bp, Cannabis indica
aattgtaacattaggtatttttgccaccaaaaataaatattaggtatttaagtgtataaaatacggaaacattaagtatttataccgcaatttacccttaaatttatttctacaacacaacataaatttacaactataaatagtaatatgtgtgaatggtatgcaaaaattgcaacttggtagcctcttgcaagcttccgaccacttatacttatgtagtgccacgtaactcaaattactcaattctacgataacataatgtatttatttattttaatgaataattgaaggttaagttgttataatccaagtacaatactgtgttttaattataatcatgtattaattcaagtgtccaacttatatcaattagatcatgattgattatgttgtagtcaaaataacaaaagggtatgtttataaatatgatgggtgtgaaattattgtaataatagccatactctcccaaaatgcaaaaacatgccaataaagttataatataaatgatttcaataacaaattatcattggattagagtagaagacacactaacttttccttttgctagcactacataaagataatgaatagtgcccatcattattcacttagattatttacggcaaaacttttttatattttaattttt

SEQ ID NO: 326462 - DNA, 915 bp, Cannabis indica
atgtggagttgcaagttgatgaagctatagaggtacctactttgaggttagaactacctccaaggaaccagaggacagagcaagaaagaagaaccccttgtagtgaaaatcaccaaacaccatgcactagtagcagccggctaggtcctcctcgcagtactgtaccatctaatcttgaagtttgtacaaaattcaaacctattgtttggacagggaaagacatagaggaaaataatatttacacaacttctcttagttgtacacctttaggagaaatacaagttggcaaattgtacacaaacatgactgaattgaaaaatgttgtgagaaggtttgcattgaaaataaattttgagttcatggtgaagaagtctgacaccgatgtttttttacacaacttgcagggattcatattgcaaatggagggtgagggggaggaaaaaggcacgttgtgacatgtttgaggtcactgtatccacaataaacacacatgtagcctggattctagacatgctgataaccatcaagcagcaccgtgggttgttgtccaccttattaagaataagttcagatcagatggaactaagttcaaggtgaaagacatacagagggatatgttttaggactatggcattaagatgagttatgagaaggtttggaggtgccgggagaatgcacttatgtatgcgaggggtacgccagagaagcttatagtcagctacctggttacttgtacatgctggaacaaaagaatatgggtactattacagacattgtcatagaggacaacatgttcaagtattatttctggtcacaggatgcttgtaggagggatttaagtttttcgtcatgtaattagtattgatggcacgttcttgaagacagggtaagggggcacaatgttagttgttgtag

SEQ ID NO: 326463 - DNA, 825 bp, Cannabis indica
aataattaaaaattaagaaaatatatagagcagaaatttaattataatagtaaaatattaatttatacagttatgctttaataaaatattaaaaaaaatgagagaattaaggagaaaaaaatagctttgaagagatttagaccgccacgtcaccgcctcatacttctcctttatatatatatatataaattctttcctatctttctttttccaaattactgaccttgcttttagccaatgatgctaagtctttaaagcgatgagattatgaataattattaaatgaaattaagtgataaaaacataaaatttatagagcttcgaccttatgagattatggtaatagcctactacccttttatttgtattacttcaaaaaattatcaagatcacaagaagtcgaccaaatgagtttctcaataatccttaagaaaagtttacaattatgtttatagcataataactttcaagagcatatgatttttagatgccaaaataatgaaatgattacactatttatagggaaaaaacatgaattaaatttctcagaacaattatgaataaaaatggaaactaacctagtttcctataatctttctattaacgtgtgtcaatcccataaaaatagggatctaattgagctgtaaatacgaatatatttacgaaaaatatctttgaagattttttcaaaccgtgttatcctgcttggaggatttggcttcattggatggtgggaacctactcgaacagtcgcctacagactctgtttggataatacctcctatgtaaagcccgcttagttaatttggaaattagcagttgttt

SEQ ID NO: 326464 - DNA, 710 bp, Cannabis indica
ttttattttttttttttattaatttccaaattaatcacaaccatttagtagtgatctaatggtaaaaaaaatataaccacgatagttataataaaaatgtaatcattaaaacctcttctatatatataaatatatataatagtagtacttagtatacagtcaaattaagcatgcactattaagcacatgaaaattatgagagttccaattttcagccaataattttccacaagagacaactattttggaaatatttatataaatatatctatatataaaatttataattgttattttgccggagaatgaatattagccataactttatataaaggtgttttcgtttatatatatatggacaaaataatgacaaacggtttgagcaaagtgcgggtgagaatatattgaggaagcataaaagcattttccaaaaccaacaattccattttcctaaatcattttccaaatcaaatcttctataaaataacaataaaaaaatatatatatccaatcaaatcttatataaaagtaaaaattatatatgagtaatgattctaacagtatatttgtatatatttgtaaggatatgattttgtcccctgatataattttacggaatgtattctgtggtacattagatgggtctcagggtacattaaatgagtgtcagtgtacgtttctactttttaaccctaattaccctagatcaa

SEQ ID NO: 326465 - DNA, 917 bp, Cannabis indica
acaccatatgatcccagtataaaattatttaagtacactggtgatggtgaaagacaatttgaatatgtgagcatcattggcagcctttggtatgctactgattgtactagaactaacattgtctatgtcgttagattattatccttgcttactagaagacctagtgtagagcattggaatgctattgagaggatcatgagatacctcgaaagaacattgaccctaccttatcaaaagtttccaactgtacttgaagggtgcagtgatgctgattggaatactttatcagattactcaaaggcaaccagtggctatatttttagcatagctggggagctgtttcatggaagtctaagaaatagactattttggctcaatctacaatggagtctaaaatgattgcactagctactgctagtgaagaagcaagttggctgacaagcctgctagctgagattcctctatgggaaaaatctatttcagcagtgttgatccattccgatagtacgcggctattccaaaagtttagaaccgttattacaacgtaagaggcgacaaatacgtcgtaagcacatcactgttagagagtttttctcaataggagttgttagagtggatcatgtacgcattgatgataacttggctgatcctttgatgaaaggtttagctagagagaaagtccttaaaacattaaaaggaatgggactgttgcccttagattgatgaatcactcgtagtggcaacccgacctatagactggagatcccaagaaataggttcaatgggtaataacaagttatgaagtgataaaagtgacatcaagctataatatacgaaaaaagaagcataaatcctaaaagcgatttaaggctgagtaatagaagctctaatgagatctatactccaagtggagtgga

SEQ ID NO: 326466 - DNA, 1639 bp, Cannabis indica
agccttgtccttacctacacatgcaaacaatatctgtgagtcgacaaactcactaagaaaagcataatcaataatatagtaataacccagattataatcaggtgcccatacacctaactatagccctatctccatgtccaacacgttgctgagtcaagaacgtttgtacgacagtactagtgaccataatatcaacctatactcggtacgctagtcatactctagtcgtaccgatgtgataatgtcgagtagtacagtactatcaaccataatatcaacctatactcggtacgctagttgtactctagtcatacaaatgtgatactgttaagtagtacttaagccaatgtacatttatcgatatccaatataacactaaatatattgataccactataataatgtaatctaatagacttaactaacatgcacgataaatatgtatatacatatacatatcattatactaatcttacctcacttccgaatttaggtgtgccggccaacctgagtagaatagctgcacgacgatttacaggcccctaaatcacattattcgtaaaactgatgagtgacacgctaaatcactttttagggataaaaattcgaaactaaaagtttccctatcgatgaataacatggtaatatcctagggttccctaaaatgcccctaccggtagaccggtttcccaaccggaattccagttctatggggtttcttggggaccaaccaaaattccggttcctacaggtcccactgaaccgatcgacttgttcagtccaggaaacactcaaaatcttttacacacctcaattagattccaaaccgcacaataacttctagatcaccaatatacatcataatgtacataatccatgcaataaaacaacccaacttaaccagaatcaaatccaccattagagagcaaagcttgaattcataaactcaaaccttgctcaatcaccacaacaaccaacaagaacaacttagaacagctcaaataacctcaatatatcatcagaacacaaaatcaaccaactcttaaaaccacagaaccctaattgcaaaaacatgcagaacaacttaacttaaagtttaagaaaccattaaaagagaggctagagagttttaccttaacttgatttacaaaggacttgctagaaatcctaaattgagcagctgaaactcaacctcttgctgggtttcttgaaggctcgagagaaagagggtcaaagagagaacgtagtttatgtgtttttcctcttgatttacttgtataaaagaaaataactcttatcttatctattatcaatctaataacatcagcatacaatctaaaaatgaaacccacaaaaggattaaagaatcctaaggcacaaaatgacccattttgcccccacttataccaaaaagttcctaaaccattttggagtaatttggacatttcacacacctcgaatactcccaacattcccaatatctaactatattgtcccgctagtacaaaaatactaaatgttattttattggccaaatgctacattctaatgttatcgggcacaaaatatgcaaaaatataaaattccatatatgacataaataatacaccctgaattcaaataaatctctataaaatga

SEQ ID NO: 326467 - DNA, 602 bp, Cannabis indica
gataaatacctttgaatagtgttcttttcttcttgaaatttttcgttttagtatgggttttggttttgcctatgatatgaagttgaaggtcaactagattttatctccatcgaaaaggaatagtcacaagtctaactagtcaccacaaaaagaaataaatggatttcaactttagagcttattttcaattaatttattataattaaaaaattaagtcaattatacactcattactgattattttagatgaattagtatttatttcttaaattttatatatatttgatgtgttttttataataatgcagttttgagttttaaacacgataatattatgaattttgtgcacataaacgataatcagatatatgtcaaaatcgagaagcaaaacgtgagccaaagaagctaaaaagaggaactattgctctagatgacatgtagtctggatgtcaggcgacatgtcgcccaacttataaggatgactattttggcacatggacaaaagcgagatcgaaaactccaaagataataaggtcccactacaacaaaaattataattaggggcggacgtattaccggcggaatagatccgcccctaataa

SEQ ID NO: 326468 - DNA, 721 bp, Cannabis indica
tatctctttaattctctccattttttaatttttttattagatttataaatattaatctatctatataaaataaaaaaatataaaataatatatttttgagatgagtgtttactttataataatttttttaataagtaaattaaaattctatatatacaattacaccaaaaaattttttgatcctaataataattattatttaaaaatatggtgaataaatttttaaaaaaatattattacacgaaattttaatatttaataaataaaattattaatactaatatttcattaatattatatattataattattttatttaagttactaatttttttttattataattttaaaaacgaattaaaataatcaggaatagcggctatattacttagttattatttattttagttattatttgttttatgcatataaataatttttaaccatgtcgtcctctctatttatggttattaattatatattattattacatgtaatatttacttataatttatttaggaaagcaataaaaaactattacataattacattgtaaaatgtcacctcaccaccagaaactaacaatactaggtgaatgtacgtgccaagccacgtattgttagtttcatttaagattttggtctttttaagttttgaatgtattttatttttaaagattacaaattttttgtttgaaaaaattaaatatttatatttgaaa

SEQ ID NO: 326469 - DNA, 821 bp, Cannabis indica
tttataattgtttggagttttaaattttatttttatataggaatatgtgtaaatattaatgttatacttgatttttgaaaaatcaaaaaaattaactttacgactttgaccaaaacttacaaaggccaaataagttaggacattctacttggggtgccccatagcacctttaggagactcgaaaatattgaccaaccatttagtgttaagactcacacacccaagtgtgcccaaattagggtttatgggcacgcgcgagcgttttcagcttagagaccttaatccgacaagaaaaccaacaaggacttgacttatttaggcataaaaaaacttgaacttaaacataaagtcaaaattgcacaaggatgtcactcaacaagacataggatgtaacaccctactaggttaggcgtgttatcgtgatttaaaactaactgtgtaatccgttagtaatcaacgggtttgttgtggatgtcaccttttacaatgactaatgctttgatgccatctacggtgcttggttgtctaatagaggagtgtagtcgtttaactattcggccttccctgagacaaaacttccattccttataaggcattgtgagcagcgtttcaatgaagatgctctccagagaatagactttaacttgaatgaagatgagccagtagctgaagaagctacaagggtcgaaggctacaatcctgagcattccgacatacctcctcctacagttgatgcaccagttgtaggcaaggccgaccctgagggtacgcgagctaagcgtgcgcctcgggcccccaaccgctcaggaccccgaaattgt

SEQ ID NO: 326470 - DNA, 566 bp, Cannabis indica
cttgcacataaaggctacaagtgcctatccaaagaaggaagactctacatctctcgagatgtgttatttgatgagtgtacttttccctattctctcaatactaatgtcccatctcatattccccacatccctcacaatacacctgcctttcctaccattatccccactgccacacctactcacctatctcccagcactgcccctgatgttatccctgcacctattgcctctcccagcagttcctccaactctgataatggtcccattactaatattccatttattacaccagttattactaatgattttcctttagttgctgattctaacaggtcagatgccatggctccatctgcccatgctcctcctgttgcccctacagaaccattacttaatgttagcattgagagacaatcaacacagcagcacatcaggggttctgctgcttctgttgctcctagtaccacctccattcctgttccacagcaccatgtcaacaacaattctcatgccatgaaaaccagatccaaatctggtattcgaaagcctaaagttcttatggcttc

SEQ ID NO: 326471 - DNA, 511 bp, Cannabis indica
taggcttaacttaaaaaaaaatcatattttccaaacaaaaatcatattttccaaacaaatgaaccaaattttcccgatcctctctactgttttctccccaattttctctctcgaaatcgcgccatcatctccgacaactaaagtctgcaattcgatctaaaacgtaagcatttcacactgcaaatcaatctcacaaactagaatattcatcgatttctcaacatatatcaacgattgacgacacagctgcaacaacaatcatcatcgctgattgtcttctccagatccagtgagttcgtcaattgattttgatcctcttctcagctgcatgaacctgaaaatcaatgcatatataattgcatagcataaacgaagaatcaaaccgaattatacacagaaacacaacttcgacaacaattgtgaggataatcaaaataggtatatacactaaataatcaaaattatatatgatgattgtaacgtccccgcttcaagcctctattgggccctt

SEQ ID NO: 326472 - DNA, 725 bp, Cannabis indica
gagatggttctggttgatcatttaggttttcgggaggaacctctgtttccccaggttgctcattttcaggaggtccctcagtttctctaggtcattcttcctgagcgctttgagggttctcttaagtagtttcttgtctactggttcgtgagctgcgaggcctgcctcgtggtcttctaactctagggttaggttgattttgagtattgctccccagtgttgccctagctgcggctgcttcacgctccaattcagcattccgctggtttgcctcctccagagagcgcctgagatggcggttttctaatttgacgataggcatgtaccttgtagggtcataagcaccctcatccatgggttgagcaccccgatgattgggttcttcatccctaattctagaattttgttcatttccatgctgagtcctactcgaatctgttgttcgtgtgctagggccaccctaaggttgggtcctcctggaacgagtggtccgagtgcttgggcgaccctcaggttgggtcctcctagagcgagtgatctgtttagactgtgagttggaaggcctcttggagcccattgcctcgtttccaggacggtgaggagtttcttcatgtggtgtgccaacgttctctatgttgtcaaccatgaagaaaattgttttttgtatgtaaggagggttttttctaagctttttcacaaaggctctcaaggaaagcaccaaactg

SEQ ID NO: 326473 - DNA, 578 bp, Cannabis indica
tctacttaattttcttacctcgaatgtagagaaaataacttaattgtgagagtaattaatccttgataaccaagcccttgtatcacataaactttagtttccaaatactaacgttagaaataacacttaaggaataagtaatctaaacttgattctatcacgatgatgataacgtcaagataatgaaagatacaagaagataatggagatggtgactttgtgatagattacagggactagagataatgaattgagagacttgtcttctttgagtgagtgaagatgagagagagagagcttataagtctttggctaactacacccatgtttcttagttatcttcctattaactatggttaaaattataaaatcaattaaataatgagctaaaagtcatttaaaaaatactttgttctttgggagttaatgttattttatttttggtaactttttgtaggtcatatttcagctatttaagcagagtgtttgactttgcttgtagcattggattggattcttaccgtgtctttctttatattttgtttaatctgattgtttagcgattgtaaatgtatttt

SEQ ID NO: 326474 - DNA, 1011 bp, Cannabis indica
tcttatatatggctcaattctctgccatttattccatgtgggacatgcattgtccacaatacgtagcagcgcaacagaaaacagacacagaaaaaataaattatcacagctctctaaaaattcgtggcaaatcaggcaaagaagggtagaaatgaggagatgcatcccttgaaccttattcctggttatcaactgagagttcaccatttgctacagaataaatctatgtttaggaaccgagagtctgcaccacacaactcgggcgtagtcaactttctcaacatcaatcaaggaattgtaaagagtactaaccttgaatcttccattacttggagcagcttgaatcatagaactagaggttgttcccctgaggagtttctttcaatgccaacttggatcaactttagccttgtacacctaaaaatcttgacccttcaagtagaaatattgaacctagttaacccaaagagtatcaggtttagaaaagatatcccaagatagtacttggtaccctaaatataagtacttagttacctaaaatataagtaattggctacccaagatacacatgactacccaaaatacaagtacctaatctacaatataagtaactgtttacccaagatagtacttggttacccaaactatataaaaaatataagtaactagttgccgaagataatgcatggttgccagttacccaaaatataagcatatggttatccaagatagcagttgattctccaaattagtaacgagttatcacatgattagttacaaaaaaaatataagtaacaatatcatgatgataattggttatcaatggtaatatattattttgtgtgcccaaatatagaaaaaaaaaattaagaaaatctcaaaaaaaaaaaaaagtacaatttgtgacaaatctttaaataactactaaaaaataataaaaagaataggtgacattcatatttttatgtaatttttttatttatttatttatttatttatttttttgtcatc

SEQ ID NO: 326475 - DNA, 690 bp, Cannabis indica
tgatgtcccgcccagtacaccacccagggagaatgtaatatttcatcctttgtttttttttttaaaaaaaaattatatcgtattgaagatataatggctgagagatgcattggaataattatcttttacttgatcatgcatcatcactctaccacacatgatacattgaagcagtcttctcttatctaaaggtaatcctggcactctataaattatttttattatttctcaaacatgcatgctatttttataacactcctcatttggcttagttttctctcttgcattgttttacttctaagttgaagtgatttgaattactgtacttgaacaccatcctctaactccaactctaacttctactatctaatggaaacaatataagtaaccacgacaacaataacagcagcaataatagcacgtcaaataaatattaatcgttttacatcatcaaaactaacttttcatactccttccagtactattgattgtgaagcggtaatatatataaatataactaaggggtatggaatgaaaatttattgtgtatttcttaataacagtgtcaattagttgttatgtgtatcacaaatttttgtgaatcttcaaaatagtagttttaactacaaaatattttaactattttatataaattaatagatacatatatatatatatcacaattatata

SEQ ID NO: 326476 - DNA, 993 bp, Cannabis indica
gcctacactagtaccaggaagcgtaataattaaatttaaactctacaagatgaaaatgggggtctggaaggattgggagattggtattgacaaagtcactactgattattttactactctgttttgtgttggtggtatacagttgagcatggttgctaatggtgttaaatgtttagttgatcactctcaaaatgaagacttgttaaagccaattcaagcagaagaagtcaagcaagccttgtttcaaatgcatcctgacaaagcccccgaaacagatggtgtgaggccaagtttttatgaaactcattgggatattgttggcagaaatattattcaatttttctgtgcttttttcgatacatggatcttcccaactagttctaatgataccaatcttgtcttgattcctaagaagaaaagcttcttttctatgagtgatctttgtcccattgctctttgcaatgtgagttataaggtggcttctaaggtgcctactaacaggatgagatgtatcattgataaggttatatcagatactaatcaccgaaaatgaaagaaatcaaatatttctagagctaggaacaaaaattatgttcactaaatgaatcctaaaagaattagaaaccacattaccgcatgcttaataattaaataataaaaaatttgttcactatataagaatgcaacaaacaacacaagcaaatttggtgataagacaaaaataaaaaaagcaattaacaataataatttaccatctattcaaccgcagtacatatattttacagaatctatttcactgcagatgaatatttaagatatttaaatttctctaacatgaatattaattctccattcatcgtagtacagtatatcgcagaacctattttaatatggaagaatatctaagatattcaaatttctctaatagttttataattaataaaaataaataagtcaataacgtacctctagctagcaatcaatgatcaccaa

SEQ ID NO: 326477 - DNA, 617 bp, Cannabis indica
aattaattcttgaggatttatagtagtgttggtctcccattaaattatctttctgtctccaattaaagtttgttttgcaaagcatttataatgctttacgattgaatatttattctgccgcatacatatattttcctttacgattgcaatcgtcagccgcatatatattatgctaattgaatatatatatatatgatgtgctatagaaactttgatatattgaaagtttctttgcaattaaagttttctgccacaagtacgtttactgtttctgcgattaaagtattcttcttcaagttttgtttttttggtttctttaaaagagttatatatatatatatatgttggtttgtctattagagattatatcattatgattataatcgtacagaatattgagagttgtgtgtgtggcttcgcaactgtgagttgagaagtgaaatttttaattttggttttatttattacatatggttgttatctatatgtggtctcattcacttttaattgacactgcttttcatggtgcgatatatatgaattgcttactgtttcgttttttacattattattattattaaaaaaaaataataatagtaataataataataattcag

SEQ ID NO: 326478 - DNA, 723 bp, Cannabis indica
atatattaatatatatattctaagttaatgttacattccaaatttaattaaatgatatttaaatttaatatatatatatatatattctaagttaatgttacattatattagtgtcatatcaactaaaaacttattttaaaaaatgagcggaataatgtagcttatatggtttttatatagttaagtgaaaaaagaattaccaaaaaaaaaaaaattaagaacaaaattcttcaagcatcataattgatcagtgaacaatttaaatttattattgtgttactaattcttttacgtgagcttggtggataaaatgagaaacctaattaattttgtgcagctcggattggcaaattaaactgctacttgcaatttttgggaggtcctacctagtgattttttgtttaaagaaacgaagatatataggaaagagatacagagatcacttaatgataattactacatagtttaatcaattaggttttattaatcatcgtccagatttttaaatttactcatatgtatcacaatatatatatagaagcgctagctcattctttttttttttcttggaagtaatagtatgaatacatatattactattatatatattaaaatatatatattatattaacaatcagatgctttttaatttttattttctttgaaagcacatcatatgcattcatatatagaatgtaactcgaaaattataaaaaaaaaaaa

SEQ ID NO: 326479 - DNA, 877 bp, Cannabis indica
ttcgagtccccaagtaaaatatgttgtaatatataaacgcttaaataaaaaaaaaaattcaataaccagaaagtaaattaaaactttccttattatactttatctcacatatatatatatatatataattgtactagaacaataaaacaaagggcaaaagcattgatgtcaaattacaatatttatggcttgctagctctaataattagatgatgattttagaggggtaggataatgtaatagaaccgcgtgtaagatatttgtatatgaatgcgcagtaaaataaaatgtaggattattacataaacaggaaaaaaaattgtgtactatctttgatttactataaatttagatatgcaaaataaaatgttgggtaattaaaatggatggtccaactttcaagttttataccaactcttttggataattattgaaagaccaaaaaaaggtagggaggttttggacgctagaaagtaccgggcgattctcgtccaaatctgcgtatctgtctcaggctcaggaaagagctcctcactgtgaggtagctctgaaactctagaataagttatggaatagcaaaattttggaacgtcacaaagttctgtggtggtgtatcctttccaatgccctcccggttagagcggtgattggaaaaagattccatattgatgacacaacctgccccttatgtggttgggggaggaaacgtttgaacaccttttcctgtcctgtgatgtggcgtttcatttatggcgctcctctccctggggcatctttccaatttgtgacactggtatccgagtttgggattgggtcaagtttatttgggatctaaacaacagaggggttcgagctgatgatgtgtttttatatgcct

SEQ ID NO: 326480 - DNA, 580 bp, Cannabis indica
attatagtcagaagaagaagtatcttaatactacaaaccattgattagtaattactactactctttttttttaagttctaacaatacccttactttttgatttaataaaagttgcaatcaagggaaggtttttcttcatgattcttaatcccaagaaagaatccttaacttagcaaactccaaaccataaccatggttaagattagaacataagattaaagaaagtgacaatgtcatgggtgtcttgtgagtgacccccctccattctagtctaaggccccacctttcaatgtttttcccttaaacacactaaactacaaaaggcactagaaaatgaactgtcggtggccaatgaaaattaaagctggtttggaaattggatggtgctattaagaacttggatacactccttccaaccactccctctttctctttagtactctctctatatttttgtgatcactagtaaaaagtataatctttttaattctcaaaattatttatattacaccaattaatattagttaaattaaaaaaaagtacagttaaacaaaaataattattttagctattttaatac

SEQ ID NO: 326481 - DNA, 718 bp, Cannabis indica
aaaagatccaagcttgtatgctcgcctcgcagagtagacaaaaaagctacgctgatccaaagcatggggatattgagttccaggttgggaactttgtgtttttcctaataccacctctaaacagagtttggagatttggaaagaaatggaagctaagtcctaggttcatcagtccctttaagatcctagaatgagtaggtcaagtagcctatcggctagctctacctcctgtcttatttggagttcataacctgtttcatatctccatgttgaggaagtacatatcaaactcaatacatgttttgagttatgacgacattgagctttagatggatttatcctatgaagaaaagcctatccaattatcggataagaaggaaaaagtgttgcggaacaagccaattttcttagttaaagtgttgtggaggaacaacaaggttgaagaggtgacttgagagttatagttgcagatgtgggagcagtatcccgagttgtttaggcaaattttgaggatgaaatttatataagaagaggatagttgtaatatctcagaaatctaattttaataattaggtgttaatgcaaattttcgttaacgaatatgagtctattttcgtaataggtttagcacagaaattatcagagatctaagaaagaataacagagatggaaacaataccaggtttttatgtggttttgcagttaactctacatagtc

SEQ ID NO: 326482 - DNA, 1544 bp, Cannabis indica
gtgcctacacgtattcaaaaatagaaattcacaaagaatttgagaagattcgggcaatgaatgttgcggatgcataatatcatgaggaaattggatttgagaaatgggttcggtcgtactttccaagaatatgttacaatgtaatgatgagtaacttgagtgagagattcaacaacacaactaaggacgcaagaatctttccgatcattgcttttgtatcatttctgaggtccaaagtccaatagtcgtttgctacgcgaaaagaaaaaactgacaaatgagcgaagaccctagcatcaaaaatagaggaagacttggcattgcaatttgagaaattaaaagatcatataataaggatatcacttttatttttactaaaccatcacttttattttgctagttataccactcatcttacccattttttaaaaagttggaataattaactgcaccaaaaatgatatctaattgaaacataatttctaataccataaattattggaaagtcctcataaactaataaattacatgctataattataatacatgtcgccacataagaaaaaacttgaattataattactccacttaaagtagtgtctataaaattgacggatcaaaaataaaacattacaaaataactaggaaactaattacattttaattttctttttcaaaaaatcaaacttaaaggtgacctttaattggagagaatgaaatacaataaaatagaaaggaaacaacttttattctatttctttgttcggttttattttcaagtattagaatgtcatttttattctagctatattttcatttattccaaccaaacggcacttaatggagtgtttgttatgtaaatttgaattagagagagtagactcggagggaatataaaactcaggcgtttgaagaaaattacattgtatactaattttactacgtgttgtcggaagaattttgacaacaccaaataaaataaagatttaattatttaataaaaaaagtgcgagcactcaacctaaaacagtgagtattcaaatgaagctacacatacgaatggaaaagaaatgaaaacaatgaacacaagaaagtatagtagttcagtcagatcacggtctgcttagtccactattgcaaggatttttgtcttgttctattcatattggatcactcctttatatacaaagcaagtgtccatttaattacacagaacttaattaattattgaaccatcttacattgaatattatcattaaattaagaaaaacgtaaatggaataaatgaagaacattttaatctgttttactaaatacagcaacgtatgcgactttcatagtgtaagttgtatgttcatctactcgcacgagctcacaggcttagggtgtgttctgttaaaacaagactaatgggtctcgtgctttgcatcctgatcgagtcgcgtatatggatacatcgtcagcgtcgataacctaggacatgcgagtccttatcgggtcgtcgagcatgttaggtcattcggaccaactcgctatgtaaagaa

SEQ ID NO: 326483 - DNA, 588 bp, Cannabis indica
gaaattttaatatttagtataagaattttggaattaataataaagctattttttgttggaaagtgatggtgtaatcacatgcaggagtttaggtcaattgatttctcttaaccattttttttcgttaataatgtttaggcattcttagtgggaggacgttattatttgcttacgtgtcacaataattatttaagtaacgttaaaattgtaattagtttccttatcaagtatattaatgtaaaatcttttttgtttttttgttatgttatcagttatcacaattttataattcctaatttttttttcaattttgtcaattattcaaaatactgattattttttttttattttttacaaaatacaattttttttagcaaaataaataaataaataataactaaggcaacgaaaaaccgactacatactaaccccactgtaatatgttgagtcaactcaaaatatggcattttacaattttatatacaatattttaattaattattaaatatgtgcaaaaaaatttattatcattttctcatacatttttatatataattatttttttttcaatttttgttataatatata

SEQ ID NO: 326484 - DNA, 1798 bp, Cannabis indica
cataacaactccatgaacgtcacagataccatgccatgccacagaactaccttccaagtctaaagacgcatcaatattgatctttaaacaactcgtaaaaggaggtgcccaacaatgctcaataggaggagaggaaataggcatgacatcccaagagatctctgacaactaatctcattggaacccaaaaaaggcttttggtaatcactcaggaaatcacgagcccaattaaccaccaactcaggagacatcaaatagttattatgtaccattttatttctcttataccagaatcttcacatgataacaagggctaactccacttgagaattaggcataggatccaaaaatagataaataaaactaataaaattagtacaagtgacaaaagaatctccaaggttaaactcacaaagtttccaacattgagaaagagaagaacatccccacaaagtatgatgagtagtctcctcctaggagtcacataaaagacaaaggccatcagtaagcataccatgcatattcaaattaaacttggatggaatccaattatttgaaatctaccaagcgaacatttttactttggggccactaaatttactttgaaatctgccatgctatttcatattttttaactaattaaatatattttaaaatagtttttgaatacttcagtaattaaataacatgcagcccattaaaatatagtcacgtgtctcttagttggtacttaacgaacctaagtgacatttaacagcgaaaaggaattgggtgcaatgaaatcatcacggatgggagttttgccgccactttttctgattggggtcattgttggttttatggtactaaattaggtacacaacggaagaattttgtattactgattatcattgtatcataacccaatagatctccaaatgtgtgtacattaaatcaaaacataaaaatacaagtttagaacatatacctcttgaagactatcagagtatccttgaaacttcttgtatgttgtatccttaatccaaatgatggggatgatgcaattgaactcacactagtgtcttccaaatcggttcaccacacacaagaactagtgtgggctatttggataaagtatataatgttgttcttgttgagttctcaacacatgggcaagaacaattgagagaaaaacaattttctctctctctctctctcaaaaataggcatgtcaaagtgtgtatctaatttatcaaatcaggcttctatttataatagttaaaacactttaattaaattatatttaattatttaaaaaataaatatctatagctgaattcgattactgatatttatgagagaatctctcaaaaaatgggtgtaagttcatgcgtgctgtgctggcccgacccgtatttatccgtacttttcaaaaaatgggtcgttccatgccacagaaaaatgtaggttgtgtcgtgtccagtcctggtcgtgtcgtgccatcatttttaaagggtaggcccggtattttcgtgtcgtgtttggacgtgccgtgccttacttgtgccgacccgtatttcttaaataggccaacccattttcatatccaggcttaaattcgtgctttactttttcatatttttttttaccagtactaaattatatgtatatttcaaagttgtagttatatttatataacttttgaataatattttacagataatcatataaaaaattattaacatcattagaatttgaatatttacctataaatactcaaatttttatatcacaccctataaataaattagtatataat

SEQ ID NO: 326485 - DNA, 869 bp, Cannabis indica
aatagagtttaaattaataaaaagaaaccattaaaaaaataaaatgaaaatttaatttaaataaatctttaagtatataattgggctgggtgaagtaaattatcaaaaaaaaatttaaaagggtgtcgcgggattcgaaccaacatgcgttaattaatcaacttgtggacaattcttgctcatagtacatttaagtttaattaaataaaaatgtaatggagccttttaatttttattttgggaccctcaaaaagtgagtcctaggcacgagcctagctcgcttataccaacactcggcccgagattacatcatatgtaatataacacacacatatatataatatcatgatgaaatagaagaagaatagaaacactcactcacaactttgagtgttgtttagtgggaactaccatgatttgaatattgtataacacttttgtctaaaagcttatttctcctatctctaagcataaaggagaactcataggaatagctttgggaatattcaacccttaaagttttatagtgtttacaaagattttcggaaactaataaaatagagcttaagaaaggaataaaataataaatagaagataggttatttttcacgtgattcgggggttaataatctctgatccaagagtccgttgtattggccttacaggtgagtgtttaagtaatacaagtgtttacaatataaaccctagctctgcactccttttatttctcttaatgaagaagaaagctagtagaaattttaacaaaagtgttagaaatattttaccaggatctagatttactaccaagtatgttttattaacatcctaatatgaattctaaaacaatgaaataaacacataagagttta

SEQ ID NO: 326486 - DNA, 469 bp, Cannabis indica
aaataataataataaaaaaaaacttgttttgtatatgtgtaaagcttcttgtttgtttattaaatttttttgactaaattatgataacagcacaactcagccaataacaccaaataatcattaataagatttactgatttagacccaatggaactgtatatttaacttggtgataatgaaaagagtaattactttttaaatttttatatatctttattcatatttagatttgaaagcagttggattttttttttgttaatattttgcactttcttttcctttggatactttacagacatagcttcttgtagttcttttttttttttgacaaaacattgtcttgtagttgatataaataatatttattagtatttcttgaaaagaaaaacggtcacagtaaaaaaattaatacttttagtaataattttttagttataatataaattttttatgactaaatatgattttt

SEQ ID NO: 326487 - DNA, 557 bp, Cannabis indica
aatttaatattcagtacttcacatttaatattgagtcttacacaatattatcactattcactagaagtctcaatttctaagtagacttataaaataatttagaacgaataagaaattaagaattaaaaaaaaaaaagatggatacgcatttgaaaattttagtattgccaccataccattgacatatttatttgggttcttttagattatcaagttgacttccacagaacacttactttatcttgcaacatgacttaattaatcccccaaatattttcaatattaatccagaatcatgttatatatggagaataagaatctttagttgaattgaagtatttcttaatctggaaagtcttttaggaagaaaaaggggatagaactagcaaatttaatggtaccaaaaatgttttattttggtcataaaatatgctatagtctctatttccaagccaaaaatgaaaagagattaaatcacctgaaatctgcacatgtagaaatcatccccatagaaagcccttaacccatccaagaaactcatctcaggtttcctggga

SEQ ID NO: 326488 - DNA, 486 bp, Cannabis indica
ttcactgacaacaactaagcctcaatataaataaaataccatttaaaattgagatacactatagtacttaacatgataataataataataatattacacgtcacaatatactaaaccataagtattctttatcatttctctttaaaataggtacatcattatttttttcatattaataaggtgattgtgctggtgcagacaatttatattgatcttattttactatttcgtttatattgatcgtctgggttgtgttctccctaaaattgctgaggtaattgatatcaaggaagcgttgagttggatcaagggtaaaccttgggagaaggtggttgttgagtctgacactctagttgttgtccaagcaataactagtactactcatatgtagggctgaacatcgggcgggtttaccgggttttgggttggcgggtttcgggttcacgggtttcgggtccaaaaattgaaaccgaacccggacccgaa

SEQ ID NO: 326489 - DNA, 539 bp, Cannabis indica
ttagcttatccaactcaaaacctccttcattcccattgcctcaacttcatgtggctaaagtgcaccaaacttgcacacggttttggcatggataaccacaccagatgtagcccgagccaccagaccaactccatactgattctccatagaaaaaactgctccacccacgtttactttgatgattagaaactcaggggccttccatttatcagaccgaggctcatggtagtccttgggagtgtcctcaacagctttttgtgcattaaaccagtccacataattaatcttagcaagttgaattacctcatccatcataggaattttatcgttccataccacatcatttctagtattccaaatgggctaaagaatcatggctgcttcagcactctctccttcactccaagaactcaattgcaaaatattatcttattatggtgtcaaatgagaaaaaaaaatcgtctgtcccatccctgtccctctaataaataaatgccacatgttaactttatgctctctcactcatctgttaacttttt

SEQ ID NO: 326490 - DNA, 1053 bp, Cannabis indica
atattatactaattttgctcatgtcacttcaaaatactctccatgtgattctcttatgtcaaagtattttgggtacaatacatataaaaataggtatattttaattaaatataaaattaaaagtaaatttgattaattgattaatgaaagtggtatttttcaacttcccctatttttttttttaaaaaacttttgttttaccttttattttactacgtgtctctctagggagactcttattcattcttattgtataaaaatgtgtaaaattatatgatgtaatgtgacatttttttttattaaaaatacatttttttctctctcttagagcatgaccggtgctaattatattcaaagtagctaaaatggtcttattttttatttttgaccaattaaatttaagaaaaatatgtataaaaaattgggctacggtgttgtcagtagctacctttttcaaatatttacgtaattaagccttccacctcaccaagttcaccccaccacactgacaagctattcttcaaattatgattttcactcaaagattttccctgattatgactttcacctaaatatttttcctagttgaagaacaaatgttacaaatctaaatattatccagtatattccaatacatttcaaattttttttcagttttttattttattttttttatataacatatcgaaataaatatattctactattaatgtaatccattattataaaaaattatgtatcattatcaaaatattataaatattttaactaaacaaaaactgcttaatttatagcatgttgaacactcaaaattactcatccaatccatgcgggactaagaaaaagagaataaaaagactaatgtttaattattttgcaaaactaaaatgtcatgcatgtaagtaacaacttaaatactttggagttattgaccacactttctgatatctttatattaggtaactaatttgtatttcgcgcatttgttcttttatagttattctaatttttaggttgttaattttggtgtcaaaattattaacataatataaa

SEQ ID NO: 326491 - DNA, 1433 bp, Cannabis indica
ttttttaatattaatattatgtggactaataaaatcatgctacaggtacaaagtgatagatttatttagtatttaatagctaaaattaacggaagaaatactgacaaaataattgtataagttaaaaactttagtcataatttttccaacttaaaagttgatttaatagtgctaaacttaaatgttcaagaatttgaccacaaattaccttaattaaattagcacctctccctagactatctactacacaccaaccatcatattttcacatgctatgtttttgttaagagtattgttatgaggcactagtagtacttgatactagtggtatctagtaccttctagacatgtcaattgattaacgatactctctaaaagttattatattaaactatatgagacttaatatttaattgtacaaatagcgatattaatacataagaggatactaggtactattagtgtcttttagtatttatcttatgttaaatcgagacaataaagttctctttagtcagccatttgtgggtcctacttaggtaactttattattattattaattagtttaaaataaagcaattaattcgaggtgtaattcttctttattagtatagtagatgcatgtgtgtctaaatcagttatatatatatatatactagtcattaattaagtgttaaataaatggtcacgtactcacgtgacattcccttattagtctagtcactaaatttttattttttatttaaaaatttatttaaatatatcaataagaaaatatcacgtgaataatgatgatttgacacggtcaagtacctacagaaatattagaaatataacttatacattattacggtcaaatattaaacttatatttatctgtagttaaatttaaatatatacgtctcaaattactctattattaaatcaataataatatagttgaaaagttaaatgcattatatattatttatttatttacattggtggagctagttttcgaagttaaacaattttttctaagaattactactaaattatgtttatgtgatattatatatatatatatactagtaaaaagttacgtgcgaggcacgtatactaaattttatgctagtttttttctacgttattaaaaagtgatacaattaaaaattaaaaaaaatattattagttattaggttcaacatcattaccctgtgttcatttttaagaaaaaaaaatatttatgaaataataatttgttgcaacgcgagtacaggcaaaattcagaaaatatagcatttattagtagagtattgacaatttcaacagtaaattaactgattgtatacttttttgtctgctaacattaagcttttgatatttgagtggtgaactcttatttgtccgcttttcaaatttttctaacactctcattttattcttccaactt

SEQ ID NO: 326492 - DNA, 963 bp, Cannabis indica
aaattttcttagaaaaaaataaaaaaaatatatacatgagttagaaaaaattatgaaaataaaatcaaaataagtattaaaattaacataaaataatgtgagaaaaaaaatttaaaaaaatattaagagtaatttttaaaaattatttaagtttatattttttttaataatggggtgtatttataattttatgggtttcaaatataactctttattaatgataattactttttatacttttaataaaaatattaaattttgtaaatatatagtttttggtcaaatatagaataatttttacatatatctaaaaatatatctgatatttaattttggcataattttataccataaatgttggatatatttcagattgtaaaattaattaaatatagttgatgaatgatagaaaagtttgataccattttgaattttgtttaaatgatagtaataaaaaaaatccaaattatgtttctacatccaaatataataatatatatataggcttctaaatcttaaaaaataaactcataaaaatatacttcaatatactctatgaagggataaatgacaatgttgaagtcacagcataatattatagtttggttgttgttcatcgcattcaccacaataactactgtttcattaatctcttgcaaaaataatggtgatgacatcattaacttagaattaatccatcgagactcgccaaaatctccattctattcttcttcacaaacccattggcaacgcttatccatggcccttgaacgatccacccaccgcaccaaccacttgatcttaaccaaaaagaagaacaaaaacaacatcagtactactactactactacaactactagtgccggccaatctgagttattccccagcagaggagaatatctaatcaacatctctataggtacacctcctttcccaattctagccattgctgacacaggaagc

SEQ ID NO: 326493 - DNA, 326 bp, Cannabis indica
acaagttaaacaagagtctttccaagttttgaaagcttcccaagtcaatttcttcaactgctgaagtcttcacaactttcatgagaatcattggttcagttaaggaatcactaaggaaaatcattggttctagccgggattgatgaggcactgttttgatttggtaattttatttgtttttgctgtgtattgttcatacttgttattgtattttgttcatatattttatttaaattatacttgtatttttgttaaattacttattctgtattactttgctattaatttttttttgagatactttgctattaattataattaattat

SEQ ID NO: 326494 - DNA, 1885 bp, Cannabis indica
tatcactaactaatcgcaagatgtcacatctaagtagtactatacgccacagttaccaataacgataatctaaattatagtacgtggaccatgtttatatgcagacccagtaggtcacgggtatatccatacctggatcctagcctataaatagcatcatactctcatgcaagaggggagaaagtttattactcgaatacaatagtaaaaagactagggttcgataaacttagcgatgaacatggtgtaatacttgaaggctatttagtcctaatacaactgactcgttgaataattcgttaaaacaacctgtctctatttctgttactttatttattttcttaacctcttaatttattgatattgagtttctaaaaatttaagttaaacaataataatattttaaattaatactttaaaataaaaaaaaaaagaaagcaaagaaacacatattatatttattaaggtagttaaaggtaataatttaatttaattaattttttggactataatttaattttttatatatatttctacatcaatttgattattggttctaatatataaaataataatttatattatatgtaaaaattgaataatatttttcgaatatttattagtattattattattattattgggaaagagtctgttattataataatatttttcttatattttatgaacattaatgaattagttttgggttggaccacattttatttattttatgtgggtatgatatgtggtaaagcctatattattgccacgttggtaatggtgtgtcgattgagagaaattaggtgccaaattatgtgtgtgtaaacaaaaacatctatacatatttgagtttgtaagtggtataaattaaatgatttttttagcggtataaataccaaatattaataaaagtgtaattttctttcagtttcataaatacaaattttgttagtgtcttaaatagtcgagattttaagtaattgaatttggacagaaaaatgaaatatgagctacgttcaaacctgtttttcataaatttaaaatagagtctgattagataaaattggatgaaaattatatttttataaagcatttggtttataattaaattaaaaaatcaatattaattaaattttgtatttgaaaaataaaaatatgcttataattacttttgttttttatttttataaccaaaaataaaaaggtactttgtaaatttaattttttttttcaacttttatttaaatcaggtgtgggtctggggttcggggtttgtgatcctagtatggggtcagatatatttctagggttcgggtccaaagtcgaggtcatatctgactttcgataataaataaataatgtcagaaaaagaattaataaaaagaatttgaaccaatcaactatttttttattatattataatagatgatatgtatatattattgtcggcaagagtaagaaataaatgttgtagttggtatggtatgattgatgcaggaccatttctaaactatttttttttttattattaaaaagaaaaataatcatgataatattgcaatggtgatcatgtcctcaccaagctatacttaatcaataatattgtactaggtaggtacaggtagtttgttattattaataaaataataataaaaaagtaagataacaaatctgagcccctaaaaaaaaaaaaaacaacctgttctgtttaaagaaaaataataattgacatgaataaaacaccatataactctgaacacatagggcacaaatatcatgatctaattgctaaaattaatataatactacaaaaaaaattagtcacaacaaaatttataattaaaagtaaaaaaaaaattgtgactaattataaaatatcatt

SEQ ID NO: 326495 - DNA, 1485 bp, Cannabis indica
gcataaaacccaacatgagcttggtcattttgcacataatgacgtaggtggggattatttttccttatcatgaattcaatctcccttttcaaatgcagacactcgtttgtgtaatggtcgaagtcattgtataatcggcagaacttggaggtgttcctctttctaatgtctttcttgatgggaggaggcttcttgtacgtgacaactgtttaagtagccatgtaaattgtcttaggattttttggttaggagggtgaagcatgtgtatttctcctcattctccctttggtattgtggtgcaggggaagtgttgaacttccttttttggccacaatcttggctagaattatgttgaagtttgtctccattattcttactgctagaggtttggtcggtattgatcgtgctggcctacatgttggctagggcttggggttgaatgaaaccctgagcctgtccactagtgatttgcctccctgtttgggcttgccggtcagcttcttccaactttatgaagccatcagctccctcgaggaactctttcatattgttttttgacatcctcatgatatctatccaaaattcacctcctgatatctttccaaaattcacttaatggtaagatacctccaagtatggtcgtgtaacgaccttcttctgttaggcctttgaccttactggcctcgaccgtgaacctttgaatgcagtctttcaaaggttcaccttgtctttgttttatctcaaccaggtcttcaagctatgatgatatttgtctcaaggatgagaattggacagaattctcgagagaattcattctaagagttgaacctcccggagctagcttgaaataccattgctgggctatctcagacaaggttgtcgggaagatctgatatcacacatctctagttactttttggatatatgtttgcatctcaaagtactttatgtgtgctaagggatcttctttttcagtgcacatcttccatactaacatcttgaacttatgtaggggcagtgcattaatgtctgctgagaatgttgacccccttaacctgtccagttccaaatctgacagctttgaactagataggccttttatcatgtctttgatttgatccaactgtgcttgcacaaatggatctgctccggtgggctcttggccaaacaacctttcttggtcaggatgatgcccttggctgaccagccatagattgggcaattggctttgaccggccagccctagattggacaatcctaggccggttaccctcctttagctgaccaaactggccagaatccctttgctggccaggtcagtctgtaagttaataggaggttggttgtaccaattgcttgggtttggtgggtccacctatctagaattatttttcagaggtggaacgaagtcacttaagttcttgttcctcgagttattattgtcctgtgcattattacttatcctaggacctagcctatcaaaaa

SEQ ID NO: 326496 - DNA, 895 bp, Cannabis indica
taatcttcttctattttaaatctgcacaaataaaagataacaagcgtaaaaatactccaaacacgattaaaactcattaaaaaatatactaaatttaatctaaaattaatactaaaaataacctaacattagctattttattttctctaaaaatatcactttgaaaaagaaaatactatatgtaatacacaaaatgatgtaatattagacctttctaagatttgtaaaccaattaaaatgatgttttaacttttattcaaaacatgagaaatattatgtggaaaaatatgaggggaaggattggtatgtctttgttgactttctagtattttcattttgggagcattagttgacttgctgttaataataaattatagttataattattttttttaagaagaataataataattattattataaatggtgttttgaaatattttttttattttttttattagaatattttttttatttttctaaaacactttttttaacttttttttttaagaaatgtcatcatcatccgaaggtttgatttttcttgaatttttatgaaatttaaggtaaaattcccttaacagtggaaacgcgtctttcttattgagaataccccacttaaaatcaattggtgggacaatattcacaacatttctacatcatggtcaaatgaattataaagtagcggacccagaatttaaagtgaggggggcataaataaatttaaaaagaaaatataaagtgtagttagtgggatttgaacctttaccctctaacctatttaaccattacaccaaggttactattatatctataggtatcatcttttaatataaatatatgttgtaactaagtaaaatacatatgcaccttgtttttcggtagcccatctcga

SEQ ID NO: 326497 - DNA, 578 bp, Cannabis indica
tgactccaccactgatatactaaatttgatattgcccgtataacaaaatgattccaactttggtgctgattcaattacaactgtcatttcatctgtaaacgggttattcaactcaaaacgtttcaattgcttactcgagatcttaatgtgattcatccctaacccataccaattgctcaaagttaaattctcaaggagaggaagatttgaaataagatattctaatgatgacgactcttccggaccccaatcacaattcaatgaaagatttctaattgtcttgcacaccgagcgatttattgtgccaaagtaaacaccaaatagttccaaagattcaagatttgccactctaatttgctccactatatccttagtaagttgaatttgcaagaacttgagactgaaactatttatattgagctgatgatcagttctcaaactacaacaatctaaccgaaacttctcaagtgaaggggaacctaacaacaacttatctaacacatcattatcagcaagcctaacaagatccattgacaatgattccaaacatggaaaactaaatgagtaacgagaattca

SEQ ID NO: 326498 - DNA, 806 bp, Cannabis indica
agtaacgagaattcaactccaccttacccaactccaaaatagttaaatgcattgcgtttactactagtgttttaggtaagcagtagtagtaataatcgaagcagcgaagatcgcgattccattcggtttccttgctaaagcttaaacttattttcttgactttattctgaaccgcaaaagcaaaccatttatctatgcgatgagcaatacttctagcatagctatgaatctgaagcttaaaactagttatgacagaatcacccataaaaaacatacctctcttacggcgttccaaactagtgtccacataatcgcagaacctatcatagtgccatggcaatctagcatgtttagtatctaagaaagagagtgttgggactgaataccacatgagtttccaacgctttgaaagaagactagtcggaaccaaatccttactaggaagaaacgagaggatgtgtagaataatcgcatcaggtagtttcgaaattctgtcctcgtcttcaaccttattgctcgatgatgttgctttaactctttttctcgccggaagaagatcgttttcttccacgctctttttagccataaaacttgaaaacgatgatgatgattgttgactgtaacaacaaaagatatttaatttaaataaaaaaaataataaaaacttagagaaaccgcttcctgtaaagctagattataaaatttcaagaatttacgtacggctcatccagaagagatgaatttctaatatgttaaatatacatttatatatatatgtatatgtattgggaaaaaaaaaaaaaaaa

SEQ ID NO: 326499 - DNA, 745 bp, Cannabis indica
ccaaataaatgttaaggtacaaagtgattttccaatttttcaagtaaaagtagttaaatagattagaatgtcaagtatttctcaaaaaaaaaaaaaaaaagaaaaaaaaagagaaaaaaaaacaaacaaacaaaaaagaaaatgatgatgaagaagaagaatgtcaaagtatgcctaatacctcaaaaagctgtcttttgttcagaatttttaagaaatgttgtattgtatagtcatgatcaattatttacttaattatttaaatgaaaaaaaaaataaatccattttactaagcaaccacaacaaaacaaagtgcgtcctacttgtatttgtacttaaatgccacgtacggaataaaaatgataggattccgttgttacatcgtattatattatatattattatattgaattatattttatgtaatatttttttatgtaaaattatatgtgatattaatttttatgaacacctaaatatataatattttagtataaattaaaatttaacatagtcttatgtaaaaatataatgtataatttaattcaatataatacaatataatacgacttaatacgaatatgatgttccaaacgagttcatattattaattattgcaaacaaataaaataataattctgccaaattcagtatacattgttttgtggtcgatatatcaaaaagtgttggggtttttcttttttacactttaaattaattttttttaaaattttatttttacaaa

SEQ ID NO: 326500 - DNA, 499 bp, Cannabis indica
aaaccaaaaattcaagttatatatgcacactttatatagaatatatatatatattatatatatatatttttattttaaaaccacttgctttgtagtatttttttttaatagaaaatctcaaatacaaactaacaactcaaaggcaaatctgctaacaaactaagagttgcacaagaaggtaaatcatttgtccaaattttagacaattgagtcactctagcccctagttaaactattagccactttattacaatttctaaaataaaaaaacaaagtctatagaattgaatttgttgctcatcatgaggatattttgcaccagaaggccccaatccgtatggattcaatccctattctccaaagttttcactacggtttgacagtcagcactaacacagctcccactctctcttcctctcctacaaattaatgtttacagaaaaaaaaattaaggtgccgtttggtaacacttttgctttttaatttttaaatcacaaaa

SEQ ID NO: 326501 - DNA, 614 bp, Cannabis indica
tcttcttctttcttctcatctactttatattattttataacacacatctttttttagcggattaaacaccaaatgttagtttccatccatttacgttactattattctattaaatgttaagtgtgttcactaatgtaacacatgtgatatttttattggtctatccatattaatttaaataaatatttagatattattcaaataaataataattattaaaaaaaattataaaaatttaaaaatataattaattaccttcttaaatctaaaatatgacaattaatccccatcataattttttctaactaccaataatcaaattacataatcttttgaactcatatttaaacaacaaaaataatttgatttaaacaatattacacaataacaatcacatagatccactctcttaaaaaaaaactccaccacaccaccttaaactcagatctgagcatataatctataacaaaaaattaaaaattacacatttaacatcaatgaaacctgcaaaaacaaatctaatagaggatgagatgaacagagaaagagggtgtaagatcaggagagacaacgaagttcatgagagagagagagagagagagagaggaggggag

SEQ ID NO: 326502 - DNA, 932 bp, Cannabis indica
acaacaaaataattaagaataattattaaaaaggatataagtaatgattatttgaatttattaaatcaattttagataagatagatatagagatatagttcttacataaatggttggttagttgtgaaatctgaggtcggtgaggttgaaaggccataacccatcatttgcaaggaggacgcggagtcaatattaagaataccgttacttatatgatcatctgtttggaggtgatgaccaagagatttttgatcttgaaaaatgttattacaagagtgatcatcatgaattttagtctcatccccagacgaagaagatgaccttgtcatcttgatgtcaagcaaatcgtggctaataatattattcggccatccaaaacttcccatggaacaaggcaacgcggccgccgccgaaaacacgcttctcgatgggttccaccagttcccgccaccgcaaatccctccctgaatttgaaactcctccgccatagctaataattaactagctatgtatactacttatatgtcaacaataaacaaattcttatatatctatatatatagcttttgttggtagcaagtagtaagtagtgttggatccgtgagctgagcaaaggatgttgtgtttaattgtattgcttctctctactatatattttttgagtcacgtattatatatatagagagatatagatagagatagaatgagtatataagtttgggatttaaaaattatatatgaaggggttcgagtacggagagtgcaaacttcataacaagtatccggttgacaattctatggtgattataatttgacaaatgagaagagaagagagagatattatatattttaatataagacatgtatttggaatcgaattttctttgcctttcgttttttttttttttttattttttactttttattattat

SEQ ID NO: 326503 - DNA, 712 bp, Cannabis indica
atattgtgtaattgcacccataaatccaatttcaatagtggtatattcctgggattctctccatgcttaactcgttcaaatatcagtggtgccggatcaaacgtccaaggactcccctttataactttctatatcaacttcatgataaaattggaataggaagagatttggatcaagttctttcacatacaaacccctccctagctgccaaaagtgtagcgattttattttgcatagcctgaaaatcaatggctcaattggtcaaaaaacgtcctaccagcaaccacatatcatcgatttttgctaaaccatcagcccctacctcaaaaataagaccctcttcatcatcatcgtaaatcgaaaacaacgcatattattcttccattctgagcagaaatgaagacacacaacaaggcaaaactatccaacaaacacagacttatcaaaacctccttaaacaacacaaacaaaactcacatccgctgcaaaattagctaaccatgtcacaagacaagactccaaaataactctatctacatctgaccctaataatgttatatatatgaagaaagcccaaaaaataaaatacatttaggcctcgtttggtacgtcgtataagggtcgtattgtattaaataataaataatactatgtttggataaagcaatatattgtattaattactacgaccaaaatttttaatacaatgtat

SEQ ID NO: 326504 - DNA, 555 bp, Cannabis indica
tttaacatttctcataaataaataagtaaaaagaaaagggtttgggctagtcttatttcttaacaaggaagatatcctccctaaataatactacaaataaatggcagatttaattttgggaacttacaaaaaatactagaatttaagttattttttataaaaatactaccatatagaaattttttcaaaaatactatctctttataaaataaccgtaaaacataaaacagaacaattaaaaataacaatagaacaactgagaaactttaacacagtacatattataaaaaatacacagtatttttgaaaaaaaaaatctgcacccatagcaaaaaagaaaagaagtgaaaaatttcagtatgtgatgtaaaaatccctttaattgtaccaattttttatggcattttatcatttttaaacatttttatgggcttaggtttaccataaaggtttgaaatgcaaaatgactataaatttaaaaactaagtacagaaattagctaataaaaattttaaaaatacatttaacacattaattttttagtattacatatta

SEQ ID NO: 326505 - DNA, 1761 bp, Cannabis indica
ttttttttttttgaaaaggtgtttttagtttaattagaatgtataaaacgatcttgaaatgtccaaattaagggattcttgtatcaaaaattagcaccattcaaggttttgggttcatcacctcttggaatgaataaatgcccaaatatatgggttttagtttcctatacacttctccttttgcttctttttttttatcttttttttttcttgtcacaaacatataattccttataaaaagatttatcattgcaacaaaaataattatttataattaaaataaatatttgattacaaattgttattaatataattttttttaacaagaatgttactaatattgttacaatttattgtatatagtcatttaaaatttgttgtgactaaaaacactagtggcaacaaatttatttttgtaacaagttttgttgtaactgaatttaaaatttttgataatgataaatacctatacttatattaacattacggttatttattgtcaacttttctaatttttattgttgcagttaataaaaaataatttaattataaattatgttacttacatttattaatccaaagagaggatatttttaataaaaaaaacaacaatattgaaaggattttaaaggtttttttttttttattttttagaaaaatcagaggaggagaattcaaaacttggtaggagaggtgtgaaaccgactatgcccacttttttttttttttaatgtgctatgcccacttatttataaactattgacataacctaagggtaaaataaagtagggtgattctacaatgcacctatttaaaagagatgtattgatgcacaattaatttattttggcattacaaaaaaataatttaatctcaatttttttttatattcatgtacgttataactatttaagatatcctacaaatttttgagaaattcggaataatttacaatatagaaaataatgttcaaacagtcgattttacacacgtataaaataaaatagtcacgcgtgtaatacctgtttgaacataattttcaacgtgttaaacttttctaaatttcttaaaattttgcaggatgtcttaaataactataacgtgcatgaccatgagaaaaaatttgactaaaaaattatttcggatgctaaaacagataggagtgtatcaatatatccattttaaaggagtgcattgtagaattttccaataaagtataactacccgagttgtaatgagttcctaaaagtatgaaaaaaatcgcctaaactcaaaaacaaaatggatctgaggccccgggtggaggccgaggcgagtaaaaaaggtatgaaagccaaactacttttaattaagggtaagcgagactcaaacccagcaaacaaccaacttgtcaagaaatgggacagtgcccttatgcgagccagcaccccttttgaatagaataaaactaattatataaatacaatttctaagttaagttaaggggttaatatttttacttagatataactttttttacttattaatacacttattgacaatattttacttagtcacactatattttactagtgctgcaaaatggaacaacattaataggattttttaaagttttttttggaagatgatgtcctacaaggtcattaaccggcccactacacagaatttcaggcccatttcaggcccaatccaagcatctcatcaaccttttttttttgaaacttacaaaatactaaaatttgggttaatttttacaaaata

SEQ ID NO: 326506 - DNA, 1954 bp, Cannabis indica
gtctagtttgtccatttgttgtcagactgtccttttctccgtttgtcattttgttggtttgtccttttgttgttagagtatccttttgtgtgtttgtttgcttgtaggaaatttctaagaagtttcctattttgtatcctacctcatgtaaatggctatatatagagccatccttttcattgtaaggacatcagaaaactttctactaaataaatttctagtgttcttctctcaaaatgttcttctaaattttctttaagagatttctgaaatagtgatagtgtgcattatgggtcgtactgaatatgtattactgttatgagttaggtatcactcaaataaaggtaactaagcaatctattcttcataatcgtaagtcacgctgcagagtcgtaaatcgtgctgattcttgtgtcgatagatgttaattttattttagttttttagttagactgagtgcatgaatgtgtagtgtacatttgttccaggggatgaagtcaagctgcgtgactggtcaagctttcaactataattaaattggctcaataaataatttattgctatcttagggctgctaataaatatagaaataaataatgcttatctttttttattaaaatctgtagttattacttccaatagaaccggttgtaactggtcaaaaaaattcatttttggtgcatgctgaatagtaagacaaaataagttctctatatataaaaataaataaataaataaagaaaatttatagagataagagtaaggagtaagtccaatcttcaacgagtccttaatttattttttcaaaacataataaggttgatttttcaaccttagaaaacattccgaatgatgcccgacatcttccaaatccaaagaaggtgttagcgtcgtagtactcactatgagtgttattggtcaaagtggtcaaatcactaaggatagagttcgataattatacgtgttatttatttgtgattgcataaagcaataaggttgatttttcaacttcgaagacgtttcaaatgatgcccaacatcttccgaaccttgaagtggtgttagcttatgagtgttattgatcaaagtggtcaaatcactaaggatagagtctgatcatcaaacgagatgcttatttgtgatcgcataaagaataaggttgatttttcaacctcaaagacgttccaaatgatgcccaacatctcccaaacctagaagtggtgttaactttgtagtactcagtacgagtgatattggtcaaagtggtcaaatcactaagaatagagtccgatcatcaaacgtgtagcttatttgtgtcgcataaagcaataaggttgatctttcaacctcgaaaaatctttgaatgatgcctgacatagaaatgctaatttttgtcaaagaacaattctgaatctgtagaatatttcttcaaatagattatgggagacatagttactaaactctaaaaattatctctactcactatccatagaaataaataagacaatttttttttttatacaattattatctcaataaattttgagcacttatttttttttaaagaaattggtattacattcaacctcaatgacatgtgagtgtcaggctatgacacaggctcgtctgattaggcgatgcgatacattagtgacaagttgtggcatgggctcacctgattaggtgacgcagtgacattatgtaagatgccaaattatgacacgggcttgcctgattaggcaatgcaatatgtgatacattttattcccatgcacatggttggttatattatccactcttaactgttattgtatgatcattttataatagtgaaatgggtaatcagttatttcatgtattctttttcgttacttttcttgctgagcctttgtgactcacgggtgttctgtggtgtaggtaagggcaagaaaaagttagagcaaccatgaggtgac

SEQ ID NO: 326507 - DNA, 1141 bp, Cannabis indica
attctaatattagtgtgcaatatatgctataacactaaatttttttttaatttaatcacaacaaaatttgtaactaaagataagaaaattatagctaattataaattatcattattgtcttgtgactaaaaggtctttgactaaaagtattagtcacaaaaattataatttgttgtgactaaatactatgttttagtcacaagaaaattttttgttgtgactaaaagtcacatatatagtcacaaaaaatttatgttctgactaaaagattgttactaaaagtagcatttttttgtaatgtaaataaattattattattattattagtattattatttataaggaaagaaaatttaagtttttttttttttttgtaaagaaaggaaaattaagttacacaaggaaagattgtctcaaaagaaaacataaataaacttgcatcaaatgactacaccgattagtattaaaatatattttaaggttttccactctagaaatgagttcatcgcattcgggaggttgtgactttatgcttggtagctcgagtgtataatccagatccctttctttgtgtgttatgagccatttattcatgaatataaatacatgaaatatgccaacttaacgatttgtactaaattgtaatatctttaacatgtatacgactactgaaaaacacacacataataaagagatgttttgtgtgattataagttcacatctgatctacttattataatttaataatacgtaattatggtttggctctatcgaccacatgcaaaagtgtcttcattaagcattattagacaactattatgtcttcacgtacttaacactagtaaaagaatcactactacttaagttttagaaagtaaatataacttattaattattactgaaagtagttttaaccttaactcaaattttccacatgtgtccgcattctcgaaggagagggttctttcaagaggattattaggaaaaataataagcttgtttggctgtgttttcagttttcaatttttaaaattgtgtttttaaaagtgagaatagaaaacaattttttgtcatttaaaaatttaatggtgtttgacacaaatttttaaaaactgtttttagattttttcttacgaaaaaa

SEQ ID NO: 326508 - DNA, 1037 bp, Cannabis indica
gattgtcaacctaggcgctgggcacaacaccaggtcaatctgggcattgggtcctgtttccagggtctcaggtttatggtttcctccttaagtttgcttgaatcttagttatttctgttgacgaaaaagatgcccaaaacactttttgatgaactggatcaaaaatagacaaggttgaaaataaatcaacctgggcactgggtcctagttctggccctcccaaatttcgtgtgatccttacaaatagttgaatctcaatgttttctattttggataagatgctcgaaagaattcttgaaaaactccatttaaaatggcctagtttgacaaaatgccaacctgggcggtgggccctattttttgtatcgagaaattgttattttttctccgaaaggacctatttccccatgtttaatttgatgatgacgaataaaatacaaaggtcagatctctgatctgatacttggaaggcacccatattgacagattgtcaacctgagcgttgtgtgctcggggccttggtgcccgggtgctcaaaaatctacttttattctgattttgatgcctcaaatatgtctgtggtatgtctagttgatgtcccaatggaagggaccgaagtcatggcaatggtgacaggaggagcggtcgagacgatgatcggaagagaagcagtagcgaagaggagcagaagagtggtggagacgatggctggtgagaatttgagattacctcgagtttgaaccatctttgaatttagggttatatatctgataccatattagagtgggaaaactctcattcactttattaatcagaataagttgaggaatacgtcttgtttgtatctattaataaaaaataccctcatattatattttattaaaatgtacctacttttgtgagtgggttgctcaatataccctcaccctccacttaagtctagcacataatattcattaacttaagggatataatagggatatcatttagggtaaataccattttggaccctgtgttttacaaaagttactgattgg

SEQ ID NO: 326509 - DNA, 1311 bp, Cannabis indica
ggttcaagccaagaaaatcagcagtgatgacaaccctactaatatgttgacaaaaaagtgtcaacttgaccaagcttaaacattatttaagtctacttaacatctgcaagagttgattcctatctatatgttcaaatgtgctacacacatcatattccttctaaaatctaaaatgactaaactaaggtggatttgtggtgttttagttcagccattttatgttttatcttagctgatgtgtcactaactgttttgacagttggtacccgagtttgttgtctaaacaaacaaccaattatacctactataaatagaccttgtaacacacctttttagttatgttgaataattcagaattttagtaagaaagagagtgaaaatgagggatgtataagggaatcaagtgtatttgatcttggttccccattggtgaggttcttgtgtaatttatactcatccattctctattgtatccaagacactcttgtactgatttcaacatcaataaaaggtctatgtttatctactcttagtattaatttttctctttgttttgttcattaagttgttggtttcatcatcacagtttgtgatcaaactgttttggttatttttatttttcttttgattgctgcattgtgttcttgattgtgttcttgagagtggtttattccactacacaatcttaagggaattgtctatgtctagaatccattttgagttctccaagtctaactaatgagtgtgccacatataagatgaactaaataaaggctatttacacatgcgttgagaagtgtgatgaagaagtgcagcagattggaacagaagtatatgcttggaagaccaatttcctttatgaaaagccaagtgaggaatagaacaactaacggaagctactgaagggatggagaaggaatctgcatcaagtaattccctttttagttatatatatataaactctttttgagttttcttctgattttgtaacttttggtttagttatttctttcattttagcttattgcttcaatgtagacagcttaaccacagacaacttatatgtaatataatggtcacataatgaaattcaatcaatgtactggtttgatcagattcagatcaaaggtagctgctggttggtaatatgtttagcttcgtacccttaatgtagttatattcaactttctttcgagggtgccatatgatgggtaatggttgtttttcaaccatgtgaaaatatggttgtatttttcaaccatgtgaaaaaattacaatggtaatttttgacttgaggcatatgcacatttt

SEQ ID NO: 326510 - DNA, 1938 bp, Cannabis indica
catatagagtttcttatcaaattctagttattatggggtcatcaataatcacaacgaaagcaaaacaagcgataattctaattattccctaaataatcttttgactcttgattaatgccaatttaaaattccaatatagatagctttacatatttatcaacaataataattagaagagacaaacatattaaacttgatattctcgataaaacctttgagatgttcgtggtcttctcttatatgattaaagttcaagattgtcaaatgcaatgtcctatattgcctcagaatattagaattcctaaaatagccttagatataattttttatttaatcacaacattcacgaggttattcagaataagacgatatgatccattgaatctcattatcttgagagttgttgcggtagacttcatatattgtctcttcagaaaacacctaatacgattgtgaatgtgaaattatgtttgtgactatattactccatacaaaactctaatatctctcccacttggaccaatataatcaacaaacaataggcagccaaataaatcatacataatatcatatcgataagattcatatattacacataatttaacctgaaagacattcaaatataataataactattaaacaaagatgtatgcaacacaactattaagactatatatcagttttgttttgtattggtcacttcgagaaacaatgcacacaagaagtgactgcatatcattatgcatgtctatattaatcattttaggtgttctccattttgaaattttctaaaatataaagacttttatactttgatgagtcaaaatttttaaaacactatgctcaagataaccatgcaagaaagatcttaacaaaagaataataaatacttgatatctctcaaagcttatacacgcattatagattaatccttgaggacaaaaaagtttacaaccattatcaataattatgataatcattagtgatcataattaatataatgaacatgtgtactaacatgtaacatgtaataactcaaaaatttcatgtcctctaatctgttcacttctcattcaagattgttactaaatcatcaaagtcactatacggaaagttttgttcaaacttgaataaattcaaaaattattgcttaaaatatagactttagtatcctcaagttttactagcaataataatatgatatcgagttacacatgtattaacccataatcttgaatttattgtgtttacgaatatttcaaaaataacacaattatcaaatcggaatagacaatgacaatcatacatccattgtcatattcgtctaaaatttacttacttatgatctatgacttattttgaacctcatcctatacaaatattataataaaagactcactagttgaattgaaactattgaaaatacaaaatacactagtctcttgaactcattattattgaacaaataaagaatttcatttccaatatccagggaagttcttaagtgaatttatccttataaaagttatcatataaagatcgatggatagatatataccacattataactaaatgacacccatcgcaatacttccactgagcatgtaataacttgacatcttttaaattaaatgtgatttcacgatttatagattttgaggcctctaaatttttaatgagagattgatatgtcaaaaaatagtatagtcccatccgataactaaacaatagagattttaggattgcttgaagctaaaggaaaatttctaagagcagtgccactatgcatgtgaaaataagaattacacaatttgctcattttcttagcttttgatgatccatcaacagataaatcatgtcatgctagagtcgttcaaataaaacatatgactattatgcaggtgaggacaactacttcaaatgtcataaccaaattca

SEQ ID NO: 326511 - DNA, 673 bp, Cannabis indica
gataactaatcagattgtaaagagttttatttagggcataaaacctaacaagtgcaagttcgagtccgaggagggcctgggtgcttcggctccggctccagctccggtgaggtcctgggtggcaagacaagagagagaaagatagggcctgggagggagggagggctgagagattaggtttcaaaaaatttaagaaagaaagaagaaagaataagaaaaaaaaaggtacaaaaaaaattaaattatttttttctgattttttaattttttaaatatttataattattttttaaaattaatattaagtggcccaataaaaatttgacatatgtacatacgtgtacgtgggcagtccacgtagcatttaactaagattttatgacagaagtataaagagtaaaatggaagggatattggcggctaaactacctgaactttatggtttgtaacaattaataagcacaaaaactaaaattttaggggcataactacctaaaccctggttccgttttgctctgcacacctctgtccaaaaatcacagttaagtgccacggtggactgtccacgtggtaaatttttagtggtccacgtaattttaattttaaaaaataattataaatgtttaaaaaaaaattaaaaaatcagaaatttttttttttttttactttttta

SEQ ID NO: 326512 - DNA, 646 bp, Cannabis indica
ttttctagttttgggtttaagctcacgaccaagcacagggctagaatattctagttttgtgtttgttgttctacttgtctgtcactaagaacactaagtacaatctgatataacaaaaaccataaacaaagtgaaatgaggaattgaaattcaccccggcttgcgaaatcgatcttgacgtagtgtataatagttcccattttccgttcaataaatcagatttaagtggttcctttgttggattagctgcttcaagtttgcgggcaatctatttagagaaaatccaagaatcaaaacacaaaaatatatacacacattagaaataacaatgtcaattgtatccaagataaattacagctcaaacttttccataaaagaatctatcctatgttagaaatttaaataaaatgaaaatgaaagtaggttatacaattatagtgatcaaagaggcctaaaggaccatagaacaatcaacattaaaaaaataaataataaaactagcataactatctgcagccttttctttctgttgaatccaactttataatttttatagatcaatgcctaatcatttaataccataaaaaatcacacaagatattgattatcatccatacaaaacaattatcctccaaatatttggggt

SEQ ID NO: 326513 - DNA, 840 bp, Cannabis indica
ttttttttaaaaaaataactaataataaaaataataattttgctttgagtgacatacatatataagtggtcgcatctaagttcgaaataataatttcagtatatataccatgtataatatgcaaaatgaaagtacgaaaggccttaagttcctgttccttatgatcgactacttaggatggaaatatatgggattaatatatactaacatgatatgatcagtatctgtaatatatatatcaagttagagaatgtgttttgaaaagaagattatgtatcaaataacagagaatgagtacattaaagagacaaagagcttgtattgatgaattattattttcttctcaaatatcagccataatatcaataaaaccagaaaatcgcatacacccatcagtttaaactattctgtagtgaaaccatttgtgatacttcagaagagatcgagtcgagatatctcacttcttagattaggcatttgggattcaatatttttttataatatattgaaattggatgtaatcaaatctgatccagaaaaaaaatgatgcaggccgggcagaccaaaatccgataaatattcaaatagtttgaatcagagctccaacctaattcaaataaatttttttgtcatatttatgtgcaaagtaattgtctgagttgatagatcgatctgatgcatatagtaaaaaaagctctattaaacatatgttaataataagaatacttttttttccatcaaatcaaaataataagaatactttaaaaatatcactacaaaaaattttatttttagtcacaacaaaacttgtgactaattataaattatcatttttatttg

SEQ ID NO: 326514 - DNA, 657 bp, Cannabis indica
gagagagagagagtttagaaatgaggggggtaaaattgggtttaagtaaaagttatcccattttacaaattatgtatagttttagattaggataccaattttaatccctaatatggaagttatatatgttatatgcatatgcattggtataatgaactacactaaagactggcggcattgatccataatgtgtggctctccaataacaagcccttcaataattctttttaatttaatttttgaggctagctgctattatttaattggggggcacacaaaattagcttctatgaaataattttgatctcaattaaagaatttattagcattatttttggcttacttaatttaaactcaaaataatataaaatgtaatttattaaaaataataataaagaaagaacaaaccgtactactttggatttcagggccccggccgtgacaaaaataaaacatattagtgtcaggtagactgggtgcttctgtttcaattttctaaaccgtacggacgccttctttcttttatttttatttacaagtaaattattaattacaatgatacacacataattctaaactgctgataccctcaacctcatattacaatatctcaattaataattaggctaattaataattttttccccgaactttgac

SEQ ID NO: 326515 - DNA, 1778 bp, Cannabis indica
agcagacacaatcaagttgcacatgcacatgtttagagtaaagctgagttcgaatgggcagacaaccagtgattgctttccaaacaaagtgaattaccttaagagggactttggttttccataatgatcaccaaaggttcgactccatatcagcagaccatctccccttcgatacttgcagccattgataacaacttttgactgaatatatacctgaattctcatgttgccaaaaccatacatcattcactacatcaatgtttaagggaatatgcaaaatgagatcacgatctcgttgctcaaataaatcattcaatacttccacatcccattaaccactatctgctgtcattaattggttgactgaagccccaacaagagcaggatgagtactcaacacacacgggttagacatatcaggtaaccaaagagtgtttaaaataggtacattcaagccagctcctatacgaatacgcgcccctgctgcaacagtcggttgagtttcaaggatactcctccaaatgaagctaggattgttgccaatctcagcagttaagaaggatccttgaggaaagtatctactcttataaattcggccaacaagagacttttcattatttagtaatcgccaagcttgtttgcccaaaagagataagttatagtcatgtagattcctaaaaccaatccctcccgaactcttgtgtttacttaagcgatcccaactcatccaacttatgcctctagctttctttgaattaccccaccaatacttagccataagtttctcaagagcactacaagtttcaagtagaataaggaacatagacatagcataactcggaagtgcttgtgctaccgttttcagtaagatctcacggccagcttttgaaaggaacttaccctcccaactcagaattctcttttccatcttctccttgagaaagcctaggattgctgtcttcttttcggcccataatgcaaggaaggccgagatagaagctattctcatcagcagctaccatcccaaccggttgcacaatctgtcatgcaaatccatcagagtattagcactaaagaatatagaggatttggagaagttcaccctttgaccagaagcagctttaaacaagttaagcaagctaaggacattctgagcctcttcctcagtagcacgacagtagatatagctatcatcagcaaatagtatatgtaaaatagtgcgagctctatttgctactttacagcctttcaaatcgccatttctttcgaattgcttgatcaaagaagaaaaaccttcagcacaaagtaggaataggtaaggtgacagcggatcaccttgtctaatgccacgacccggaacaataggacccatactcctaccaccatggactaccttatatttcacatgcatcaccgttgccatcatgagatcaacccaacgacgatgaaaccccatacggagcatcatagctttcaaaaaaccccattcaatgcgatcataaactttgcttaagtcaagcttaagcgccataaaatccgtctttcctttacgcttgcgtttaagataatgcataacctcaaaagcaatcataatattgtcggaaataaggcgccctggaataaaagcagattaattctcagaaataacacaagacagaaccactttgagccgatttgccagcactttatttttaacttaaaagagtattaccaaaatataaagagaaatgcaagtaaataactttatttttaactttagtgatagttaatgttccttt

SEQ ID NO: 326516 - DNA, 1253 bp, Cannabis indica
ttgcgcacaaacactcgcgctctcgttgaattcattaatatttctcactggccgaccttgcaagtcatcccccagctggcccccagctgtggagaggtcagtcatgattctgcttgaagagcagtaagttaaatactgtcattcaagtttttaactttagcaacggcagtactgaagtgacttaggtaagccttgagtgactcgcctagctgctgctttatgttagtcaaggaggatgcttcaggtcggctacctcttgcagtctagaaattgtttcttgaaatccttggacagttcgttcccaagtaagttattgaatgatgggtaaacttatcaaaccagctacttgctgctccagtcagtgaggtgggtaaataaaatacaacgtaaattattcgagatgttgctggctcgcattatagtattgaaattgttaaggtgagcgactgggtccgaagtcccatcgtactgcgagacatgagggtttttgaacccctatgggaattcagagttcataatgtctagatggaaaggctcgagctcctcattcaagtcataaccaggtaacttcacatattcctcatctattggtatctcctgaatttatcttccaactcaatgatttgtaattggattggatcatcttgttgtcggttagcattgagttgttggcgtaaatcaggtgcattctgaattaagcgctcgcataaattgggttatcttcgattcaaatgttcacgaagatctggctgtcttcgttcatagttgctcactgacctcgtatctgagtaactctcaaattgatagctcctcatattgctcatactctcttgatcagcataacgacgaagtttatctcctcctcatgtatgcctttctaattgactgtgccctcaggatcttgaatgctctgagctagaacgtgcctcatcttgcacaggccttctcctttggaaaaggttagatacacgccctctatttaagtacgtgtatgcctcctccctatcagttcgagaaggacgctgggtttgtctcggtggtaacccacttgtcctaggttgagtcctaagatttctctcgatattacaagggatttcttgttccctagttttgggctgccttatgttctcgtttctactagaagactctgacacatcattgtttttattctcgtgattcgtaaatccctgggatctttgagatacttctcgacaaggtgcttgattattctgttttgtttttttttttatata

SEQ ID NO: 326517 - DNA, 774 bp, Cannabis indica
ttttttttttattttaaaccaacttaaaatattttcttagatattaaattagaattaataattaagttgattttgtttaaagtacttaattaataattaattaagttgatattaaaatattttcttagatattaattaattgtttgtttctattttaataaatttaattaaatagaaaatcatatttaagtcagaaatttgttaatttcagaccaacttaaattagaataattttcagaatatattttgttttacttttaatattcttattagtgtaatacaatatcgtgtcttacttattttttttaataaacattataaaatctcgctaactaattataagatgatactttgttatggtactaagtaccgtgatatcctcctagaagtgctcgtcatttactagtttttaattttttaaagagaaatgctaaagggcatcagtggtgcttaacacccttttatgtgtcaatattgatattgatccaattaagtattgggtctcatataatttaatataataatttttaggaagtatcgttagctaatcgtaatgcgacatgtcgaaaagatattaagtactactggtgcctaataacaatgctcttttttaaaaacacatttattagctattttaaaataggtaagatatgcatttaagatatgcattaccttttctgtgttggaagttgtggaactttaattggcctcttacacatatattgatgagttagttggtgaaacctaattattatataataaaaaaataataaa

SEQ ID NO: 326518 - DNA, 1033 bp, Cannabis indica
ttttggttaatgataattgttatttctcctttcttgattgtgaatttatgcatattcgtgtttaattacatcactactaaaaaattggctttcagtgacactctttagtgacacgctcatttgcgcgagtcactaaaaggttaggagtaatttttagtgacatgcacagttagtctctaaaattcgatgttagtgtcttataatttgggtcactaaaaatgtgaagtatcactaaagactaatacccattattaattttatgaatttttttattaaaaatattcatcaatagagtcactccaagagagattggcaaaatatgtaccaacacgcattgcgcgtaagccacttcacactggtacagtggcaatttatttatatttttaaaataatatttatttattcatttatattaaattaaagggaaagaaaataaaaataaaaaaataataattttagttttagggtcggtggttatttttatgggttttgttattatataaataatataattaaatcaaacataatataataaataataaataaataagattaagatatgaaaccctaaacatctcattctctctcaccctctcttactgcctcctttctctctctgaaaatatctcagctctcaacgtgaacggtcgttccttcctctccctctatctcttcgtcttctctttcgtcttctccttctgcgcctctattgaacccatttgaacggtgaacgacgaatggcaaacggcgaacgacgaacaacaaaaaccaaatatatagtttcgctctctgctttttgctcttgtgtagcgattaatctttgccggacatcgcaatggtaattttctttgccgttttcgtttgcttcaagaaaatctaatatctttaattattctccagaaatttatgatttcatttttttgttttatttttgatttgcaattgcaggcgccgaagaaggaaaagactggtccaccgtcatccaaacccgctaagtcagggggaggcaagcagaaaaagaaggtattgttat

SEQ ID NO: 326519 - DNA, 711 bp, Cannabis indica
aaatcattgacaggatgactaaattgcatgtatgaatcttagtattaattgtgattaatataggagaaaaatatcaacatgaatcacaattttcgataattgacatgtgaaaatttaggacaggtaagtataacatattcaatgaacaattttaatcttataattatgaaataaagtcattgcgcattttcaaaatttctaacattgataataaattttatatcatatgcgctaactataattaatattttattacacgttaatcatagtgtatgccaaaaaataatttataataataaaactcacaaaattataaaaggcatacatataacataattatggaataataaataaataaaattgctcttgtttgagattaaataactagcaataatgcgtgacaatcctcacaattttatggttgataaaattcgcatgcttaggctcacaataggtgagtacataaggagtcaattttctttttgtttaataacataattatattttaacaaaatactaataccacaaaataatttcttagtatgaatataattatattttcaattaataaataataaataataaaattgtgagatgataattattaataaataattactttaattaattatgttattatgggttaattaatcatttaaattgataaaacaccaaatataatcacacaatcaaataaaaaaaaattaaaaa

SEQ ID NO: 326520 - DNA, 524 bp, Cannabis indica
cttcagggctggaaagctaagacgctgtccaaagcgggtcgtgccactcttataaagtctgtgggtttatctttgcccatgtatgctatgcagacgattaaactttccaatcgcattgttgctaagattgatggaatggtttgtgacttctggtggggatccgaaaagggaaccatggactgcatctaaaagcttgggataagctctgcctccctgaatctttaaggggccttggattttaaaaaactatagaaatgaattaagttttctggcaaaatgggggtggaatcttttaattggcaaccaatccttttgctgctagatcttggaagccaaataccttaaaggaaggcctttccttaactgtccctctaaagattcagattcgtggttttggaaaaataagattaaaactaaatctatcttaacgaaaggggcctgtaaattggtgggatggaaaggatacttttatttgggaagacccttgcattgcccatagaaaagaattttgtccctcgttctaa

SEQ ID NO: 326521 - DNA, 950 bp, Cannabis indica
catgtgaccaaagcatggattacagtttcttcttccattctacagatcggccagagggagtgcacattgactctttttgtttgtagcatacaaagtgttgggagacaattccttcctgctcgccacagaatgtttttttactttgggtggaattttaagctgccacatagtagtccaaaagcgtgaagcagtatcatcatcgttgtcccatctaccactaacttgttggagtactttgtaagcactttttactgaatatataccggaagcttcaagtgccccagtcaaagtgtcttcatgaactgaaggttgcagtggaattttctcaattagcttcctatctctttcttcaaaaagatcttccaatatttccaaatcccaacctgtgccatccatattcatgagattattcactttctcatgagataggctaggatgagaggtagaaacatatgggttctcaacacaaggtagccaaggttcattaaggatactgatacttgctccattccctacacaccaaagaaggcctttcctaacaagttgttgtgcttcccaaacactacgccaaacatagctaggattgttccctagtggtgcttccaaataagaactagtaggatagtatcgagccttaaacatccttgcaacaagtgaatccagttgtgaaatgagccgccagccttgcttcccaagtagtgacaagttaaaatctctgaggtttctgaatcccattcctcctttcttcttgtgtttgcacaatcggtcccatgagagccagtggattcctttcccggacttgtttgaagattgccaccagaattttgtcattgttcactccatctctcgggtaatgtcaagtggtagtaagaacacactcatagcataactcgggagagtttgggccaccgttttgattaaaatctctttcccagcacgtgaaagatatt

SEQ ID NO: 326522 - DNA, 555 bp, Cannabis indica
taataaaactacctggttacttcagcatcatcatcctccctatcctcgctctcatagtgctgatttttatgatttctattgtggcattgacgacataggcaacataggccatgaatacggtggcatctgttgaggagaagatgaagatccaggtatgtctctgtgttcgggatagacataaggcgacataggctgctgcgactgaggttgttgcggttgaggaccatacatataaggataatgatatggcggtggagggtgctgtgatgggggccatacgtgtagggaagaacaataattaaacattaaacattaaaaaacattgcccctattaatttttttaaattgaattaaaaaataaaaacaataatttaggggcgactaatgaatatcgtccctaataatgggttattagaggcaattatttgtcacccctaatactatcatttgttgtagtgatatgaaaataggagcaggtatggattcctaatgtgaacttttttttgttgtggtcattattttgacatttgactcaacataggtaatatttggtaa

SEQ ID NO: 326523 - DNA, 1065 bp, Cannabis indica
aaatagggaacatgatagttgctaggtgcatggttgataacgaagcctccgccaacattcttttcaactcaacttatgaaaatatggggctcaaattaatggacctagcaccctttacacaactaatgtatgacttttttggccaagggcttgtacctttgggatacatccaactgccgctaatagttagagaaactcccacaataagaatgcagatggcacaatttgtcataattaatgtgccatcaccctttcatgcaatgacaggctaaccagccttatacaacctgaaggcagtaacattgatttacgacctatgcctaaagtttccaatgaggcatggggtgggatgtctaaggggagatcaacagtctgccccacactgttacaacctggctttatctaaagcaaagaaggagaagatacccgccaaaagctctgactaagagcccgacaaagggaaataaagtccaacccaaagtagggaggtagacatagatcctccttttggggatcctacaaaaagctttggacctgtggaagaattggaagaggtgcatgtcgatcagaatcttccaatcaagaaattggagatcgggaaaggttgagtgccaaaaataaaattatctttgatacaatttcttacggaaaatcttgacatctctgtaaggtcacatgaagacattgtgggaataaactcatctgcaatgactcatgtgctaaatataggtcggaacttctgacctattcaacagaaaaggaggttacttaataaggagcgcgtgcaagctctgatggatgaagtcaaaaggctaagcaccaataacttcatcattgaagccttctacccattttgggtatccaaccccatgttggtacccaaaccgaacaacaaggcatgtccgaaggactacttcctgctttcattgatcgattagctagtagatgctacagttggtcatgatatcctaagcttcatgaatgcctattaaggttacaatgaaatcaaattgcacccacccgattcagaacatacaagtttcatgatagtgttgggttttatgc

SEQ ID NO: 326524 - DNA, 1324 bp, Cannabis indica
aataatttatattatcgaaaatataatttaaattgtactaaaaaaatcttttgtagcatattcactaatgtaaaatttttaaataatttataatatcaaaatggtataaagagtctttttcttaaaaaaaaaatatatatttatttgaatgatgttttattttcttaatttgtaggttaattaaaggataatgcttttactaaatcaaggaaatgaaagcataatgttgattgccaaccatatgaaaggtttataaatttaggtacatttatagtcactatttatgtatattaattttagtgataaattattaaggaaaatatattattggaataaattatgatatttgatttggtaggttttagtgtttgacacctgtaatgtgatgtttctatcagacattatttttttaaagtggaaacttccttattaaagttttttcattatgtttatttataattaataaggaaataaaacttagttttgttcattctaataatatttcagattaattttttattattctaattaattttttttctttgaaacacactctattgtgtttgataaaataaataaataaataaataacaagccatattcataacacgtgcccctctattgtttatttttaatataaaatacatagtatttgtgtatttttgaagtaaatgctattttggaccttgtattttataaaagttactgattaaatcttttgttttgttaaataacaaaataaatcatgtattttctgaaatggtaaaaatagaactatgagcttaatttttgacatattttttttaacataaccaacttgaagaaaattcttaacacgaacagttacaaaaaaaatatatacagttttgtcataacacctttagatcagattattattaaattttattttgacaaaaaatcggtccagggttctatttgtactattttagaaaatacaaaatccattttatcatttaacaaaacagagtctaaaatggtttgacctattttttatattaaaaaaaaaactcaaaattattattatttatttttaaataataaaattcaagtttgtcttcatccctgtaatattggatgggtcggaaaatattctttatttaataacttatttatatattcaaataattacaaaaaaaaaactaatattcaaatatttttatttgaattttaaatatttatttcagacaatttatcaaaaaaaaaattaattcttacaaaaaaatgtatatatttactcaaaaaaattccactttaacgcacatttttttattttgaatttttcactttttttattttatttttc

SEQ ID NO: 326525 - DNA, 1875 bp, Cannabis indica
tgctaatcaaagggttttccttgaaaattgtgctaaattaaaaattttaatcaaattactaaactttacaatcttttatatgattatttacaaaagttgggatcccgtattaaaactttacaaaaaattctcaaaatataataaaatctagtcgcatagtgactacaaaatacaaccccagatgtcacaagaccgaatactccaatccgcgttgcctcgacatgtacaaacaccatcctagctcggagctcactcttgttcagccttcgcctttcctttacattcacatggaagtagcaactgtgagtcgacaaacttagtaagaaaatcatataacaaataatataatatcgacttgtatctaggcacccatacacctatttacaaggcttaataaatgagtaagagtgctctttactagggtacaaccactataccacatatactacgtaacaccactgtacgggtgttggtagggtttgtcttgtaccctgagtacctctagctgctgtaccacacacaccttgtacctttccatacttatactggtaacaccgtaaggcactctttaaacattgtacaatatacccatgcactctgtaccgctaccgtacacgtgttggtagtatacaaatcataaccagcatgcatatatatcacacatacatacattcgcatgtatacaatatgttctatgctattcttatattgtttccaaattcaagtgagttggccgacctgaatggaaaacctcatgctagatggatgccctagtcacattacataaacaggtaaacaacacaccaaaaccctaatccgggaaacccaaacctccaactaaaggttttgttatggacaactaataccacaataccctaagtatcaaggaatcaaccaactaaatctctgaaaacaacaagaataaacaaaatggattgctcgggaaacctgtcccagaaccagttaaccggttttacaggacttggcaaactggctaaccaatttgcaccagatttccccaagcaatccaaaccatgtccaaaccttaccaaaacttccagaacacctataattacctcaaacaacataatccaagcaatataaactagaaattcacacagaatcaaaatatgccatggatgaaccaagcttgagctttcaaactcaaacttgtgcatccaccacaccaaacccctaaaccagcaactagaactcaaacctaactcaaattgaacttaaaaatcgaactacaattcattcaaaccctaacaaccattataacacaaaattacaagataaaattccattaaaagcttaaataatacgaaagctagagttctagggtttaccttcactagaaactccttgagtcttagctcaattcatagaaaacacacagattgaaagttgcttccttttggtttggggtagccgaacattgagagagagaagaagggttgaactttctcttaattttttattttctatattttttctttaattctcttaattgatggaaaaaaggataacccaatattaactaataatggcgaactgtcattcaatggacaagccacctaatcccttaaagttaaattcctgaaatacccttttagcttataacttaagcaatttaaagcctaagggtaaaatggtcaaaaaccataacctcgctcaaactttgtattctatttatctcaaatatttatcccactaagataaaggttctagacttacccatgcgactcaaatgaccatccatcgtattttccgtcgttgccgagtaaaaatcataaaaactgcataattcacatataacacaaataataccactagagtttaataaaatctctagaaattgagaaattatagctc

SEQ ID NO: 326526 - DNA, 621 bp, Cannabis indica
atattttttaaaattttaaaattataaaaatacaatgtttaataaaaaataaaaaataattaaaaaaaaaactacacgataaagtataaactataaaacatttaaaaaactatttgttatttttactgaaatatgtatttttataaataaaaaagttatgtatcaacatatttttgtaattttattccttcaaatttatgtaggttatagtttttaagaaatttttagtttatactatcacaatacgtatagaaaattacaaattctatctttagaaaaattagaaactttagtacaaaaatatatattttaagagtttaattattataatatatattattacattactcaaagcatttaattgaaaaatatatcataattcaaatttgtccgggggctttttcttttcttatttctttttaaattagctaaaatatgtgtaactaaaataattaaaaaggaatagataacaatttttgtgtgacccccacaccctaattgcatttactttaatatatatttatttttatttttataatatgatgtaacttttatctaacatttaccaaattctatgcaaacttaccgaatgtttttttttttttttttttttagttctct

SEQ ID NO: 326527 - DNA, 1042 bp, Cannabis indica
attcaaaattttgaatagtacttatgtctgatctatttatcgtttaacgattcacaaagtgttatacgtacactatagtgttgggcgcacaccaaaagtacataatagcaatactcgttataattttaatacgtacaaaacatatgcatgcatgttttataagtcaggccaagccctagacataggcgtgataggcctatgcctacagtacacaggggttaaaaaaaatttctcttttaaaattacatatttttttttactaattttgaaaaatacagtattttttttataactcgctaaacttcacgccgaccgtggttaaagtgttaatatattgttattgttggatgatacaggaaaaggtgtatgatatattacataaaaggagagaaaaaaggaagtgttgagacactaatggaggaaaggcgtaagaagtattacataaataaaacaagtgtagttgatcagacaatattaatggaaaccacaaaagttgatgatgatgatgatgattatgagtacatgtctgaagattatttcattatactggagaaagcccttactcgagtccattttccacggtacatatatatatatacataataattaatctatctaatatatttacaattgacatgcattaattaattttcttctattgatcatgatgtaattaattattgtttaatcaaaattaatccttgtgttgttgcaggaagaagcttcccaatattgagattaattagcactaagattgtggcactccaagtcttgagtacaataatttgcatgtggatttagaagaaattagacatgttaattcccactaaagacacattatatttattcgatggatttgaattcataagatcaatattataaacaaatttaatacactaatggctcgtttaaatattcgtattgtattgtattatatgttaaattttaatttatattaaaatattatatatttaggtgcccataaaaattaataccatatatatagttttattataaaaaatattgcataaaatacaattca

SEQ ID NO: 326528 - DNA, 663 bp, Cannabis indica
ggcctaatgttctcattgagacggatagtctcctttgtgtccaagcaattacaaacaatttaagcatgccatctgcttttggtattttggttcaggattgtaagagtcttttacttagttgttctggactttctctttgttttgttcaatgatctgttaacaaaactactcattccctagctcgtaactcttgtttttccacagattgtattcttcaggctcatgatttgtcacctgaagtacgttctattgtaatggctgatttttcagtttaatgaaatcttacctctattaaagaaaatggcagccactaacataacattacaaccaaaaaatcaaaaccaaatcaacagaaaattgaaactctctcgggaaatattttgccagaccaacatttcaaccaagaaaatcataaccaaacacaagcttctccgtccaactctgcgaaacccaatgcctctgcaacctagactccgaccaactctgtgaaacccaacaaaagcttccttgtcaatgatctgcagagagagagagagatggagaaagaaagaaagaactttatatagagagataaagaatccaacaacgatgagtgagctcgggaagagatggacggaggagggcctccgatgccacatgaagaagagaagggagagagagatc

SEQ ID NO: 326529 - DNA, 2282 bp, Cannabis indica
cttcaaattacacagttacagtgcaatttcatggtcagacaaacatgacaaattgtgtaataaactctaattacacacaaatccaattacattgtggctttccaaactgcaccctttatattctttaaaatatttcatcaaaatatcactttatctattttactttacatttttacattacatacatcattgctctatatgttctctatattatttaaaaataatttactttaatatattttattcattttaagaaaataaataaataaatatgataataatagcacacacatattataaaaaaaattaaaaatattaatataatatttatagctatatttgaatagtgcttcttctacatgtagctaaacaatgttcatgagctaaaactcttggctataatacctcatttgagggagaatatttttcatcatttgttacctcttagctaaatcatttagctattgactattttagctactctattgtgagtgctttaatttttttttaccttacatatttatattataccacacatcaatttttttcatattctttcacatcctttatatataataattaggaagattggtgttttgcaaaaaataatttaattctacaataattataattaaatagaaactgcaacgacttacagtaacatgtttgttacttgttactgcaaaaatcagagttgcatgaataaatagtgtagaaactaaaacttgacacagcagaattatatgtgttatcagtattttttttgaatactactagtccacgaagctacgccaaaaaaagaaactaattagtaaagtctcaaaaattacaaacagagaattgacttaaacaagtttagactccgtctaaagcttaaccacaattatttgtaatttattttgccaatatgatctctgaatcacaccaaatagtgaactctcttcaacttttgatatgagcgtgcttactttctttgaaagtaagtcatggataattcttctttcaaagacttcttctcttattcaatgaaactcttcaccttattctgacattgaaagaacaaaaatacagagactaaaacctagaaggttttcacacaagaaactctcttctcacaaagaggaaaatatcaaacaataagactataagagatgaaaaatatttagttgctctctaggtcctatttatgatatagagaaatcctagagacaaccacaaatatatttttatagctgttagaaactttcctaaaataagtcccaatctgatgcgacaaaattgcaatgtgtgttgacatatcagacaaaatctttcaaactttccatataaagctaagatcatgattttagctccaatccctaccataaaaataccacaaaatctgttcaatacataacaatataaaagatatgaaccaatgattaattccaatcaattatgactaaatatagacaatattcaatacttttcattttctactcttttatgcaaaacattatatacacgtaaccaacaattgacataagaaaatcaatatttaatttcctttaattatgcaaattaaattggataagataaatactattatggaccctgtattttgcaaaaattacagattgaactctctattttgttaaataaaaaatagaccctatatttttttaaaatagtacaaataggaccccaagctcaatttttgatatttttttttaatataaccaacttgaagataattttcaacacgaacagatgctaaaaatttaatcatttttgtctaacacctctaggtcggattattattaagttttattttgacaaaaaatcagtttagggtcctatttgtactatttcaaaaaatacagggtctattttgtcatttaacaaaatagagagtctaattataacttttacaaaataaaaagtccaaaataatatttatccaattaaatattattttgaatttgatacatgccccatatttttatttcagacacatatatataatatggtattttatatgaaaagcaagctactctaaaacatgtatctctctaaaatacataaaaaaatggacaaataataatcatattatgctttgagaaatgatagtaatttagtgttttaaattcaaattatacttactagatgttgagaaaaatagacaagttgcatgacataatatgtgtatcaagtttttttttttttgaaaaaaagaagacttacaaatttgtacacacttatcagacattaatgtgtgcagtgaaaaataagatcattgttct

SEQ ID NO: 326530 - DNA, 1120 bp, Cannabis indica
ttcaaaattgttggacaaataggcaaaccaataatggtagatgctgtcactaaagaaagagaaaggctaagctaccccaggtatactaatagaggttagtatcgaccaaagacttgccctggagtagtggaatttgagaatgagtatggactgaatacacatgttgttgtatagtatgaatggaagcccaatctatgtaagcattgctttggtatagggcacacggcagaggaatgcaagaaaaaatcactgacaaaataggaatgggtaatcaaagtttgataaaaggaatgatactgctagaaaccagctggatgcagagggttttcaagttgtcactaatgggaaaagaaccaaaagtaaagaggctcctgcagaaactatgatagagaatactatcagcattctggctagtagtagtggagaacaatagggcattcaggaagaagtaatgaaaggcaaccaagcaaatacaagaggggggggggagatcccctctcctagaaatggataagttcctttgttggaatgtttggggggggcaacaacactgaaaaacaaaggtcagtcaaacaattcattcaggctcagggtgttggttggtggggctcctcgagtataagggtcaaggttcacaaattggggaccttgtaccttaatgttatgcactcaatcttaagaatggtaggcaggttttatggaaggatttaaatgagtgggctgcaaaagacaactggcttttgatgggtgattttaatgatatcctctctaaggaagagagagtttgacacaaggtcaagttctatcctgatacaacgtttgctaattgtgtaaataactgccagttagaagatgtgaaagctacggggaattacttcacttggtcgaataaccagcagggtagatgttatcccaatttttacactctaacgtggcatcacccgatggtgacatatggaatcaaccttatgtacctgctcgcaagagatatgctgaacagggcaccacatatattcgctcggacgaagccttcttaattggagagtgagcagtccgaacagcacgcttttgtattttgcaatttttgcaattttaacacttttgtatttgattttctcaa

SEQ ID NO: 326531 - DNA, 751 bp, Cannabis indica
gctcgaaatgaaagtgtcattcctgtttgggggtaagtgaacaataggaggatttgcgtcgttttctcacactcgtaatctttttaccgtcggttttaaaacgccacacaaagcatgagtgaggcttttgaacgacgctaataatgaacgaattttttcaatttcttgacttttacagtcggttgggtaattagtgatgaacatagaactgacacaatttatttattttttgtcattttaaaaatgacgaatatattgaatatggtactattcccgtcggtcaacgcaatgaacagtcgcattgaccgacgtgaatagtaaattttgtaatagcgatcacatatttggaatgtaaatgttaactaatttttattggtatattaatgcgtgtggattttcaggatgctaatctaattatgtgggtttggctactcacgaattaataaatgggtctaattaattaataaattaaaaattaaaaaatatctctaactaaattacataaactctcattttttttctttttttttcttttctttttataatttatattaattaataaataaaaagttactgacaaaagggcataacctcttcactaacaaaattattaaatttgaaatttatccttgaattatagtctttactctttttttttactttattaatagtcaagctactatataaatatatatatttttttaattttaaaaatatcaccttttttttttgaaacaaagattgcaacttt

SEQ ID NO: 326532 - DNA, 1160 bp, Cannabis indica
gcataaaacccaacaataacttccctgaggtggttgatcatctcttagctcattttaagggctacatgggaaatactagcaggcattcaaacagaatcaacagtgacatcatagcacaaggagctatgcttaatcttgatcaataacctatcttgctaaagcctttctcgagtaaggagatcagaaaggctatttatggcattcctaactcaaaatctccatgccctgatggttatggagctagtttcttcaaacagatgtggcctacactatgacaagatttcactaaggcaattgaagaattctttagcacatgttacatgcctaaagagtttcatgataccatgatatccctagtcccaaaaatagagaatccttcaaaggcagtggactacagacctattgcctgctgcaccactgtgtataagtgcatctccaagcttctctattctcggcttgctcaggtgcttcctgatttagttcatcaaaatcaaggagttttcattaaagggagatcaattgctcacaatgttatgattcttaaagatcttttgaaatattataataggaaaaatgtttcctctagatgcacaatcaaagtagacataagcaaggcctatgacacagtgaactgggaatttcttgaagctctcgacactgcttactgttggaattattttaccaggatcttagatttactaacaagtatgttatttaacaacctaaatatgaacttctaaaatgatgtgaaataagcacatataaagtataagaaaccttacattggttgcagcggaatataatgtctccttccacacaaatctctaacccttgtatcctgcactcactcattcactataggctcaatttagaagagaggaagagagagagaaggtggtttcagctagggtaggaagtggaggctcaaatttatctgaaggaatgatcactacctatttataggaaaccacctaggcttaggttagaattatttggcattaaaatcatgaaaaaataaatggtaaattgctacgtaagtggccgaccatgatatggatttggccccactttgaaattttgccattttatcatttctccatctcattttctcaaaaacaccaattttccaatttaaccacttaaatccaattctaattatt

SEQ ID NO: 326533 - DNA, 674 bp, Cannabis indica
aaaaatgctatttatttttataataaaagcccattttttttttaaaaaaaaatactatttcaactcagaaccgacttacatcttacaaatagttaataatatttcacaataattattaaactataaactaaaatatgtaaatttcttatttaattacatcaataatataacaattaatgctaaatactaccaatgtcttttagcatttatctaatgcaagtctagctgaaatgtggtaactaccatattttttcaaaagctcacacatgtgatattagacaatagtgtgccaaaaaataccatcacaagctagcgtctctaacgcaaaatagtaaaataataattaggcaaaatgcgtgtacgtcatgctagcctaactcgtattttttgtagctttttaaaaatataaatcgtgtcgtgtaataatttttatagaatagacccaacacggtccacaagtccaataatttcacaccgcactcagattcgtgtcatactttattcagaccgaccggtttttcttaaatagactaacttattttcttatagagactcaaattgatactttatatttttatatttttattacaattgataagttaaataataaaatatatgtatattttataattttaattagttttatacattttttcaataataattacacacaa

SEQ ID NO: 326534 - DNA, 825 bp, Cannabis indica
catgtatattcgggtgcaagactgactaatagattgtaacagaaggttgatagtagcactcctctacatgaaaaattaaattttgttatttttgttgacaagtaaattttttttagaaagttgactagtaaattttgctgcaatatttttctatctcattttattttaatttttctatcaaatgatctcaaaattagaattttaattgtaatccaaatgtttccaataaaaaattaaaactattattttagctcattattatcaataaaatttcataatttatttaaaaaataataataaacaaagtcactaaggctagacctaagatacaatctattaaattgattgtaaaaatacttacgctgactgaaattgtagccatcggattatcaaggtggggcgaaaagacgattatacccctcaaacagttgtgttgtatgtgaatgtttcacctaacaaaaaaaattgatatggagaaatttctctgagaaacacaaaattcaatggctgcaacttctgttgctgctgtcacattttcatggctttctacaatacccaacttcaaccccgcatcatctcactctcaaaaggtaccctttttctcttttgtgtatatacaaatgaattatgctgtgatgaacacaacttttggatcttaaagactctttctttgggtacatgagtgtaatatatttgtaattttgtagtggtggttgttgttttactgaaatcaaatctgaatatgttagtaaagagtgcattcaagatttggtctcttcccaccaccaactgtttgataaaatgtctcaaagccaaccaataccc

SEQ ID NO: 326535 - DNA, 1390 bp, Cannabis indica
atctcataagtattattgttatctaacttttaaatatcatcataataaattacctatgattatatatttactacaactctttcagagtatgtgtgaacttctaaattataaatgaagagttttatgaacttcattaattatctaacttattgaattattcatgtgtgtatacaattttgttcacaccaaagtttaaatttttaagtagatatgaacataacaaattaatgataatataaaattttatttatgacaatgatgatactccaagaccatgtatttgtttcattcttattgtatgatcttaatttttatagcaaatgatcttaaatatttaatattgttttcgattattttttattttaaatcaattcatttttctcattgattattctaattctaattacagtttagtaaatgcactattataggaattgtccatacatttttgactaaaagagagagaagagatagatggtaaaataattcttaaatgggtcccttaaatttttaaataaaaaataaaaactggctaagtatatgaagtgaaattaataggataactatttttattgacttcattagacatatccttattatagagtgttgctaaccataggtcttgacatcctatgatgtggtacttatgtgcaagactggctctaaattaaaatggggtagataaaagaaaataataattatttcacaaatacacaaaaataataaataattataaaaagatgattttacggaattttaaatatttttacgatttttttattttatttacaaaaaatacggtctttttatgttatactcttgttaattttttgttatatgtatgtattttttattattgttttgatgttattttcatgttatttttatgtagttttcttgttattttcgtgttgtttcaatggaaaaccgtaaaaaagtatataaaaaaaatatctttaaacgtaaaaatataattttttttacaaaagggtgtcttatgtaattatcctaaaaaaatatgagcccttactataaagataaataatattttaaaaattattaaaaaatatgtatattttttaaaaagtatttttttatttgagcccctaaaataggtggatcttaagtacgggcctagcccgccttagcctagggttggccctgcttatgtgtcaaaagtttgttaatattttatgggcccgtttggcacagcttttgaaaaagctaaaagctgctttttgaaagggaaacttacaaaaatactgaaatttgggttaacttttacaaaaatactgtcacacgaattttttttcaaaaatactgtgtttttataaaacaccagtaaaacacaaagcaatataactcaaaacaacagtagaacactagtaaa

SEQ ID NO: 326536 - DNA, 773 bp, Cannabis indica
aaaaaaaaagaaagaaagtgaaaaagttacctctttttcgtgtttgaactttgaagaaacgatttttatgaaattgggtctctgcaaaagtaattagtaattgattaaaacggtgactgaatccctatgtctcagggaagaagatgaatacgtgtcaatcaatcatctaatacaaattttgcttttttttaataaaaaaaccgttttcgctaacaaaaacataataaaaaatgtttttttttcttaattttttttttctaggggagttttgttttatatattccttataattagccttcttctcctccttactttacttttctaccctttatatacaaaagctttatgaagggcattattgtaaattcacaatctctctttctctcataggaactctcaccattctccttctccttctcctcgaatatgtctctcattgatcatactattacctcttccttccttctcttctttcgtttatattagctttttggttaatttcgcttaccaccacaacacttccctttcttaaaaggaataaaggtacaatctttcctataatctcattctaaactctattaaagtttcactcttttcttgcttttttcccaaattgagatgtgagttttggtttttattccatttccacaaatgggttcgaaggaattttgttaagagaatgcttctctctgagctgtgatttttttttttttttttggtttgggtagggtctgagctttcttatgttggtttttttttggtgttatgttaaa

SEQ ID NO: 326537 - DNA, 2595 bp, Cannabis indica
aagtgcacaaaaaggatgaggaattgcaagaggttaatgaagggagtgatggaaattagatttaataacgaacggatgaaaataagaaatataagtaggaatgacgaagaagcatctactttttgacaacccaccatgagcttaccttagatttaagcatagttaacttggggtaatctcaagataagaaatctttcacagagtcatcttggaaagtgtatgagtgagaacaaagtatgatttatattaggatgcataattggtagttgttccagatattatcaagaggaagggatgtgttaataagaaaaaatttacaaggtattgagatgagtatatattagtgggtggaaataagaaatgctctaattgaatatctatccaaaatgaatatttaacttgttactaagttaagttagtagatcagcttaggagatcccatagaacgaatggaaagacataattatgaattgtgtatgatgggatcttctgattttgactgagtagtaacggttggacataccgagttaatatcttgtctataagtgtaaatttatacagtaaatgaagacaaggaattcatacgaaggaatagtttaatattgtgaaattccaaggttcatatcttcggctacgatgctaagaattaaagaaggttattgtgaaccatagaggttaaagcaaaaatagtatgatattttattcttaaaaggtgggtaacttgagaagattaatggaatatcagaaacatgatgtgagtatatttgatgaaggttagattatcttataataatctcttcccctgatgaagtatttgtcaaaaagtgataattaaatctatttgtctaaagtgataattactatgaaatgagacaattccactagttgacaaagtgctatagaaaaatagcaatttgagagttagaatcataaatacgaaggtaatatcccaaattgtttaaataaatttttaagactaaatttctataaggaggggatagttgtaatatcccaataagcctgatggtaaataattaggttttatatttatattacaggttaatcaaggtaataagtgggattgtgatcgtactaatctatttcagcataaaatttaaattttatataagtgagtaaataagtgcaatttataaattacgaagatttatatagcatgtgtgaatataatatgagctatatgtggaataaaaatatttttaggttcggcgaccctaaagatccaataactgggtaaataagcagaatttgttaattaatgagatttttatttgatatatgtagatatagtatgagttatttttaaaataaaaatattttcaagttctgtgaccttggagacccgattggatgccaaaaatgtcataccagttttagttagaaatattgatgggattattgagataagttgattttagaaatttgggatattttagggtacttggagatgactaaataccctgaaaatatagatttcttattaatattatattattattattacaatatcattagcataaaacgttctagtacgtttatatatatatataagttatatgttttaaataacaaaaaaaaagaatggacgaacaaaaccttcctctcttagttcaacgaaaccttaatcctcctttatcctatttttttaattttcaacctgaaacctagcgatctaagctctaatagtagaaggatagcaaatctttaaagaaggaaagcttaagggtcgagatcattggggatggttctccacttgggttggacgacatgtatgaacctggattaaaggaaagaaaagtatattgtactgcatagtacgttgaattgtaataccattaatattattatgaattaatttatattgttatattttgaaaagacttattggttaagcaatgataatgtgatcatactatggatatatcatatgggctcacctgattagatcttgcgatatacctagcgagatatttgacgttggtacgggcgtcagtgacatatgatgagtaccgagcgtaggtacgggctcaccggattaggtgatatgatattcttggcgacgtatcgggcgtaggtacgagcgtcagtgatatgaaatttcctggttgtggcatagattgaaaccattattgggtttcttcttggcaacgtatcaggtgtacgtatgggcgtcaataacatatgataagtaccgggcgtaggtacgagctcatctaataagacgatgctatgtattggtgccaagttatggcacgggctcccctgattaggtggtgcaatgatattgcattataacacaagctttcatgattaggcaatggaaatatatgagcatatccatttctatgcataaggttgggtatattatctactgtcgaatgttatgattatgatattgtatatgatattgtgttatcacactgcctttcctaattaggcaatgcaaatatatgagcatacctatttctatgcatattgctagttatattacctactgttgaatgttatggttttgtattaccagatatttttatacgaatgctttttcgtggtagatgccagtagtgatttcgattt

SEQ ID NO: 326538 - DNA, 1237 bp, Cannabis indica
ttttatattttaatttaataaataatataaaaaaattactaactaatataaaaataccacgtgcacatatagtgttggatatattacaatgccaaataaataataagcgtgtttctataatgcagccccttaaaaaggatgtaatgatgcatactctatctatttcgacattcagaagagtttttagtccaattttcttttatattcgtgtacttatagttatttaagatatcttacaaaatttcaagaaattcgaataatttataatatagaaagaagtgttcaaaaagtctattgcacatgtatataaaataaaatagtcacacgtgcaatacattgtttgaaccctgttttcggcgtgttaaattttttagaatttcttaaaattttacagaatatattaaataactataaacgtacatatatgactatgagaaaaaaatcgagtcaaaaattatttcaaatactgaaatagatagaggtgcatcgttaatcctttctaaggatgaacattgtaaaattttccaataaattatactcttaatttgatgggtttagtttattaggttataattttagaaaatattgatcgaacaatcatttttatataggatagtaataatatatttatagccacaaatatcaaatctctctttgattatataatttagaaaaattctacgatgcaccacttaaaaaaggatatatcaatgcactttttatttgtttggcatttaaaagaatttcgtagtctaatttttttaatgatcgtctatgttgtaattatttaggacatcttgtaaaattttgagaaattcaaaaaaatttaacataccaaaaatagggttcaaaccatctatttcacactcgtataaaataaaaaagtctcgtgtgcaatatacagttttaactctattttttgcatgttaaatttttctatatctctcaaaattttacaggaagtattaaataattataatgtaaacaaccataaaaaaaatataagacaatttttttttagaaatgctaaaacagatagggtgcattggtagatccctatttaggggtacattaaagaagtaccctgtgatttatataaatataaaaagcaaataaagtgtaactacaatgaaccccactgaaatgggtgcaccagtgcaactcttaactatttcggtatatagaataattctttagtctaactttttcattatttttgtactattattagttattt

SEQ ID NO: 326539 - DNA, 913 bp, Cannabis indica
tgattaattatgtatttattgggtcaaaattgttctcctattcaatattaatagaaaaagtcattttttaaattaaattctattctgctctccctctctttggaggagcacataatcagattacctactcgaccaacgactcacaaaacgcctcgaccttacgaccacaccacccacacgacacacgggccaccgtcgttgtcaaaagtaattcttaattttttttcatgaagttttaactagggttaaagtaattagatttagggttaagtctgtgtttttagtagttttagtagagaatgtgatttttgtagcttttagattcggatttgtgttttgggatgaaatttgtgatttttgcatggtccgatgcaggttcgatgtaggtccgatataggacccgatggtagtttaatgttgaagggtttgaaggttgaagaagatagcccgataggttcgatatagagcctgatagtgggctcgacgatgatcctcgtaattttaaattttattgtgacacgatgggtccaatataaggtctaataagtccgatatcaacaagacaatatcgaatgctaccattagagatgttctaaaatagtattcacgtgacaaacataataataacgagaatatttatatcaatgtcacatcagtgccacatgtgtaatttaaaattttaaaaagataaaggtaatttatggccaaactatctaaaattttagttttcagaagaacaaccctctatactaaatttttgagcttcaattctattaccgtctttatttttccagatacttagtctattaaccataattttttattgatctacctaatattaaatagaggaaggatttttttttttgaaacagaatagaggatggattttggttgcgatttaagttactctatt

SEQ ID NO: 326540 - DNA, 1579 bp, Cannabis indica
aaccaacagtcctatcttactatatattataagtctacataatttcaaaaaagagaaaaaaacaaaaaactattttaaatctactttagcaacaattttatatagcatattttgaaattttagggtgcgcttttagctttactttgggcacaatgttggtccacttgcgcaaatattattgatttttgtagttttgctgtattaaataccttttttttttttttaatttgttgctagtaagtacttcaattttttaaaagaattttgcagtataaatatttaaatttagtttttacttataaataataaatacttatgtttaatttttagcggtaataatacttaagttataattctgaaacttctttaggtacctggataataacttaatatttaacggttatgtacttacagagtttcagaaatataacttaagtattattactgttgaaaattacttatgtatttatttgtaattggcggttaaacttaaatatttataccaagagtttcggaaatataacttaagtattattactgttgaaaattacttatatatttatttgtaattggcggttaaacttaaatatttataccaaaagttattcttttaaaaatattaacaaaaatactcaaaatattttttttttccaatttttcataagtatccactcctctctagttaactagacacgtggacggagctgaattaattccaatttttttttctttttgctaaatctcattatttatcaaaattaaataataatgaaaaaaaaacatttcattataataaaaatagaaaacaaataagaaaactaaaaagaaaaattaaagaaactcagttctggagataatattgatgagcagctcctctcttctgaactcgcattccttcacgatttagggagaatcaaaaaatagatgaagaagattatgattggtatgtcttcatactatttctttgtctctttttctgtggaagacaaagtggtaggttggtgatgtttatgtttacttcattttctctcattatgtgtgcttacctataccataacctattcaatttagaatcctctgagaagaaagaaagggtggccccctaagaagaattcaaaccctaaaatgtgaagagggacaagtgaaaaataagacaaaaggcaagagaagtcagtttgtcccaacaatctcctggctaagcgcgcatctgtaatgggggcaattaaaatagttgtccaactgggcgctttggcaattaatacaactggtctaattgagatgagttcaataccagttgtaattagtgttgtaaatatgggttagaatttctgatactgcacgaaatcggtacaaatacgactagggataaaaaaaaaaaaaagcttggacataacacaatactatgttaaacattagcacgagacggtataagaaatatggagttaagcacaagacgacacgaaaaacatgttacatcacataagcatgagtagattaacccaaaaacatgacacatgaaagcacgacacaacaattaaaaaaaacatttaattttataatgattataataataataata

SEQ ID NO: 326541 - DNA, 1248 bp, Cannabis indica
ttaccgagatgttccctatttcaatgtttgagtagaagtaattcatttgattttgttttcctctgtgtttgcgttattgcagctgcgattagctggtgccatggcaaagacaagatcaaagattcaggggaaacccaaatctgcaaccaaacttgcaaagaagaagggattgaaagggaagaagtatggaaattgctccattccgatggagcaaatctctggaatcgaagctttggaggtctcggaggaggacgacctggtggaggatgatcctgccctgaaagatgttttgcagtcgcctctgtctcctaaatcttccgtagctgcgatccagaggcaacaagagcaagttgatagtgaaggctttacaaaggtcataagcactaggaaaaaagctgatagagacactacaattacagcagaaccaaaggagacaatagtgcaaaatgttttccaggtccttgatgaacaagatggggatgctaaaataggggaggtttatgcagatttggttgaaacaggagggtgggaggaccctctctttctaatggatagactcctacgatggaatgttagaggagccaacaatcaacacaaacaacaattaataaagcaatttattaattcccaaaaggttgattttgttgggctccttgagactagagtcaagccaccaaaacttggtacattgtactcgaatgtttttcaaaattggtgtttttcttctaatatagcgtggcatgcaggtggtaagattgttattgcttggaacccatggaggttcactgttgacatccttaaatgcactagccaacttatgcatttaaagctgtcaacagttgaaggctttggcagttttttaactatagtatatgcttccaataacaaagttgagagaaggatgttatggaaagatttgatgggcttgaacactatagagaactagttcttaatgggagacttaaatgacatcctatctaaggaagaaagagtggggcatagagtcaaattctacctggataattagttcttaagttgtgtaaattcatgtcagttgaaggatatcaaagcaagtggaaatttcatcacttggtctaacaaaaaacatggtgatgaaaggatcttttccaagattgatcgagtacttgccaacaaaacttggattaacaaatatgatcgggcagaggcaatttttttaaacgaagggctttttgatcatactcctgtgattttatctcttcacccaaa

SEQ ID NO: 326542 - DNA, 1427 bp, Cannabis indica
tgacatttgtaaaaacacggtttttcagtaacactatagtactcatataaatggaggagagaaagacggtaacatggcatgttatctcatgactaactctgacctggcccactctattgggctgccactatgagccataaagacctccgtctgaaactacaacttttctctattgcttcccgaaatagtggcacttcaacctttctttgatttcttatatcttatctttcacttatggtgcttagaataagatcttatcaagcaattcataagactttgagcttttctcaaaaatcatgcatggactcaaaatatgtgtttctatttatatctctacatatcatgaaatgctacgctgaaatgttaataaatttgcaactaagagcatgataaataacataaaacaaattgtcataaaacataaaattcttatattgtaattgagtactttacttacctagtttcgagctttacgaattcttattagtgaaatactctttgctcaagatatgagtgattcgaccctaatagttgtccaattatagatttaattattagttacatttattctctttattcgtaactatctcaaataaaatggatctataagtataatcaggtcaaataaaatagtttaagcatgcactcaaacgcaagtaacaaaatcccaaccattgagtgttcaactggtttttcaatcaataattattcttgagataatcatggcataacaaatttctattccactgtagctttgtaggatatcaatccatatataaaaaaaataatataatctatacttggtgtattagtataaattccatatatacctgtgatacatcctcatacaagtacgacaacaaggtaaactcaccatttaataaatttataatattatccacacaatcaagtaattagtatcaaccatgactataatataataatttcactaaaaaaatattacagtacacaagtaaaggccaaggccaagggtattatcaatctcaatgatcatctcactaaaatatatgagttgtccaaaagggccaaaactatccattatctcaccaaatttatggaagactagtattttttttatactctaagtaagcattaaggttgttcccaagtgtctaattcatatatcatttcaaaataattattccaactaatgaaagcaagcatagtaataatatctaggtataactcaaacaatcatttataactcaaagaatatcacaagaaaatattatcttatactattgaatgagaattttacctattaatctccttgaacaccggagtctaggtgcatgtttggcatcataactaaaaaactgttttttgtttttaaaaacagaaaattgtttttaaaaacaatttggcttgtttggccttgctttttaaaaacagttttcagaaaacaa

SEQ ID NO: 326543 - DNA, 1461 bp, Cannabis indica
ggatgcctatgtaataccccaagttgttgcagaaacctaggaaaggttctaactccccaccccaatcagtttgaaccatcttaatttgtgtccctagttgtaattctgcttctgctttgaacatttgaaaaactttaagggtttcagatttgtctttgagcatgtatatccaaacaaaccgagagtatacatccatgaaatggatgtaatacttgtacctactattagagatagtgtgagagggaccccacaaatctgagacaacaagctgtaggggggctgtgtactgagtgctagagactttgggaaagggcagtttatgaattttacccaagcaacatgcagaacagacagtttgtgacattttattattaacagaaacattacaagctttaagaacagattggacaacttgtttggaaggatgccccaacctgttgtgccatacatcaaagtctgaatatttgcaactattacagtgaatacaagtggaaacagtattgacagaaggtttattactaggaacagagacatggttgacaggttctgtactaactggtttattgaggatgtcaacatcttcaaaagtatagaggccattcctgtgtctcccttgaagaaggatctgcctggtgccctgatccttaacacaacaagtgtcagggtgaaattcaaaaaagactttgttgtctctagcaaacttagacacacttaggaagatttttggttatagaaggtacatgcaataggttattagagaacgtagaggcgtgtgtggacaattagagacacaagttttgcctatgtgttaatggacaaacctgatccatctccaacaaacattgctcctggccatgatatctgagctttgagccagattggtagggtcaggggtgcagtggttggttgcccctgaatctggataccagttcatgtcccagtcagtcgaattggtgacacatttgcttgagttgtgcagtatttgaggcagcattggtgttcccagatgaagcaggccctctaaaatttttatcaaatctatagaagcaactttggacagtatgtctaagtttaaggcaaagttgacactgaactttgttgttagtgacaggaaaacgattgcccctaccagggttataagtagcacgaggagtgaacataggatagccaaaagtgtgattactattattgaactgtccatagttattacctcgaccaaattgctgattgccaaagcctgagaatcgattgaacgattgttgtttgtatcctcctctgccgaagtttgccaggttagcttccaatccgtgatcaagatccatgacagcaatattcgcactaagatcaatttctcgatctgtcttctcaattcgagattcagaagcaagtaaaagagcttctatttctgcaacagtgtactgttccagacgagtgtttgtggatatgacaaatgtgtcatat

SEQ ID NO: 326544 - DNA, 553 bp, Cannabis indica
tcagggactacaatttggcctttcttgggaaacaggggtggcgtttgcttactaatgataactccctagtagcaaaagtttataaggcaagatacttccctaaaggcaatttcttatctgctgagttaggacccaacccaagctttttttggcgaagcatattggaggctaaaaatgttattcagttgggtgctttaaggtctatttgtgatgggaaatcaacgtcgattttaaaagacccttggcttccaaatatcgacaacatgtttgtaacaacttatcacccaagttttgagggtaaatcagttgatagcttactccaaatgaactcaagagaatgggatactgatttgattcaagacatgtttaatcaacatgattgtgagttaattctctccattcaactgggtagttctagtggtagtgattgctggtattggtctaaagagacaagtgggatttattcagtgcgaagtgcctacaaacttttgcaagctgttgatggagattggccgagtactggaggacagaatcattggaagcaaatctggaa

SEQ ID NO: 326545 - DNA, 530 bp, Cannabis indica
aggcttctaggcttcagatgggctcgggcccatcttccatctagaccgggcttgctcatttggaagggctttggcccaagcgattctcacttgatcattctcttgaaatatcacttatcattcttccaaaaacacaaataacatagtacaatcaaatttttgtgttatatatatcaaaacttttttgttttcatatttttgtaaatagctcttggttatttcagtttattttgttggacttctattcaatgagtgggctctttcattttgactcatttgacctaatactattttcttgaaataatcaagcccactttctaatatttattatattgatattaggctaattaggatttttaccccctaaattttaacatgtatcaaatcatgttccctgaacttttaaggtcgttaaaaataccccctgaactattgaaattgttggatttaagaacttttgtctaattttagtaaaaaaaagtctaacatggatgaaagttcagggtgcatgatctagtatatgtcaaagt

SEQ ID NO: 326546 - DNA, 774 bp, Cannabis indica
agaaatgtaaaagactacttataattggtaaattaaaaaaaaaatatatgagtcttattgtcaacctcttattataatgttttagtcaattttggtacttgaaaatacatttttaatttttttttttcacgattaatgttcgttatagttacaacattattttagtaaatttttgaagaattttgaatagtttacaatattgaaaatagatttaaatttttttgaacaagcgtggtaacttggaatacaatgaactctattttcgatactgtaatatgttcgaagtttttaaaactttacatggatgatattgcaactataacaaacattgttatgaaaaaaaaattggaaaaaaatattcgaacatgtaatttcagacgcggatattgattaagaagttgtaataggtgttgtggaatcgatccaaaaattcgccacaaaacacaaacaagatcactatcttccagtgatgagatcagaaaaataaactatttgagtactacaaacaaagaacacatatgaaacttaaacacatacagatttaactacaatcgccactttatttcatttcatgaaattcatctcagagtattacaattctcttactcttcctttctttaccgttctaacagaattaaggtagtgtttggctggaaggcatgaaaatataggaataggaatatgagaatgaaaataggaatatgaattgaatggaataaaatttaaaatgcataaaaaaaattgataaaagaattattcaattttttctcatca

SEQ ID NO: 326547 - DNA, 620 bp, Cannabis indica
aaaaatagaattatttatatttcagtttatcacacgagtttaaaaaacttcaaacatattttcgacattgtaaattattcgtaaatttttaaaatttacagggagatgttgtaagcatgacgaacactaccgtaaaaaaattgaaaaaaatattccgacatatattttcgggcgtagaggttgtaacaggagattgacggtaacactcctctttttttaaaagacaatcaaattaatatggttaattaagatttttttgttcttcaaattttaatatgtacaaaattatgttttttttttttaacttttaagtttgttaaatttttttaaactattaaaattgttagaattaaggacttttatttaattttagtataagaaatttagataaaatagtacaattaaagatataaattttatataaaataaaaattatttaaattaagtattttaaaaaaaatttaaagtgtaaataaaatttcctttactaatttggcttaccaaaaattgtatttcactaaatagtccttcattaataaaatctagatcttattttaaacaaaatttattcacttgttaaaaaaaattagaacaacaaataaaaaataatttttttctta

SEQ ID NO: 326548 - DNA, 1571 bp, Cannabis indica
aaagttaaatttgtatcagaaaaataagtgttgagggtaagttgttttttttttttttgaaagagggtaagtgttttctaattttagtaagttataaagaaaaaaaaattgtcattattttattaaaatatatattatttttaaataaaataaatgtacagttttaaatagaattttttttttttgagtcttgagtcgggtgggtcttagggtcagccaattttaatttgtttctgtttttttcaatgaaatcaaaaggagaaagaccaagcatgcatatatatcacattttcactactatactctatatactttatagttaatatgtaattggtgtatagtttaatatgaatcttatatattttaactttataaattaataatgtaaaaattgctaaccaattacattttcagatgttgttagaatttttaattgaagtgccaaataataataattggagaggaatatggatttaaaagacccaagaatcggattagaattaattccaaaaatagaagacgacttattaattgtgacgttgttttgagcaattttgagaggaagaacgtcatgatatgagagattctcatagtaaggtgatggcttctgctctcgatcatatcatggtagaagctatggccatccttgatagtttgaaagttgaaactttgcatcagtcttatttgtgattattgagtctaattgcatcaatgttattaatgttccaaatagtgagttagtaaataattcttatctaagctgcatgattactgattagagatatattgtccttttgtaacaattcatccactcagtttttttttctttttattgtttcaaaactgttaatagtgtcgctcatttattaacaaaacttactctttttttgaataatcattatatttagtaatctcgctaccaattattaatatgatattgttttctatcttgaagtttttcctattaaatttactcaaaaaattttaataaaaataaaaaatccaattgtacgaagaaaaaaaaaacagcaaagcagaagacatttactaaaattttatgtcgatatatatatagttttgaaaatacatatatcttaaatacatgatacaaagttatattcaattgtactttcggaaagtcaatattgtggcttatttattggtcaatcatgctctaaaaaataaaattagtgctatatagattagtgtattaccctattatgctcgtcatataattgatcttaatttatcatttccttgtaatcgttgagttgttgaatgaattccatttctcaaaaaaaacaaaaaaaaaaatacatgatacaatgggatttcaaaaaaaaaatacatgatacaatattttttaattaggattttattgtacgatgagaagctagcaaatagaaggaaacgacatgtagtttccgctttttctaaatagatagcgacaaaaatagtggttatcattctattgattactgcacctgatataatgcactaatcatcctcaagtacaaaagcaacctgttaagtaatatgtataattatatttataagttgtgtttttgaat

SEQ ID NO: 326549 - DNA, 690 bp, Cannabis indica
aaagcggtaaactaacactgagcgctttgagtgttttctttagatttttctgtctgaaactgtattgaattctaagaaacctaagcttctatttataagaaggtgaaaggactaatgcacaattaaaacttattacaaattgcatcaggtaaaaatataattatccaatagttaaaacttgggtgccacgcgttaacctcagactggatggtttgggtgaggcggtgccacgtggcactcgcggattagctaaaaaagcatgcaaggttgacattttgggttgctaaagggacacggtcagggaggaccagttgcgcctctagcgtgtgagggagacgagagacccataaaattgtgaggtgatggaaatttggtacatagcaaatgtggtgtcaacatttgttatgttccaaatttgcatcaccttttcgcacactattgtaacattattttttttttctaagtgagatatcttatatctttgtatcacttatttgcttctataatatatctattggagatgctcctatatttcttagattatctctaatggaagatataaaatttgtactaaatttgataccaaaatgaatttgtgttatatttgacccactatttacaattattttccaacacacaagatgtaaaataaaaaaaaaaacaataaattgattatattgatggtcattt

SEQ ID NO: 326550 - DNA, 631 bp, Cannabis indica
catctgtgttagttaggaagtaatgctactaggtaattcactattggtacaaagccaaaaattgaatagaactatcaaaggctaaataagtatctttcttgcaactttaccattcagtctcactggtagagttagagaatccggatcaatttttacagttctccaaaaacactgctccaccctagagtaatcaccatcttaaaattagactttctagcattaatgtatagtctagaaacctgatttggtgtagtctaagagtattaaaatacctcccttatcgactaacatatagtttctctttttgatcttaaaattcacttgattgtcttccaatgttcctttcctggattaagctgatacctatactcataacttccactcaacagtaggtgtctggtctaatgcatttaaaacatacataagacctctcgccgttgattcgtaaagaatttcttgtataacttttatcttttctatagtagttaaaactgttccttagacaaataaaatctatgtatatgagccaaaagacttcctatagagttagccattagaaaatgcactagcatcttactaagtaagtctcttacactagagtaagtaaattactaggtataccataagccat

SEQ ID NO: 326551 - DNA, 1206 bp, Cannabis indica
atttttgtaaatatttgtatgtggactgtataaatgtttaatgggtcggccctaagtattttgttaatttttttcctttttgtattttttgtttttttcccaattattatccgaattaattttatatttttgcatataaggcctttgtaatatgatctatcaaggtaatttattaattggggtaattatgcccgtctcaaactaattagagtatcttgaacaaaaaacataatagaattttttttatatgaaaaactttatatgttttttttatatatagtagtaagaatttaaaattataatattttaaaaaaataatcgagttttttttttaaaaaaaaaaacattttttagactttgatggctctaggtctctactaccttaccccctgataattatttaccattacttgttacttaataatatataagcatttaaattgttcaacaatattctttgttgctgcttatatatattttggtgaaagtatagagctttaactgtacaattgaaattattttcttcttttaagacaattaaatttttacttttaagttagacaacaccttaaaaattaaaatatatatagacaatatttttgaaaaattgttacaagatggccattctagagcagttacttaactttcaatggttcagatattataattgagattttctaaactttattacaatgacatgattaactattattaaaggcttctcttgaattcaagtgaatatataatatgacttgacttctctttataaaaggaaaaatatggtgcctaataccacttaaaagtattaaattttatattattaaatttaaactattatagaatgtcacactatttttaaatagtactagacattttttttttttgttgagaaacggtgccaacgacttcaccaatttctaagagagagaagccgacataaaactcgcattcatttattaattgcctcatgtaaaataagagatcgaattggaggatagtcgagccaccaaaccttgctaacagtaattaataaagcatatttaaccattaatgtatgagctgtcatattataagtttctacgacagtacactagactcgccaaactaaagttattaaaagagtattgttattgggtaccagtggtgcttaacatattttagatgtatcgctttacaattggctaacgatattccttaaaaattatt

SEQ ID NO: 326552 - DNA, 1422 bp, Cannabis indica
ttaatttttaaattaattataaccattagttctgatttaatgaaaaaaattaactatcatagttaaatatttaatttaacttacaccataaatactatagctactcatgattgattgtattataaataaaagattatgatacattttaaaattttccttggatagaattattttgcatagattcttatgtatagtataaaatattatatgtgccttaattaacatataataaatttagctttgactaagtatttatgatcattaaaaattaaaacactatgatcgaatttgaactatacatgaatgaattaagtatattttgcatttttttaataaagaaaaacacatatatgttggcacgtagctgtcaaattaatgttgattttaaaagtaaaaatatactaagagtaagagtatacaggatccaatctaattcaattaaaccgaactaatctaatctaatttaattataaaaaaaattagatatttaattacaattagattggatttgatgttaaaagttgaatttcatttaaatttggttggtttgaaccgatccaatccaattacatctaatacatattcaaaaaattatatattatatataattaaaaaaatatttttattagtttttcttggttgaatttgtaataattagttgttttatgtatttattttcatgatgttttgttctattttattagttggtagtattattgttttagttatttcaaatttttagaaggatgatatatttatatttattaaacttaaatgaaggtttatatacagtttttaggtattttttttttcattttttaaattaatattaaaaattaggtgtgtaatttaatattcaattaaaaaaaccgatccaatccaattagtagtatccaaatcaaatgatgattttctaaatttaattactgattagattggatcggattaaaaaaatgtcagattggatcagatgtctaacctaaaatataccatttacagtagaacctctatccaagaatacacttgggaccaaaaaaaattatattctaattgagaggttataactaaatagagttacactagagaaaaaaaatcaaataccaaaaaatatcaatataacaacaatgacattaaacaatccttaatattatatcataatagaattatttttgagtaaatataatatttatacatatattacaatttagaataaaataagtaattctacataaataattttataaaatatatgtatatattttattaagatgtaattattcttatacagaggtatactttgttaatacgggacttaaaaatttataactaattacaatgtaaaggttattcttatttataattggcccaaatcgggactttgatttttttttatattaataaattagagattattcttgaata

SEQ ID NO: 326553 - DNA, 859 bp, Cannabis indica
aagaaagaaaagtaaaaaaaaaaattattaaaattatttaaatttttatgttaaattaatttattttattttttttaaaaaaaatgagaatttatttacgtgggccaatgaaattgtaccacgtgtacaatgtgtacatatagatagtccaacctggcacttaacaactaaatttagatggaaattactaattgctaatagattgcgagttttgagagttttaccgccaaaatttaagttttggaggttaattgctagtgaaataaagtattgggttttttaccgcaattaacccaattactaatgggatggtggcttgggggttttgctaccaaaatttaggttttgggagttaattgctagcagagtgaaactattggagttttggcgtactttaatcttattttatatatgtgtgtaaaattgactgcttgaacactactttcaatattgtaaagtatttcatttttttttatataattttacagaatgttttgaataattataacggacatgattataaaaaaatatttgactaaatttttttctggatgacaaagggtgtaacggtgcacctttttagaagggtgcatggtagaagtatctaaatttacacatgagtttttatcgcaatttacttttatttttatgtgtgtgaaattaaccgcttaaaaactactttctatattaaaatattttaaattttttataattttacatgatgttttgaataagtataattataaaaaaaatatttgactaagtttttgaaaacaaaagggaaatttgatattatatgcttaaaattaatttatccactaaaaatatgctagcatatgcaaaatatacttacactatt

SEQ ID NO: 326554 - DNA, 775 bp, Cannabis indica
aatactatattttatattacatctcagtacaaagattatattttagtcatagatataaaaatttatagctctgaaacgataattttcttagagtttgatctaatgagttacttaaataattgagcactcatttttataattaattttacaaaaatattatttataaggagccaaatattttaagaatacgagtaaaacagtaaactatatccaactttgtagattatgtagtgattgaatgacaataatagttgtaataatggataatactttgaccttgtgtgtaaaaggttaaaatttcgcattcctcacctgaccccctagcggaatggatgtactctttgcttcttccatgttgaacttctgaataactttcttgatgtacctgagctgctttaagctaatagtcccttccttccggttctgtgtaactttggtaccaagtatcttttgaactggtccaagctctttcatctaaaattcttttttgagttgtgctttgatacttttgatcatagatttatctttgctcatgatgagtatatcatccacatggagcaaaagaacacgactatagattgctcaaaattcttaaaatataagcaatgatcgtacgtagattgttcgaacccaatttgttgcatataagtattaaaacatttattccgttgccttggggactatttcaaaccatataaacatctattaagtgtccacactagttctgtaacgccctaaataattaggcacgctactcgagttatttacgaaaccc

SEQ ID NO: 326555 - DNA, 981 bp, Cannabis indica
aaagttcgaggagaaaaattgctaattaacctttttaaaataagtaatttttaatttaaataaaaagtgaaataaaattataaattacatcatattgttaagtaacacaacatattgtaaaatagtataaaaaaattatcttgacttgatccttagtaaaactaaagataggataaaacaactatatttatattattacatagtgataatatttttatacatacacagaatactttagacttgtttgaagaggttgagtcagtaaagactcttaaatacgattctccaaattatccaggattttttttatctgcatggatagtttgagcttgttttatacttatagtatgatctattgcttatttgattgtttcaccagtagagattgtggtacgtcgtcaccttacacgttcttgtaagttggtaaacttactattagtttgcttacttatgagaactgtggagaggtgctgctgaaatttttacaaaaataaagtaatcttaagagcatagattgttctttatgtatattacaaacttgaatgggatagttgcaaataattttgtaagtaatcttacaaaatcctaattggagcaaataagttatttaggctgaccattagcggattagggaccaaaattactccggtgtatagtttttacaggcgcatattagcaccgaaaaaaagctaatttgttagtgtagaggtgaatagcattgacaaaagtccttttaccgaccgagattcgttgacagcttttaccggcaccattatgcaccagtaaatgtttttcggcgtgttgtgactactttttccagcgtaagaatgcttcggcaaagtcacattttttgtagtgagtttacaatatcaaaaataggtttgaaatattttaaaaatagcattgtagactaaaatatgaagaactctattttcggtacggtaaattattttgaatttttaaaaatttatagaaataata

SEQ ID NO: 326556 - DNA, 1087 bp, Cannabis indica
gtattaaagttgttcttaattaactttttatttgatattaagatttttcatatttaccatatcattacgtatttatctatagatactaatacttatatatatatatgcaactattttacgccatttattttaatattttttcgcaaattgttttatatttaattttagtttgactaacaaccaaagaagactatggaataaaaatagtgcatatacagttttgggtgggggggcccagggccacccttggctacaatatacctccgcccctgccttgataggctttgagaggtttacttttagtttaatgtatatatacatatagagatcttgggtatatagtacaatgataatcagtaacaattattccactacgtactcaattttgtaccataaaaccaacaccaaatacttctccttcttgctgaagtctttgggtataatacctgaggccaatcttgcaagtattggttgtatagtcagtaactaacattgattctcctaaaccaactgagtaaactctctccttttagtgttgcacaccgcctcattgtagtatttgtgttaaataggtctgaaactcatcctaggtaatcactaaaacatatcaggtgagagataccatatcccaccatacaaaggaatcctcctggaattgaaaagtagcacaggtcacccggccactaccgttgactgccgtaaaattcaaaatctagttcatagtagtcaaccactgcttgactttcatcacatcttggccacccagaaagattaggggtccctgttttcgaaacttttcatacagtggcactaattgggtactagctgtaggctgctctattggcaacatcggagtaggagcaatgggtacctgaggaggaggtgcaacaggagtaccctattgtctcaacttctgaatctgctcatcttgactaataatcctgcttgcatctctgcaaaccttttgtaacatcctaatgctaaggcacgctacagtgcattttcaaatgcagtgctgtatttgctaatcaaagaatttcttgaaaaacgtgccaaattaaaactttcatattgattattaaacttt

SEQ ID NO: 326557 - DNA, 961 bp, Cannabis indica
aaaatagacctgtattttccaaaattgtacaaaaaggacactgagctgattttttgtgaaaataaacttaatagtaatctgatctagatgttatgacaaaactggttacattttctgtatatgttcgtgtgaaaaattgttttaaagtttgttgtattaaaaaataaaattattgaaaattgagtccagtgtcctatttttaatattttagaaaatatagggtctattttatcatttaacaaaatagaaggtccaattggtaacttttacaaaatacaagatctaaaatagtatttacccataaataattagttaaaacggtaattatgcaagataatcttttaatgaaataggttcatagtgtttacttaaaggatcaaaattggtggaatttccaaatctatcttactaataataagaaagggtccacaatccatctagacgcggccatcataaatggtttgtgtgacggcggcggaggttggttcgggataatccattcaatcttcgtccaccaagcgggacagagggtgacctctaagcaattggaggttctcgctcatctcttgggggtccatatcatctgaaattttttcttccaccatgcagagtaactgaaattggaggcaaatagtggaggtcaagaataaaatcaaatagatatgtagtgagcaacagttcctagctcaacattactccatcaaccatggttacaagccactacttccaacttatgagaaagtaaattgggctaaacaagtttgggagagactttccatctgaaagtatcattttatactttggctagctgttttacaagactgcaaacagagatagactaatgaaataataatttccttctaaaaattataatttaatagaaagaaaattcaaattaatgttaagacaaactaataaaaaaaaagagagagaatcaaaatagagagatagagagagagag

SEQ ID NO: 326558 - DNA, 1472 bp, Cannabis indica
tcaaacaatctcaatagttcagggggaatttttaacggaccaaaaaagttcaaggggcatgtatttggtacatgtcaaagttcggagagaaaaattattaattagcatacttttaaatgataaaaagtgtaaatttattcaaaagaaataatatataaccagtttttcttaccaattgtgttgacattaaactattttgaggatattttgtaatatcatgtgttttgggtaggaataaaaatataatattaaagtagtgtgaaaacacaattaataattcttttctagataaatttaaaccacacacaagtaaaataggtagtgactaagaaacttatatttagtatgtgtaatatgggaatgtaggtattagagaacaaactgcgcttttgtctgggttacattttgtttagtgataattaagttataaattttatatcaaattttgaattttaatatttttttatataatataattccttaattctcagaaatacaaattaataatctaagaaaaatcataatacaattcttcacacatgactatatttggaagttgaattttggtaagaaaaaaaatagggaaacgattaaaaaaaaaaaatacgtgtagacaacaaaaataaataaattaatttttcaagtttaatatgaagatttttaacgaatggatgtttttctgtataatttttctttccataccaaatatgagatttattattttttatttttaacttcttagtttactcatcatacgtatcattttaaaatcattgtaatcaccatatgtcactcgtagtcagtttgagtcgttattatcactgtatctcacttgtactcattactatattcaaagtcgttttcatcacatatctcacttataatcgttgtatatatttaatataataaaacaaattattaatacaataatataataactaaaaaaattgaattctaataatatatattgaaaagaaaatgagaagaaaaaaaatcatactaacaaaaaaatataaaaaaaaaatataaaatacgacatgctaacaaaatttgtggtatatatactattttttttttagaaaatagcaaagtttttcttcctttttttccaaattaaatataacaaaaattttgaatcttgaacaaaacaaaaaaataatatgtcacacaaatctattctggaaaaaaaaataagatgaattatgttgattgcgactgaacaataacatcttagagacatcaataacaggaactcactgtaaactacattatacaaaaatatttcattttatattttgaacttggagagaacaatgacctataagatatatatatacaaaaatattttataaactagtttagaactaataaagtaattaattattaaaatctttaataatattaaaaatttcactaaaataaaataaaaaaaaaaacattaaaatggacatcataacgacattaaaaacgga

SEQ ID NO: 326559 - DNA, 820 bp, Cannabis indica
tcttaagtcatataaggttggtctgcctaacatgaaattaaaagttgaaggaacatcaatcactaagaattgtgccattactgttgtgctcgtcagagcttgtccaactgtgagtggtaagcgaatctgttcgagtggtgatgcacttttcctggagaattcgtaggctacctcaatgcaaggaaccaaatctttaagttgaagtccctttttttgtaggttgttttgaataaaatatttaaggaaggtccattatctaccattgtctgagccactattttttttttttttttttgcaatttgcattaaagaccaaagggtcgttctgcggataaatgacgtaactcgagtctgctttgctaaaaattgtgactggttctccaaaacatggctatttagggtttctttcttctacagctagaactgcatcagtttgttcatattgtatggctcaggcatacttttgtctaactttacccgattttccagcaaggtgggggcctccaataataaccttgttgggattttatgccctaaataaaactcatttcaatacaatctaatttgttatcaatagaagattagaagtcatttatgtttacatgtagttttcatgtttatggtttaatgcataagatttctattaaatctagaacatatagttattcacaattacagtgatgtcaacacagtggaaagtaattgtgattatatgcttcaaaagataatgtcccttgattcatcagtgcattggatttacactgatgtgatagtcagcgataaagtatacttacacctaggataagtgttatgttctttc

SEQ ID NO: 326560 - DNA, 583 bp, Cannabis indica
gtgaaataatccctactataattttttaaataaatttttaaaaatagtttttatctttatagtaagggctcaattttttattttacctataatccatttcaattcagggtcagtcatgattacatgtataatttaaatgaacaacatcaaattactaaaagtggaaatcgatcaagggaatccaatcaaacagaacagaaaatgagaagacaacttatacaaggaaaacgcaaatggcgaaaaagaaatggttacggctgatggtaataatcatatgtaacgttcttgaataaggtaattgatttagtatacgacaacacatcttgaaaggaagaagaaatatctataacagaaaagttctcaaaaaagaatgaagaaattaatcaacgcataagtgacacacgaattagaaggtataagcttaaccaactttttagatcgcgatgcatctcaatgcctgaagttaaactttgatgctgctgtgaactttgatgcaaaaatacctaatgtaggtgcactactacaaatatcagaattcgcgacgattctaaaaactatttttttcggggaccgtcgctaaaaa

SEQ ID NO: 326561 - DNA, 1540 bp, Cannabis indica
attagtaacctgctattacaggttaaaaaaaaaatgtaaccatatggttacattaaaaatgtaactattgaatagtcacccatatatatatatatgatgatgatgatacaaaaaataaagaagaggcaaagcaattaatggtgtgtactacttttgagttttggacaaatgataagaaatataaaaaaatgtaggaaagctaacaattacaaaactagaaaaggagagaaatgtgtgcatttttctttttccatttgaactcttcattccaatcattattgttttataacttttttatatgtctatctttctacaaaacgctaccataaaccttcctagctaggattcgattattataattagggtcatgtgaagtcatcaaattttcaaaactacctactttaaaaatagtttcattcgacaataaatgcaactcacaacataaatggagaaaagaaatatttcgacacacgtgttgtgtgaacactcacctcttccctcaattataataaggaaaagaaaaacaaatatttaacctttattttcaatattttaaattattcataattaatatcttaattacaatgtatatataattatagaaaaagaaaataaattaaaaaactctctagatcatgcccaaatagattaagagtgtactgaaatgtacatttaaaaggttattttttttttttttaaaaaaaaacatttagctattattgaaaaaatacctaaatgtttttgtggtgtgtaaagaaaatgtatataacatcacttttttcaaatatataacaaaaaaaaaaaaaaattatattactaaaacatttataaagaaccctttaaatatttatacagcccacaaactaaatattacaataatatcttttcttctaaattttcagtcgcacggaacgaagcaaaaaaactcacttacgcaagcttcaatcgatcaacccagcaaactaatcgaaacaaaactaggcggagaaccaccattaattttggcgactttacttgagaagatgatcggaatcaattaaaacagattttgtttcaaattcatggaaaaagtagaaaaaaaaactactacaaaattaaaattcaaccagaaaatccagtttaattcgcataaaaaaatatatcaatactatagttaaatgtttattccggtgcatttttgttatttttcagatttttaatagagaatttgttcatattaaatcacgaatagacatgtagatagagttacgtacgtgaaaatactattctggtttttaatgtttcataacagttgcataaacattttgtaaactctttgaaacttgacatatcaattattataaattgataacaatacaataaattttatcatatttacaaatgtttcatattttcaatacaatacaaagttctttaaagaaacctttataatatatttagttttattaatataataaattagttgatataaagttagtttacaaatgtttaacagttatttctccacatattactattaaagtacaattaattatcgatc

SEQ ID NO: 326562 - DNA, 633 bp, Cannabis indica
tatccatcaactatattttattaaaaccaataaaaataaatgtaaggccaaataaaaaaaacgtctagcatataactaaattaattactaccattagattaaaataaaaggctacaaaaatgttctcatttgtgagaagaaagtgattctctggcctaaaatgttcctatataaatatataatatataattactttttattatttttgttaactttttgaaaaaatatggattcaaaaattaacttttaaaattaaaaagaaattagtaatcggccaaaatacaaggttaaaaaaatatatctactctttctttaacctatttataaaatatggtatccaaatttaattctaaaaaataatgagtcaaaagtgtattattgataatcggctaaaatatagcgtttaaaatagtctaaattcatacaaataaatatattatatttatttatatataattttgactaagtttaaaatttataaattttagaaataagagtccaaattgatagtaaatcatagcaaataattcaaataatatatctatttatttctattttaataaaacacaaatttaaaaatagttttttcaataaaataattaatattttttgcccttgagctttcgacactac

SEQ ID NO: 326563 - DNA, 1114 bp, Cannabis indica
caatccacgaagagccttatgagctccagaacgagtctgatcaagttaagctcactgtttcctcgaagctctagctactaaagtcgagttgaatccagctccaagttcgacaaccattttaaggagaatttgatgtggacattgccgctgagagcacatgcgagctgtgattgtggtggctccacggaaatcgctttagcttggctcttagttcttgcaaaaattacttcaccttaatgacggcttctactttaagctcatgaagaaaactcacaaaagtgactcgacgagctctgtttgaacatagacgaagatctcgacaccaaagttggagtttcacttccggcaccactaacgacggagaatgcatcattgatgttaatcatcgtcgccggttcgacactctaaagtaaaatggtatcttcatcttgaagatcaagcgtaacctcgacaaactcctcttccaccacagttgtaggggtgagcaaaaaatctaagaaactaaccaaactgagtacaccgaccgtccgaacaccgaaaaaactaacaccaaaaaaattgaaaactgaaaaaactgccttcgattgaaactgcctttgcacggtcaattttagtgttagtggcaaaccgaccgattaaaccgaggactaaccaaacatatatattatacactatacatatataatataattatttttgtacatatttaatatacagttctattaaactagttttacttcttattttttttatttgaaatctcaattattcattaatttattttattataatttgatgtatttacgtattatatacacacattcataaaatagtacaagtttttaatataactcattaccaattagtagcacaaataatttgagcaaatttaaagaaaattattttacattatttattcaactaaaaaagttttgttcttaaattatatgatatttgatacaatactttaatttttttagtttctaaataattatagcaaatttaaaaacttatttttttaaaaaaaaaagaagctgaccggtttggtcggtttaaactgaccaaaccgtggattaaaacggttggtttttttacatttatataatggtcgatc

SEQ ID NO: 326564 - DNA, 593 bp, Cannabis indica
tctctctctctctactctctctctctctctctctctctctctctctctctctctccgttgccaattttttgtctaagcttgatgtgcgatgccttcttttactcgacagaacataccttgaagatttggcagggccgtctcaagctagtgaaaggtcaggaccggccttaggcataggcggactaggcccgcgcctagggcccactcattttaggggcccaaataaaaaaagatattttaaaaaatatacatttttttcaataatttttaaaatacaatttatctttatagtaaaggtcccaattttttttttctacggtccatttcaacttagggtcggtcctgtgaggagcctagggcaaaatttaaaaacaaggctttttttataattaattttaatataatatagctttgaaatttaattaataagagtattcctaataaaatattaaatttataatgcattattactatattttagcactaattttataaaaacaattattcaatcgtatgtgaaaagtaatatcaaatatatataaatattaggggtgttcatccaatctaatccgcactattttgctcatagtgca

SEQ ID NO: 326565 - DNA, 888 bp, Cannabis indica
taaaataaatttccaacaagaaggatatcatcaataaatactatgacacatatatcaaggaaatccttgaataccctactcataaggtccatagaagctattggagcattggttagtccaaaatacataactaggaattaaatgtggccatacctagtatgaaagggagtcttttgagtatcttcctatcgaattctcaattgatgatagcttgagtggagatcaatcttagaaaagactatctttcgctgaagttgatcaaactatcaatcaaagacaaatggtatttgttcttgattgtcacattatttagttctcagtagttaatacacatgcgaagtgatccatctttctttctaacggataatattgaagctccccagggtgacacactgggtcgggaaaatcctaagtcaagcatcctctaaagttgtatgttcatttctttgagttcagtaggagggtgttcattggatcacatccaatggatttagacccaaccgatccaatcaaattatttattggatattgaattttgtcatccgatccaatccgattgaattgagtcatctgatccgatgaaaaccaatggatgtattggatcggattggttccaaccattaaattctttgactagttttcttttggatttgattggataggatgtatccaatcaattttagctaccatttaagttgattatattaaagatatatatatatatatatataaaaacataatttaaaacttaataatccaacatacataataaatattagtttagtccaacctaattcttatgatcgcataataaaactgctaaaaaaataaaatttattcaatacgcattaattattttattaacgtttaggaagatgagaattaata

SEQ ID NO: 326566 - DNA, 719 bp, Cannabis indica
agaaaaaaacagttaaatctacaacctgacactgggcattggaaaactgcctttaaactccttttcaattatattgttgtagcttgtaaattttaggtgtatagagataagtgtctcaaggtcaatagagataagtgtatcttgtatgtagtgtggatgtggaggattgtaattggtgtaggtgcacatggatcggagaattgggagggagtaatatataattatatactgccattagtagtttttatgacaattatagctaaactccttatttagtttcaattgttatagtgagtaaaagatttgaccataaagctcttatttattgctgctgactacttatataaaatcttgatggcaaattacacaagcaataaattttattacaatcaactatctatttaaagtattttacttgatttcaaaataataataataataataataataataaagtattttaattctaaaaaatctcatagtatttataaatgacaattttatttagtaattaattatagttattaaataaatagttttgacatttataaagttgaattgaaaaatatagtattattgaaaagaagaataagtagttgaaataaagtggcaaaaatctaactagagatgggtccactattgtgtacggccataagaattttgcccaatatttattctttttaatccatataattcaacctaagccctagctgaaacac

SEQ ID NO: 326567 - DNA, 2433 bp, Cannabis indica
tttttttttagttaaaaagtaaaagaaatatttttttcagcatgggcttaagcccacactggtccttcattgggttcgccatagtaatggtcggaggaataaaggcctccacctgaacatggtcagccaaagggtggggcagccggggcctaggccccaggcctcaccatttcgaagcccccccaaaaaattaaaatttatttatatttttatatataaataaaaatataatatatatacattttagtttaataaatttcatagaagaattatagcacaattgttaagagtgagtgggtgtactagatttagttgctgggaagaattcttgatttatgaaaaattattgggtgatttttttttaattttttattcaaaaataacagttttgttttggctttgccctacatcctattgccaaacccctcttattcccaaatgacaaataccaaggcttcgagactgctaacgatggcgagtttagggtgacgacaacgactaccaccaccatcgccaaccgcatcaacaaacagaggagcagaatcacactctctaatcaacgcgaagaacaagttgtttctcatgttgatgatgatgatgagtcaatcagatttgtcttatgttgatgatgatgatgagtcaatcagatttgtctttttctatacataattcaaaagattaacataaaattccaatcgcttttaggtgtttgccctcattattctataatggagatttaagttttgtaagtacattgattcccaatacaaatatattataattaagcaaaatacaccttgcagaaataaactatccaatatccatgatttactaatttgatgagaaacagagatattccatgcgggttagtgaaagcttgagtatgattgaaccttttaagaaacttgagtttgtagaagagttatccggacttttatatcactttctttttttttattttttcagatgtgaggtctttagcaaattcttatgtactctccacactttccttatgttgattatggaataataaggactctacggaaagagtaagaggttttggtttttctattcatgttattgtgttcactttaaatacatatacatttagttttcatcattaatttactttagttttgtattttttgcatggcatgtatttttattcttcctcaactggcaccaaaaaggtaataaatatattatttttttatctgaattgttactgtactgctcaattatgacaaatctttgatgtttggtttagtaaatttagtatttgtctttagtttgggaaggaatcatcagtgcaacctattctactcttaatcaggtggcttcatgttcaaatatcttggagtttatgaccctaaatcgaggtaccaagtcataattcacactccaagtgttatttccctcaaggacattgtgactggaaataatatactcaatgttaatacaaggtatgattgtgcttattaatttatcatgtaccttttaactttctctactttgattatctttatgtattgcatattcttgttgtttttctttatgtgaacaattatattcttctttttggttctattctacttgacttaaaaataattaaagaaaaatatcaccttctaatataacttagtgggttgaataaactttgaggagtgtttattgtacttatgtgttaaggctaattactaatgagcatcaatattatcattaaaataaaataccattctctaaagatgcaattaactttttgtttgtttgtttttctctctaatattttacccagtaatcttaatttgcatgttattttgattcacaatgatgatacagatgtggaaggttcgaactagctaggagagactacaaactctttttagagggactagatgatctaaatgagttttcttcccctctaagttgaaaaagactattggaccaagtacttagtggaggaaggattaatgtaatctttttagtgtgcttaagagattagacaaatggatcaagctaaatgtttaagagtgaaaaatacaattatcttcccttttaactttttgtattttggagataaaatgacttgaatttagttctttgttggatataattgaaagtaatatttcatatgcgcttgaaacattatggagggtggcaaaaatgagattcaacaagactgcacaaacacaatatgaatattttacatgtgccgagattgcttctcttctgctaggagaagaaagagctgacacctccataatatattggcatgtacacgtgctaacacattaaaacaaaaaatctagtgcatgtttgacatcataactaaaaaactgtttttgtttttaaaaaacagaaaattatttttaaaaaacaatttggtttgtttggccttattttttaaaaacagttttcagaaaacaaagttac

SEQ ID NO: 326568 - DNA, 1045 bp, Cannabis indica
aaaaaaatttaaatataaataaataccataaaatttctcagatcgactaagtggaaggccttggattgtggtgttatcttggataaacttagtctgaagttaagtagatgggctagcaggaacctatcctttgctggccgtgctcagttaatccactcggttcttcttggaattcggaacttttggatgagcctattcattttaccccaaaaattgtagcagccattgacaagaagtgtcgagattttcttggggtacgaatggtaatagaagcaagcttcacttcccatcttaggagaacgtttatcttcctaaacaatttggtggcattggtttcagggaaggaaagaagtggaacttggctatggttgctaaacatttatgggcgctttcaagcaaacaagacaacatttgtgttaagtggatcaattccatgaacttaaaggaccaggatgtttggtcttgtcctataaaattagatcttagttggtacttcaagaagcttttgaagatcagaaatgtgacgaatattggcatgctgaaccaggcgacaaaagggaataaattcaaagtgagcaggttctatattgagttaattggggctgcgaagacttcttatgctgctactgtttggcataagttcattgtccctaaacacaagttcattttctggcaaatcatcaacgagcagttgctcacccaagatctcttgagtagatttctgcccattccttcagagctttgggcggtttgtgaggatgcttcggagacccatagtcacttatttatggactgcatcttcacaagaaaattaattgattgggtgaaaaattgggcaggtaacttgagctggccgaagagcattagtgacttgcaagagagacttttcccagccaaacccgacttggcattgttgatcttgaatgctgtcttctcagccactctctaccagctgtggagaaatagaaatgattatctttaatgctatttgtcattctgcttcttttcttagcaaagagattaaatgtatggttaaggctagagt

SEQ ID NO: 326569 - DNA, 1866 bp, Cannabis indica
atattgttattgatgtaattaaatattaaatttcatagttttcaaaaaaaaaaatcaaatttcatataattttttaaatgaaaataaatatcactaaatatcatatacttcaaattttatatgattaaatatcaaatctcattgtaataacatttatataatatcactaaatatttacaaaatatctaaaaaataaaaaatatatataaatagaaaacctaagaaaagaattattatggtatatacctatcacaaacattcctttaaaaactaataataataataataataaacaaatataatttatttatggaatcccaatcccattatataaaagataaataaatatgacattaattcttaaattctcttattcttattattataataaaattatttaaattaatattttacataacagtgtttgtaccgacacagtacactgtacaaaaaagacaaaaacatcaccaataaaaatgtttttttttttgtaaagtttgaatctttcggtatgaaatgaaaaatatttaaaggggtttacaccttttagtagagtggtcactgtcattgacactcaaggcttaagagagagaaactagtgagagagagagagagagatatggaaggaagctcttctttagctcatggtgttgggattgagaaggaagaaggagataatcacaaggaaatgattgaaaatccaagtggggtttgtgagtttggaccagaagatgatgatgatgacgaagaagaaagtaatgttctttcttctgggtttgttcctgggcctctgctttctctcaaggaacagattgagaaagacaaggttcatatttttcttcccattttaactattatttatttaataaaagggcttaatttcattgggtttttgaaatgtgtcttatgaggattttataagataagcctcagaaatgatatgtttgtttttgtttaaatcataaagttttaaggatttgattatttgattagagtgtattatatatgagttcaaaggtttgtttatgttatttagaaaccatatcatatatgagattaagctattttgttcttgtttaagatctaattgctcaagtttagggtccttttataatttgcttactttggcattcaaagcaaaaaatcgtttgttctttgtttgaataaagtttggttctgtttggttttccactaatggaatggaacagattcgaaatgaattaattttcattccattcatttgtttggtttatttgcattttaaattatgtaatgtcattgtaatagaataatttttccacgagtttgaaatgaaaggaaagatcgttccaatgcaaaaattttccaaccaaacttacccttaatgttctaatttagatctaccaatgctaatttgcaggatgataatagcttaaggagatggaaagaaaaattgcttggttcattggaaagtgatctgagtagtgagttttaaagacttatattattgattttgttttgtttcccatatctttgttttgctctcttattggttttgttcttaattattaggccaaatggaacctgaagtcaaattccattccattggaataatctctaatgattttggggaaatcaacacttctttaccagttgatgaaaacaaaagaaacaatttccttttcacactccgggaaggatctcattaccggcttaagctaacgttcagcgtgctacacaacattgtttcgggccttatctactccaacactgtctggaaaacaggaatcaaaggtacccaagtttggtttttcttcaattactaactcatataaacaaaactcgttttttactagtctgataagtactatttgaaatcttcggttt

SEQ ID NO: 326570 - DNA, 972 bp, Cannabis indica
gttcacatggctttgtcttccaagtcatatatttagagtttgatatgcttatacatagtgatctagtctaagttacttacccattagaaaaagaaaagaaaaaaacaacaacaacaacagaccccacctgtgtaataagctttttagctaaacaaagaaaaaccattgtagacaaatccagctactacttaacttagaaagacaataccatatgtgattgagtattgtggtaaggtgcatgtatatatagataatgattctgtggcaaagcaattaggtttgtttggtatttgaatcttcacatgggtttgtcttacaaggtgaacaacctacaactacaaggataccccacttgatacaaaatgaaatatatgcagcaaaagtgaaaccatttgaaacatatttgatcatgacctaatggatccttcacctaacaattttcatgttgctttcaaataagtaggaaagacacaaccatgtgatttctcaaagattaagtcactcactagaccccatctcattatttgactctttagtctccaccattcatttccacacaacacattgattatatatatactcataagattgggttcttcaacatctcaactcctcacaacttcaagtactcttagcttacactttcttccttcttctaccttgagaaacttcagcaatcatgggttttcgttttcccggtgtaattcatgccaagcaacttattcagaagcctttttctagtgcaaaagatgttccgaaagggtatttggcaatttatgtagggaagacaaaatgacaagatttgtgatccctgtatcatacttgaaccattcttcattccaagaattgctatgtcaagctgaagaagaattcggatttgatcatccaatgggggctctaacaattccctgcactgaagatgctttcatcaatcttatttctagctttgatgtatgatgaggagtatagatt

SEQ ID NO: 326571 - DNA, 1026 bp, Cannabis indica
gaatggattgaaaagatagtactcgtctagggcttaacaactgttctacgcaaatcttctttatttgtctccaataatcaccataatgtgcaaaaacaatatcaataccataatacttaccagcaatgaggagaaaaggcctttcagaaaagttgacatcatgagttttcatcacctcttttgcaatctcaggtgaagaaacaacaatgtgaggaacttcaccgagttgaaggtgcatcaatggtccatattgcttagccaaatccctcaaccggcgatgagggagaaaagatcctagaaggttatgtagatttccaatgagaggtaacttcattggccctggtggtaaatttggtgttaaagaaacattgcttgttattatggctttgtcatgattggtttttgatgaagatgatgatgtgttcataatcaatgagatgattattataagaagaaatgtgagaaggaataagatagatggacagaggtactccatgatataaattagagatgaataatggaaaagatttagtgagtgagagaacataagagattattgtttggtatgtgaaacaatatgcatgaaactactactcagtttggtcatatatatacaagtacttctccatgctaattaattaatattaatgaaatgtatcatagatgcatggaaaaatcaaacaaagaaaagaagactgagaaaataattcaatgtatagaaaagaagtatattacatgtgccatatgatgatgagatatatagctcatagctaggatgcgataaatcatggcaaattaattaaggccgcgtttggttagaggtaatgaaatggaatagaatggaaaatatacaattttcattccattcttttatttggttgtattttaaactattggaatatcatttcaatagaatgacctttctaccattttaatggaatgactattccattttgaaatggaaggaaagaccatattccaatgcaagatttgaaaaaatttgacaattttttaatcaattttttt

SEQ ID NO: 326572 - DNA, 616 bp, Cannabis indica
taagtttatttggcatttaacagcaaaaaaactaacgaaaaaatagagagctaaatagaattaaactttgagaagttctaccccaataattcagtactaagggttagagtttggccgcaaattatccttttacaaatgataaccattattaaaattaagttttaaaatatatttttttaaaaaaaaattatcattattaaaaaataattttttttagaaaaccaacagctttccaatacattttttcaaacgtacgttaatatacatttttcttttctcttattttcttaggcatttataaaaaccattaaaattaataattattaacgattaaatgtataatactattctttcaattaattaaaagcctaaactcaacaaatttattaatatttaaatcttaagtttctcaatcaattaacagtattaaaaattattatttagttgaattttagtttttaaaaaataaatattaacaattattgttatctttcaaaaaaaaaaaaaaaacaaatactaacaaatgtgtgtgtgctttttttttggtaaggaaataattgttttcctttaaatattagataagaataattacatagaaaatataaattgatatttt

SEQ ID NO: 326573 - DNA, 969 bp, Cannabis indica
ggtgaggcacctttatttgttgacatagaggaatttgtgttaggcgacgatgggtaaccagctcaggatactttgcacagccaggcctagaagcttccctcaacattggaagagcgagcagatgcaacctgaatctttagagacactacagtacctccaccatctccatcacagaggaatgtcctgttcccccatctacatctattcctagcactttacaacctcaggaactagtattctctaccatattggcaaggttagagagtgttgagagggaacacaattctttgaagcaaggtcagactactattgtgaaagggtagacacagattatgggttacttgaagacccttaatatccttcatggaagatcagagaaggctagatgcagaggcagagacagagccacactctaagtctgctagagatgattccattctcttgaatgattataaactcaatctctaccctcaagcttccaaacaccattatacataacgtatacagaaacaattaaacctgtcatccactgacataaaaaataaaaaacacgattaaaaatgtagaacaaaaatctaatagaaaagtccaaaaaaacaataaattagtcaagcattgaacaccattgggcccatatcagaccaatatcaaaccacatctgaccaatttcaagaaataacaatcggaccccatcggacataacatcagacttgaccacaaaaactacattttaattggacatcaaactgatagtcagtcctatattagaccatctaaaccattaggccaccatcggaccactattgggcctatatagacatcctccctaacctcaaatccaaataaccatcaaaccatcatcagaaccctatcgggctgttgggatgtctgccctaaataaaactcatttcaatataatcagatttactaattaataaaagattagaaatcattctatattgcatggtt

SEQ ID NO: 326574 - DNA, 783 bp, Cannabis indica
aaaaaattatatataccatattaactgttatccgcattttcataatcataacacgtggatttttaatcaagaaagactaagaagtcatcagctgcccaacttcctcaattgatgctccaggaagataaaggcaccaacttagtggaagagtgtccgagaaggggagttccccgactgctagctaaacagaggggatccgtaagccaagctctccctccattccaggaactaaatttgtctgctctcgagaagaatatgaattttccaagaagggccaaggaatttcgagacacgctaaactgggctacgcctttagcccgctaaagcctcacctatacgtgttaaactacggccccagtaaccaggctttttcatgtacgacgttagaggctttcccccacgatacactatcatacagagcatgcgtgtccttgtgtacttaaccaaattatccaatggctagagataagggaaattcaataggagaagcgctgaggtgacacgcgtttgtgccccagctcatacgacatgatgcccttaaatgccatataggaaatacgccacttactaatccaatagtcagatgtcaccctaatgtcgatccatccaaggcagtgttgggttttatgaccaaaaataaaacttaaattcaatgtaatccgtattattcgatatcaataaagaaacagaagtatttttcattcatttgtgtaatttttggttcacattatcaattacttgttaatttgatttataaattcatccaaacccttttcacattta

SEQ ID NO: 326575 - DNA, 1131 bp, Cannabis indica
gttctcaataaccttctttaacttttaatatcatagacgaagatatcaactttgggatttcacaagatttaactattccttcgtatgaactccatatcttcatttactgtataaattgtttgaattgatagaaagcatattaacttggcatgtccaattactactactcggtcaaaatcataagatcccacagtacataatccataattaagtctttctattctccttatgggatctcttaagctgatgtaattttactagttgctgatgtactgatttacttattaacaagttgaatgttcgcttctgatagatatccaattatagcattccttacttccctccacaaatatacactcatctcaatgccttgtaaatctctacttattaacacattccttcctcttgataatttctggaacgactgctgatcctgcattctaatactaatctttcaagcgtactttgtcctcactcgtacactttccaatatgacttcccaaaagatttctcatcttgagattgctccaagttaagtatgtttaactctaaggtaagctcatggtgggttatcaaaaagtagatgtgttcttgtcattcctaattgtatttcctactttcatcccttcattagttatatctaatttccatcattcctttttttcacctcttacaattccttatctgtattatttacttaaacttgaggagtccctatcttgacatcaattcgaaccttgttcattttaactaatttcaaactgtatcgatttttcttgaattgacacaacttttaaatattttaatcattttttacacataataactgctataaagttaactgattcaatgcatatgataaaagcaatactactcgtaccgagtacccatagctaaactgggagtattcatttcctgattcctcaactaacaataattaatcaaagatcataccttgatcctgagatcccattctttctttagtaaggatcttaataatcttcccaaacatatccagaaatatacacaccttaagtacattctcaattttactgacaattctttggtatgaattgttgaaaatattttaccaagatctagatatactaccatgtatatttcattaacatc

SEQ ID NO: 326576 - DNA, 739 bp, Cannabis indica
ttttagttaaaatttgaaaaatattgttgattgtatgtttgatttttttatataagtaaaaaggaattttttgggagggcctccaaaaataaagggatgatttcataaatacacaaaaacaaacaaaaatcaacaaaaatttacaaaaatacaatggtaaatgtttaaatagtttttaaaatttttaaaattttggttataggaaatacagttttttgatatatttttatgttgtattattgttaatttattgttgattttttttttgctatttgtatattatttttcatgttgctttgatgttagtttgttgttattctaatgttgttttttgttattttcatgtaattttcttgttataaaaaatatatataaaaaaattgaatataagaaagtaaaaattttacaaaaaataatttttaaaatttaaattggcttgtgcccatatattctaatgataggccatgaccatctgtgtgcacttttctctattatttataaagagaccttatttataggagcaaactccaagagttgtttgattgaagttgtcatctcatggacactaagcttaggaagagccacaccaaagtctagatacacctgcaaattataaaagcaagtagtagtttcaatgaaatagtttatttccaattgagtaatagatgttatttatttacaagggaaaatatttaggtgtcgtttggtaatacttttgttttttaattttttaatcaca

SEQ ID NO: 326577 - DNA, 883 bp, Cannabis indica
ggtcttccatcatacactggccgagaaaaacaatagttgtttagtgacattaaagagaagatttggcgcctaatgcacaattggaacgagaaattttttttggctgggggcgtgaagtgcctcttaaagctgtggtttaagctattccaacatatgttatgagctactttcgacttccagtctatgtttgcaaccaactagaatctatgatagcaaatttttggtgggggtcgaatgagaatggttcaaaaatacattggagagcttggaatttactatgtaaatctaaaacagatggtggaatgggatttcgatcttttgaaaaatttaatcaagctttgttggcaaagaaagcatggaggttgttggaaaaaccagattcgcttcttggacaattactcaaaagttattactttcctcacaatgatttcctacttgctcctcatggacacaacccctctttagcttggcaaggaatcatttggggacgtgagttgctcattaaaggattacgttggaaaattggtgaagaaagagagttttgggctgcacttgatccatggatacctggtcaggattcgttcactcccattcgatttactggtcctgcagatgcaatggttggccacttaattacagatgaacgagtttggaatgtcccccttcttcaacaatggttttctccattggatgtcgttcgtatagtaacactgcctctcagctttttttagagtactaatgctcttatatggcactataacatctcgggtacctacacaatacaatctggataccaccttgcaacatctatagcagatgcggaagccaataattgctcaagttctaattcacaagcttcttggtggaagttcttttggtcttt

SEQ ID NO: 326578 - DNA, 1086 bp, Cannabis indica
tttctttacatggtcaaataaaaaacatggggatgatcaaatttactctaagattgacaggattttaactaaccagacatggttgaatgcttatgagaatgtcgaggctacatttcttaatgagggattattcgaccattctcctaggatcctaactttgtatcctcatttgaatggtgggatcaaacccttcaaatactttagaatgtgtaaatctcattctaagtatgataggagtttggaagagatatggaaacagcctatagggggttcaaagatgtttcaggtggtctcgagaatgaaattattcaaaggggtattgaaggacatcaaaaaggagggatacatggacttgcaagttgctacaactacagctaaagctaatttggacaacatctagaccagattgcagcaaagtccttgaattttgagctgcataatgaagagaaggaggctcgggaaagatatgtaaaagtgcagcaggattatgtatctttcgtgaaacaaaaagcaaaaatggcatggataaatgatggagataacaacacagatttgtttcatgctagcataaaacaaagattgaggcaaaataggatcttctccattgagcaacaaaatggagaaagagttaatgacccgattctggtgcaggaggcttttctagattattacaaaagtcttttaggaactaaaatggaaaataggaaatcagtggtcaaaggcattttgaggagggatcctatggtatcttaggaacactcagagctgcttatgaggaaaatcacaataaaggaggtgaagaaagctgtttttgacatccctggatcaaaatctcctggccctaatggttactctagttattttttccaagataactaggaaaccattggggacaccattttccaagatggctcttctttccttgagaatggaaagattcttaaggaaattaactcaactatgattacattggtgcctaaggtaaaatttcctaatactgttaaagattttagacctattgcctgttgcaatgtcatttataaaattgcaactaagcttttgagttctagaatcaaattagtttta

SEQ ID NO: 326579 - DNA, 1181 bp, Cannabis indica
ttttttattatttttatatgtttttcttttgtaagattcatgaaaaattaagagaggccaatacgaaaagaaagataaatcttttctaaacaataaaattttttgtctctcttaaaaacatgaaaaagaaaatagtaataataattatgatttggtttgagttaaaaaaaaaaatcacaatattgatttgattgaaaaaaataaaaagtgaaacaaaaatttgattgaactcgtaaaaggaaattttatatacctcattgtcattgtgagaaagtctataattctttcattattggtgtacataataaatttgtgataaatgaaaaatagaaagtaaaactcagcagtcgagtctcaaatgtagaaatgaatcacgtgacattacattacattcctaaaaagtagaaaaatattaaaaaagaaaagaaatacatataaattttattcattttatcgtttggttagatgttaaaaagtatacatagtctcgtgacaaaattgttagaacccaaaaaaggaaaccacttattttatatttcatccttagataaataataattaagaagaataataattttatttaatttttaatttttaattgagccttttttattttacaatctaaatcgcaattagaaaccacttaaaactactttaaaaatctaaaccataaatttttaaaaaatatatgaaataatttcccactttaattttacctagggtgtgtttggaagtaactatgtaattactaggtggggcaattactataatagtaattacacagtttaataattacactatattttaaaatgcaaggtgtgtttagatataaggtggtaattacatatgaattcctaatatcttgtttggcaaaatagttagtaattacataggaaaacaattttttttagtagctaatgtttaatatggaaagtttttagtaattacacagtgtaatgtattgaagagtgtaattggaacccctcaattacttccaattacacagttacagtgtaattacatgggcagacaaaaatgccaaattatataattatctcaaattacacacaaatctaattacattttggctttccaaacacacagagacgtttggttgggaggaatgaaaatataggaataggaatgggaatgggaataagaataggaatggaatggaataa

SEQ ID NO: 326580 - DNA, 888 bp, Cannabis indica
aatagaaaaatggtatttttaaagaaaagataagtttcattaaggaagtaataaaatggaaaaattcaaatttgtgggcctccatatagggtttgaccaaaggggtttaatgaagtcattttcttatctttttttaatcaattttaattataaacctaaccctaggcctacattataaatataacattatagttcttaacctaataacaagttttgactctctctttagtattgagtgatttctcacacatatcaaggtaatactcgtgatagtatggaagactgtgtgtcttttacaacccaaaagagaatccaagtttagttcttgatcacactctgtgaccaaaaggatcaagggtgagagaaatgaacaaaatgagttaattaattctgctgcaaccagtgtaaggttctactaatccctttatgtgtttatgttattgttttaggcttttccatattaggatgttagattaaaattaatttaacatacttgaatagtaaataagatcatggttaaagaatttctaatagtcgactccataatcgtcacgatgtaatagtcccgcgcaaagccacctatcattgtcacttttttgtcattcgtattggccagccaggcatagtccagttgagaaaaatgaaagtgtaacgtccccgcttcaagactccattgggcccttacacccacagaataatgtctcttatacacgagtacgtcactctggctgtttcatggactgatgacagaccctacagaccaacacgagtgtttccaacgtgctttgtcctcactcacacgcttcctgggaaaacttcccaggaggtcacccatcctgaaattgccccaaatcaagcacacttaactgtggagttctttcgtgatgg

SEQ ID NO: 326581 - DNA, 1159 bp, Cannabis indica
aacgaagaacgacccatcatttttcaaaaagagagaaaccaaaaagattcaaactttgaagaacaaaccttggtttgatcaatggcacaacaaattctgagtctcttggtctcaaacctcttaagaagaaaaaaaagggagcattttgtgagcaaagaaaggaaattatattgtaaaagaaagaaaaataagaaatggggtactaaactaaccagaaggggttgaggaatgtgaagagtggtagagattgttgtgtgagtccatgacaaagcagtggctctgtggaactccattgaagaaaggttaaattaaaggatgaagcttttgtgttttgtgtatttggaggggtttttattagtgtatgtagaagactacgtagagtgatttggaaccacaccaaactttcaaaccatttccatcacccattttatatgtactctaattaactaacactacttcttaattcttaactctttttctaatatttaattcattagtgatgattgattctaatataaattattaattgtggggcattatttggtaattcaataagatttttttttcttcaggataaattacatcttctctttatgtcgccggttaaaaagtggtgtcagtgttaaaccaattaaaatttaatacgttaattaattttttatttattaaaaaattaaatagttagtacatttaataaagaaatttgcagtaaaccccttatattttaattgttatacacataactcctaatctttatttttggtggcaaaactcccatttagtattattctgtttgcaaatctaatacacctattaaactttgctgttaaatgtcaactagaattgttactgtgtacacatatgtatacgtgacataattttattggcccaaatcattttaataattttaatattataaaataatttaaaataataaataaacaaatatatttttttctttttaataatcaaatgttcttgcatctgcccaaacagctcttgatcattggattaaagctcaagataaaactctattgtcatcattgtgtctgaatagcatcggtgatgactctgagacttggactaaacctagtaaaaacacaatcaagattaacgtggatgcatggctttttgatagtgagaacaagtatggctttgg

SEQ ID NO: 326582 - DNA, 1379 bp, Cannabis indica
tttttcttcttttgtttttacttttagtaagagcgacagaaaatttagtagccttatttttttgtgttgctgaaacattaaggtcagtcattggaaggacttggggtctaatttataggtttttgactaaatagagagaggagatatatatttaaagttatttactgattactgtcttgaaatagttgttttttcttttttgaagaaaagtgtgctgttatataacctaaaaatagttagacctcgcggtcgttacagaataagttatcgggcatagaggatagtggcacgaaaccaaacctctgaagagaaaaagcccacttagccacattatgggctacaaaattacattatctactaacatgctgaaagctacaaccaataaaaaaatgagaggttcttttacaaaatgagacatagttctcaagctcccaacgggactccttcccattaagggcattgatcgttaccctcgaatcactctcaacaatgataaatttaaatccttgagctttagcttcctccatggccaaacagcaagtcatcgcttccccacagagagcatcaacaaactccagtttagacgtggctacccaaatcaccttgccaacgtgatctcttgccaccaccgctgcacacatgctatccaaccccactctgacatcacaattgagcttcaaccaatcctaggggggacgccaaagatccgtcttgaaatagttgtttatacatagttctcatgtattaaagcgattgtttaacaaaattgaaaaattgatacattagttttagttatggagcctctacaaatttttgtactgaacaataatcattaagatgataacgagcactatgctgattatgaatcaagtggaaaactaatatcaagagattgcacttttgttgaagtagtgtagataatgatggagaaactacaatgcaatagtgaaacaattcaaatacaactgaaatgccaactaaaggaaggctgccaaccactccaactcaaggatgacaaaagtctgatgttttacataaagttattaaccagggaaattaatttcacgcaatatccattatgtgtgaacacattcagcaacacagaaacataattctttttagcaactacccaaacaatggtgtgcaacaatgtgataatagaagaaaattgcaatcactcatgaaattctgtattttaatatttctagttttattattgaattaaatacttaataaaatgcgaaataatgaaactggtactgaaacaattttttttgtaactacagaagacaactctgtaactccaaaagaaaccagaaaaataaacattatagaaaagtaaaaacacacaaggtttttgtacgtggtttcaacaatcc

SEQ ID NO: 326583 - DNA, 694 bp, Cannabis indica
tgtcataatcccaataatgagggataagggtatttaagcctcctaatacgagcccattttaattttccctctcatttccattttcttcttcctctctttctctaaaattctaaagattcaaaaacttcctttcagatttccatcgctttctctccagaatcttaaatcttctaagtttcagaaacaatcgaaaccaatcaaagggaaaatcgacgaatctcaaggtcaggttttcgaaactatttgcgaacatttgttctcattttgagaaacaatctgctttttgaattttagggagtagaaaatgtatgtcattgtagggaatacacatagagccttatttctctgcttaaaactgggtaattcctaggagaaaataggcttgaaatttgtataatcgtgagtttttaggaggaacatttcgagtattcgcatctttttttgcttgatgttttgaatacttgcaagtcttgagatgaacatcttgaatacttacgtgtatattcttagggcgtctggggacttagtcatcccaaccaatgtttagaacatagggtttgccttatttttttgtatgcttttgttgggaatattggttaggtcattccaatggtgggtgggtcactgtaacttaatgttcatgtgtgcgatcgcatgttccttaagttactacgatacacccagccatttgcga

SEQ ID NO: 326584 - DNA, 959 bp, Cannabis indica
catgaattatatttggccagctaagtacatgtacagattggaaatacatatatcgatctagtactctctctgcgatttttggttggtatgccaataatgccatcaaatttcatgcttttattttatatttatatataatatattatattcgttatccacaaaacaatcaccaacatcaacttttgtatgcatgtatacatatatataatatatttatatattaaaattcctatcaaccataaattcttacatattcacaaaattttattattataattttcacttaaataattaattttccattttcgcatctcgcgcaaaaactgggcacgtacatatgttcgtcttcattaaaagaagtattagtccaaaggagatcgactacattaattttcacgtggtttcgatgactttgagtttggtcactcactcacttatcggttatcatttcattcttatctcttccatactggattatttttgtacgaaatataaatataatacagtttcgtactttattttttttcaaaaaatattactttgtgtttttaatattaatatttatttagtattttatattttaaaattgtacatatttgctacccttaaataaaatataattaacataattttattaatttgaccaaatagttctcaattatatgttatcaaataattaaatttgaattcagaatttgtaaaattgaagacagtttaattgtattgaaagtttcatcaatttttttttttttttagtttaaagtatcaaatatatatgattttaatgttaagaacaatgtaaaaaattagccctaattaattcaagagaatgaaacaatagaaaatagattagcggaagcgtagcagtgtccataaaatcgatttaagaaaaccttacataggttgtagcggaatataatgactccttccgttcaagatctctgacccttgattccttt

SEQ ID NO: 326585 - DNA, 1512 bp, Cannabis indica
aataatatagactcgtagactaaggctcattaacgccccaaccgcataaaaattatgagtgttccattcatatttgattatattaatcgcattctctttagctctagcattaaataattgatttttcaaaattttttgtaaacacatgtggttgcattagcaagggtgtgtgtgttatcaccagtttgtactaaatgaatactggctcattgctatggtaacaaaatttttatcaaactttgttgtaactacactaaggtaaattgtaagtcgaaagacattttacctaatgcccataaataagactttctaaaagtatatatttattcaaccaagatgagagaatattatattttgatcgattaagtaaatattataaagttacaagtttgttgctgatgagataatatttaatctaatgtagaattgttatattattttgaataatataatatataaattaaatatgtgtaatatattaatatgtataagagaggttacaaatctaaaataaatttgtaacccatgattcacatttgataaagatacaattaagtgagtaattgtatatcggagtaacaaaatcaaatggagatatttctaagattttaaaactgtcaaaattaatattcattcagttaaatgagtttttcaacattgggtgttgaattgggtcaaagaagagttttgaaactcaaagtttatatattgaaattggtccaggcaacatatcgcctactttaagaaacgagaggtttttgacgtatttaacttatctcaaaggatttaatgatattgctcaaggcgacatgtctcctagtaccaagataaatgagctattttttggagcattttctagtttttggtgacatgttgcctggagcctattctgcataaaaatattataaaacattggaaatcgatgggggacatttctatcatcaataaacaacgttccttttttatttaatgccctattttggctggtaacatccatggggatgtcttatctcaaatgtgaaattcttaacactataaaagaggtcttttggtgctcatttagtgacctagttttctatcaacaaatacttgctagaaaatataaagcttgataattctcaaacactactacaaaaaagggtatttgcgacggttctaaaaatatttttttggggaaccgtcgctaaaaaaattaagtgagtgtttaaaactgtcgggaaaaataggatatccctgacgattttaaactactggaaggtataggctacggttttcaaacatgcctttaaaactcccatgtatttgtaaaagagaattgccgacggtttaaaaccatcgactatactataggcggtagttttaaagcgtcatctatagtattttcgacggttttaaacatttggcaattctcatgcttcaattttacgcgttttgaatctgaaatgtcatttcccacattttaaatttcaaattttttactttccctatcttaaatttcatttccctcctttt

SEQ ID NO: 326586 - DNA, 567 bp, Cannabis indica
ccaattgcatatttatataaatttaacgcaattaatgattttttactcttaatgtttaagggtgtacataaattgattaaatccaatgtctactaacatagaattgatcaaatctaacatataatagatattggatcgattggatgactgaaattaattggatcgaatcagatcggatgataaaatttaacatccaatatataatttgattagatctagattgacctaaaaatattgaatgtagttcaatgaacaccctgaattgatgagtttttattcactaacaagaaaacactattatttatactattcatactattatgattcatgaggacacttttaacataaaacatttttattttattttttgtggaaaaaaatatatataactatcttaggtgatgagtctgatgaccccagtttatagaatatacatatttatgatatgtcttgtgtatatatatatgtacaaaagtatgtgttcttatcatgatatcatcactacccacaaacatattaataaggggaaatttgattttttatgcttacatttggttaaattttttt

SEQ ID NO: 326587 - DNA, 576 bp, Cannabis indica
aaaaatatgctataacccgactaaaccgaccgacgtacacccctagtgctaatgatagaaggaaacatttttaagccacccatgcaactcatcctacgacgacattaatattattttcctccaacttcgttgacaccctcagaagaagcaagaaaatgccagaagggtgatgatgatgatgatgatgaggaagaagagcaagcagaagcaagtgtcgtgagatggtgtcgcctcttcttcagactgaaccgccactgggctcccagactcagggcacctacgatagactagactacattataaggcaaaatcagtatattatccaatccaaccaggcccaagttgcttattataactcctattttcagcagcagcatgaatttgctcaaacgcaagtctaggagttgaattgtgctttctctatgtggaggatgaaccctcatgctccagaccacttctcacagccaccgccatggtacccataccagccaccaccaccaccgtcgccatactgatgtggcgcacaggtaagctcccttttctctctctttaatgtcacattggggataatgtgtc

SEQ ID NO: 326588 - DNA, 644 bp, Cannabis indica
acaaattacaaaattttgttaagcgaaatttaaaaaaataaaaaacaaaaaggttaccgaacatgcatttaattagcctattttttatttaagtaaacacgtttttccataatgcatgatctttatatatatttttatcatttaccatcgttgtcattattgtatctcaacaattattatcatcgtatctcgcttatagtcatcattattattgtcaccgtatctcacttataatcaccaatgttatcatcaccgtatttcacttatatgcatcattattataatcaccgtatctctcacttatatatagtcatcctcgttgtcattacaatttattttttataaaatttataatataaaattaaaatcttaatataagacattataaatttttgtatattaaaattgaaaagtaaatatatatatatattgaaatttatacgttttaaatatatttttaaaactgaaaaatcaaaatttgatctccctcttattccaaaatcataacactacacacacttttttaattttaattaaaaaaaaaagtatattataatgtaaaattttaatagattttgattgaaatggttgtatattgtaaagtactttttgggcaagttagttgacaaaataaattttccatt

SEQ ID NO: 326589 - DNA, 494 bp, Cannabis indica
tgagaaaaatggtctgaaagtcccattaaaaatgacatgatgtactccatgtggtggtgatcttggagccttttaacaccaccacaagtgcatccgttgcaggtgcgattgggtctataggtggacaattcttcccatatggtttttagtcgagtgtaatacatgctgatggtttggttctcttgacggagattcatcaaacctttccttagattgaatatgtgcagcccattctgctgctgaaatctaatctttaaatctgtccaaatagcagctgcagattcattgtaaagcaagctagaagaaatttctttagaaacggaattgagaatccaagatataacaatgttattattcctaatccaagcattataaagattatgttcagaatatgaggtttagaaatagaaccatcaaagaatcctaatttgttcttgacaaatattgcgagttgcattgcacgcctccatgatattgttggatatattttacca

SEQ ID NO: 326590 - DNA, 631 bp, Cannabis indica
ttctgacgatttgtttggttttgagtagtgggaagaggggaaggggtggaggccttagagacagaggagtggagaagagacatcataacagaagatttttggttcaaatcttggattccttctgaaccaagaaatttcaacaactgctctaatgtcttaccttcagcgccagcagccaacatattcagcatcaaatttattgacagaggagacattacaacgtttttagcactactcacattctttttcatctcgttaagaatcaattgtgttgcaaattggatgcaaaactccatggcttctagcttaattcacgttgcagagatcaatggaattaatggagtagagagcaagaaaacaaatggtgaaacgtgatggtttgggaataggttcgaattattagtatatatacaagtttaaagatttagatttataattaattaaaaacattaaatgttctttatcaaaaataaaaagaaacaatccgatgtctgtttgattattctgagatattagaagtttccattcaaaaacacatactaaatcttttatgccccgcagggctgcaataattgcctgaaattgatttttttttttaaggtaattgcttaaaatcgcctaaacaaattaa

SEQ ID NO: 326591 - DNA, 638 bp, Cannabis indica
caaaaaatgaaatttccccttttgtaagtggtaatccaaattaaatataaagcaaattgaatataatgttgtctaagtaaagatagaagtgtatcttttcgtattttctaatgacatatattattaaaataataaaaaaagtgaagatagaaataggtattttttttattgtaaaattaattgtttttgtttgagagtagttcctattagtatttttttttaaaaaaagaacataagtcagtagttctttaggaggctttttctgtagctatacacttgagtgtgagggtttatctcattgttattcacacttgcatgcgtcagagtactcccattcacgcgcccacctagttctaatttgacttaattttattggctacaaagcatatttgtaaataagaaatttttgtcaacattaaatcgtacaaatgtttatttttttttatagtaatataaatgtttattttagattattttggtttaaaatagacaaaatctttttttatttgattattttaagaaattgatttttatttgattattttttaatttggttattttactaactggtttctcacattcttattttttttgttattcttttatgatttttattgtatttttgtctctttaatttt

SEQ ID NO: 326592 - DNA, 855 bp, Cannabis indica
tacaatggattcttattcattaaaaaaaaataaaaaaaaaaaaaaaaaaaaaaagaaagtaaaatatgctattgattggtgggactaattttaatttgtaagtaattgttggagttttttatgagtggttgattcgagtttgtaaagatacttttgattggttgggaaattaaattcgtaagtaattattggagttatttatgggtttatattatattaattggagtttgcaaatattttttttttatgaaattcagctaatttacccaaaaaaaaatatttatttatataattaagtctacaacttatatatcaacagaaccaaaagaaaaatgtgtaattaaccattcttatagatgaaaatacctaatatataaatatatatatatatattatagatcctattgtctaaagattattataatgttgagtttttttttttctcaaacaaattatattgttgagtttaatttgattcattatatatattgaacaaattattaattaaccaagataattaaaatttaattatgaattgtaacataaaaatattaaatatcaaagtttattattttatttttgatgtgttacacaaaaaaaaaaattaataaaaagttttaagataaatgtttagttgcactatagagaaggggacttcatttgcgctccctcaaataatatttataaatgaattttttttatgtgtatatttttaaaaaataattttgttgactactcactaatataaaatgggtctttagcttcccttttttcaacacattttataaaaagggaagctaaagggtgtaaaaatacccgcttattgtaaattgacctttagaggtagtttttttt

SEQ ID NO: 326593 - DNA, 1124 bp, Cannabis indica
tttctaagtatagaaaatcaaatttcccatctatttttactcaaatattatatcataatcatataatattccttaagctttatttaatggtccacacaaaaatacactcttttaatctgtttttgtcagactatatgactttgactattcatttatctttgtctaaaaatagtattgtgattgggtattagtagtttttagtatctttcatcattagtgtttcataattagttggcaatattttttataaattattacttaattgcactaatagtagtataatatcgagaagaataataagcaccagtgtatcttttaatatttctcaaaaatatgttagaatattttttttaatttttttttatgatggtgtttgttataattacaatgttattcctataaattttttaaaaacacacgtgataaactggaatattaaaaatctattttcgaacctgtaaactatttagaattttttaaaaatttacagggataatattgtaattataacgaatattactatgactatgaaaagatatttaaaaaaaatatttcaatgtgtaatttcgagcggttgtaattgaaagttataattagcactctaaaatttgtaacacattcttcatcatattgttaatagtgcaactaagtatcaagtcgtatataactgaaagtaaatttttttaagaaatatcgctgatcaatcatagcatactacctcttaaatggtaatataattgggataaaaggcatttttattgttataaaatattatagtgtcggaaacgtgtattataattagtacaattaaatagcgaattgtacataaatataaatatattatatttgatatttatttagactaatagttacatagaggtatctctttttactaagttctataagttatacattatactaaataacgtggcaataaatagttaacaatgatatattatatattaaattacatctatattatatattacccattatgaccctacatgtgtttcttttacttgctagtagttgtatttttttttaataattgactatttcttattaattattagttttagggttcgtttggaacgccgtattatgtcgtattgtattgtattgta

SEQ ID NO: 326594 - DNA, 826 bp, Cannabis indica
gggcgttacaactaccctactcgagagtggggctataaatacgggccaagctttttgacatggcacaaaactggcatgagctcagaagacacgagaacgactaggcacaaaaaagtagtggcttggacgacgatgctacaaattggtacggcacgatgcgaaaattatgtccttaagtatgacacaacacgagaagcacgaaagacacgacacgtaagcatgaccatactagcgtgaaaggcacaacatgcgataagctcgaaaagcacgacaaatattaaaaaatttataatttattattaataataagacatgaatttattttaaataaattaaaataataatagagcttaaatataattctgaatattgtaattatataattaaaactaaaaaactaatattatatattaatttatttatatggtgtgatataaaaatttgagtatttataattaaatattaaaattttaatgatggtaaatttttttatatgattatttgtaaaatattgttgaaaaattatataaatataactaaaattataaaatatagatacactttagtaaattgtaaaaaaaaaaaaaaaaagaaaaatgtaaagcacgaattttactttggatatgaaaataggctaatctgtttaaaaaatacggaccggcacgagcaaagacaacatgaatccgagcacggtacgaaaatagtgactctaccctttaaaaaatattaaaggaaattacatatgtatattcattttactttatttgttttaattttttacctttattttctattattcttttaagatatacccacttttataaat

SEQ ID NO: 326595 - DNA, 1345 bp, Cannabis indica
tagatatcatgaaaataccttaattattgagaaaacactcaattagggtccttagaaaaattcttaaaacagacggtccattttaaaaatagacctccaaaattttcctaaatctaacggtctgaaactccattgcccaattttaaaacttgcataacccattcaactctaagccaaacaataccagattttgcaaagtacctaaaaacatcatgattaacattttttttatgaaggaacctcaattaaattctcaacaaaaattaaattaaatagccgtcctaaaactgcccaaatcggatggtctgaaacctccctgtcccaattttgaaataccataaatccagtcttgatcaaaaccttaccaattttttcagagtacctataaatatcataataaacattttttatgaaaataggatctataaagcatgaaatgaataaataatcacataatcaacttaattagtgctaagtgtcccactaatcccatgtctaagtataacgatctttacaatttcatacactgaatattgaatatcttgaattttgtgaaaaaattaaaatcaaaattaatatgggctcgtagactatataagtttaactataacaccacttaaaactcacattgccttatttattattataatttattctacaaagataattcattcgatctcaattaatttccttttacaaagtttcattattgttaacgaaattctatattaacacgtattttatgtaaataaaattttaacaattgtaaaaatataggggaattaccccatatactatttttctaactttttttttttcaaatttacgatttagatttctaaagtggtggcagcgatagttgcaatatgggtttctatatagaattctgtaaaagtgcaaaaaaaaaatgtttagaagtgtaaaaatgaaaaagacctttttattggtttattattttttcttcaaatagtcccttacttaaattagaaaatcagttgaaaattattatttctaaaggtttaaggagtaatttttttctctttcctagtttatctttcgagatattaattttttattatttagctgtttcgattcataaatatagtatatctaataatttcttcatatgtgcaattattaattttagtaattttttcgttaaaattaatgtaagctaatttttaaaatcccactaggatctcatgtaggccatcctgagcctctaatatagcttacccattagattacaattaatatattacaattaatatatgagaagtgctaaggagactctcttttgtactctctcttgcactctctctataattgaatgacaaatgtcaaa

SEQ ID NO: 326596 - DNA, 780 bp, Cannabis indica
  modified_base (15)..(15): a, c, t, g, unknown or other
gcttttttttttccnctgtttgtactttccctgttgtttgttttgaactcggcaagcttttgccttttaatgaaagggtgttcttgaacacccctcacttcaatcaaaaaaaaaaaacaacaaaaaataacatacagataacaaaaaatcaacaagagtacaacataaaaaaaccgaatttccggaaaaaaaaacaaaaaaaatcgtaaaaatatttaaaattttgtgaaaccgtatttttgtaattttttttgttatttttgtgtatttgtgaaattatcccatttttaaaaaagggaagctaaaggatgtaaaaatatccgcctagctcgaaattggcatttagaggtagttttttgataaaaattgtaagtatacaaatttataatatctataccgttggttgggggttgaaaattttttagcctattttataacacctatggtgtcggttattaaggaaataaccgacgtcatatgtgtatgtcagtaaactgtgcacatatggcgtcggttatttcctaataaccgacgacattgagtgtatatatacacactttggcttcctcacttccatcttcttcctcatatgtgaaccagcagccatatagcagaacccatacccacggaaaaactctcgccaaccaccatgaaaaacccatcattctccctcatttttttaccattttatcccatttttgttttaaaatattctatttttaatacctaatcctatactataaaaaagtttggtttttttccctctatcactataaccga

SEQ ID NO: 326597 - DNA, 918 bp, Cannabis indica
ttagctaaggtgttggtgcccttctatcccttggcgggccgcctaaggtatgacaatggcggtcgccttgagatcaattgtaactcggagggtgttcttttgatggtggccgagacagattctgttatggatgatttggttggatgtgctcccactgttgagcttctaaagcttactcctttaattgatcgttctgctggtgtttcttcatttcctcttttggctgcacaggtatgtatagcttaactaatggtttctttacactaataagatatgtcatatagtttaggttacaagaaatgtaaccctaaacataataaattaaacaactgttacatcaatataatcattaattaaaagatttgaatcgaactaaatctcgaatataagagcattctaattagctactcttctttatactttaaaatagctcaacattatcatacattaaattctttacatttaaacttttattaattaaatagtagaaaattaacaataataataaagaatatttacagcgaaatctccttaatattttataattattacacatatgaccttaataaaagaaaataacattaaaagtactatatcttacgattttattacagtcatatttttttttactttactgttaagtgtcaattaagcttcttaagtgttagcttaaaaacacataaccatatatttctttaacttatttaatacgtgatccaataatatatcactacatgtttctaagcatacacttaacgaccgaaaaaaatagtaaattgttaatcaaaataggtaaattgtttttttttttttttttttgttagattactcggttcaaatgtggtgcagtatcagtaggcttcagtaaccaacaccgtttagccgatggcacagcagccatgtacttcgtcaacgcat

SEQ ID NO: 326598 - DNA, 797 bp, Cannabis indica
taatccgggacagagaacataacattgaatacatcagtagtggcaggaaccttcttaccttgcatcttcacttacccattcctacgctcgagccaattggcgagaaattcacatgccatagtcacattagcctggccctgagcatccacaaaactaccacatttcatcctctcaatttgagctcgaattgcttcgaacctaggttgacgcctcaaggggttctcagggaattcaatacccccatctttaatggagggcctaattttgagtctcatgaagcgattatgtgcctcctcacttaaaaatcaaaacccgtagctggcgggtttgacgacgaaccttcttcaacatgccttgttctttttggctccattatcttagaaacaaaattttttttctgttttgtttttttatttcaaaattattctaagaaaaattaggcagcacctccccttaattttctacttcccaaaaattcaaaatcactcagacagtgcaaataatatcactaacaactcaataccacaatataattcgacaaacccaatatcaaaaacaattttttcacaatattcactattaccaccaaaaattcataattaataaatcaaattcctaaatatgataggaagtgatacttacaaacccaaagaagcttttactccacctccattgttgaatatccttgaaagcttgaggttgaagatgaagaacaatggtatttttggatttggggtaatatggatgatttttggtgtgattttttttttttatttaagtagaaagtagagtattga

SEQ ID NO: 326599 - DNA, 1108 bp, Cannabis indica
aaaagagaagcatgcgagtattgacactcccaagatatcaatagtcaccccgaattcgagaaagggttacacattttgaaaatccaattcaagatgaagtctaacaaggggctaaaatgcttaacttagtgggaatacaagagtacaaataaaaagatgacatcgctaaatgctaagggaaatagtcatgcacagactactgacacttccctagtgtcagatagtcgcatactaaggaaattccaaagggaatcgacacttcgagtaaaataactcatgcatgcactaagatttttgaaccctaaagtgaagattgcacaaagaaacgagaaaaatggtggtacccgaccattgaaacttcccaagtggcagtggtcgcatagtgtcacatgctaactatttgtacactcccaagtagacgggacatgcaacacttgctggcacaccgaactagcaagtcagcctaaatgcctttgcaggaaaacaaattcaatgattaggcacgatacatgtctttcacatgttaagtgcaaccacgaagtatgagcaagcacaacataagtcattccaaggattaatctcacacaacccacaagtaaacacataggcaaatgacacacaatgacccaacaaaggaaacaaataggtaacacatagagaacatagaaacatacacaaggaagtattgttaaacatcattttattattatacggtcttgatagaacaagagagtacacaactgggcccctatcatgatagtgataaggttcttcataagtcaccaggtcacccctataaagagtttaatggggtttcaagagaattccaagaatatatatgatattagctctgcttacatatgttaatacaaagctaaatacaaaagtgtcatcaccactaaagtagctcgccaccccgaagaggtgcttgttgggattttatgccctaaataaaatctaatatcattgtaatcttatttactttcaataaaaactataaatcatatcttgaccttgtcacatgatttgttcacatatttattacgtgattatatgtttaaaatataagttctattaaattataaacatatagttatttataattaca

SEQ ID NO: 326600 - DNA, 1424 bp, Cannabis indica
catttttagatgattttataacattgtcaatcgacaccgcaagagctcgaagatggaggacaagcaacaatggatgatttaatagagatcaacctcgggaccaatgatgattcaaagcatgtattttttagtgctttattaaccgaagaggaacacattacatacaagttctttgtggatacaaagatgtatttgcttggggatatcaagacattttaggattggatataaaaatcgttgtacacaagttagcagtatcgaaagactttacccctataaaacaatctcaaagaaaaattcgaccagaactaattcccaaagttgagccagaaattgacaagttaagaaattattaagggggaagacatacaccatcacttacagaaaaaataatccaattggagtgtatggtaagaactctaactgataatttaatggtgcataatgtgaagtgctttaaggacaatgacttaaaaccaaggttaagagagttgtttgaataaagtagaagcaccattagttgagtcaaaagaagaaattgagcctacaattgaagagcaagacccctttaaagtggtactaactcaaaatttaactaaattagatttttacttaacaaatcatgaatatagtgtggtgaatgaagtaaatttcttccatgatcttgaaattattgaatatgaacttacaagcaaagttaaagagagccaagtaaagagtgagcaacagtaagaagagttatttgataaaggtgaagaaaatgtgatattggaggatgaggaagcacctaatattattgatttgaattcatcaatgatattgaactatacaccaccaatagatccatatttttcatcaatactaccttcaccgtattacatcccctacgagctaccaaaagtttctccctaagctcatccttcaaaatcatgtgttattagttctaaacatggtacaaactcataatgtgccaatctaagggtattggcaatggaaactttgaagtggttatgcatgacgcttattatgggcatcaactgcacattgatgtggagtgtatttgaggtaagttctctctctttgtttttattgtcacattggagacaatctgaatctttagtttggggaacggacttataattattagttagttatttttttgttgtttgtttatttgtgttagtgtttattattatcatttctttaaaaacaattgttgttaagccattgtttttgtctatattgcgttgctcttcttgtgaaaaagaaattgctaataactgtgtgattggttcaaatgtttgagttttgtgggaaatctttaatatgtttgacaaatgtgatatcttggattttttattatatatgcttgactagggttggtggtacgatagttttctttttttttttttttgaatttgata

SEQ ID NO: 326601 - DNA, 852 bp, Cannabis indica
attttaaaattatttttttaaaataatataaaacatgatacttaattatactaataataatataataggatactagtcaccaggaataagttttctattccaaattataatcttaattagctcaaatatttgcatgtgtttaatttgatgatgtaagtgtaacaaaagatatataaatatatatatatatatatttatatatatataattagacttgctttggttaagcttatcttcattgctttaccaaagtgggaagcaatgttgcttagattccatcgatcagttgtattaagaaagaatggcaccaagttttaagtaaagaagaaaagaagaaagattatatttataataatgatgatgatcttagagttagttaaaatatatattaattatatttaagagtaatttattatataaattattaaatttaatttttgattataattaaataatttttaactacggtaagtacttgaccattaagtatcaagttaatagttacgtgacagtctttgattaatatagatcatttaatttttatttttttatttcaaaattaatttatatacaaataagaaaataagatgtagataattaacggttaagtacttacaaaaattttaaaaatataacttaaatattattaccgtaaaatataaatatttcttcaaccaaaaattatatataaatattaacaaggtaaaatacacttaatactcatatatatatatatatacacatgtaagttaattaattatgtgttcttgtaagacttaatttgattgtgaaaagtatattcattttagttgtaactagttatatatacataataagtataaatatttatat

SEQ ID NO: 326602 - DNA, 568 bp, Cannabis indica
ttgtgactaaaaatacatttagtcacacaaaatggtaatttttatgactaataccttgagccacagactttttaatcacaacataagaataataatttataattagttacaatttttctacttttagtcacaagttttattgtgactaaaagtaagattttttttagtgacttatacgtgtataaaaaaagaatcgtgcatgcaataatatatgtaaattttatttttgatattataaattatttaattaaaaaattacaaataattctaaataattataacatataccattattaaaaaaaattgattaaaaaattcttttgtataaagaaacacatataccccatcttatatatgcatgattaatcaagtgatcaacttttttaaagcccaaaccgactttttatttgaactgtactttatgatatttatttatttattaatttttgatgaagacgttttgataattaattaattaatacagtttgaatggttcttctattattactacttaatttaaagagaaataaataaagtaaagtacataattaaaaaaaaattaatgaca

SEQ ID NO: 326603 - DNA, 643 bp, Cannabis indica
tttaattaaataaatattgaaaaacttcggttactattagtattttttttttgctggataacgctgctattattttgagaatattgagaatcatagtgttccaactcaaaactaattggtgatgagtggagtagctcagtttttatatataactcaattttctaccatttattaattctatgtgggataatatttacaatattctccctcaagatggtggatcacttgcctgcaagggatatggctctgatactgtgttgagaatcattgtgttctatctcaaaacgaattgatgataagtgaagtagctcatgttcttatatatggctcagtactttaccatttatttcatgtgggacaatgtttacaatagagaaagtgtctttcaagagagtaatgttaagggacactttcaggtaaggcgacacattaaaggcttcaagtttgagtttcaagtgtgtagaaattgtatcccgaaccaagccgttgtggcctataggttttcaagtttcgggagtaggtggattggacgcgggttgggacggggtacagatttgggtgggctattattcaaatttttcttttagaaaagcaataaataattaaataaataaaaaatgggagagtacttataatataaaaa

SEQ ID NO: 326604 - DNA, 984 bp, Cannabis indica
aaaaataccgaagacgtacagagggcttatatctttggttattacaaaataataaaacacataggtggagcctaatttccaactcgcgtggagggtctttgtatttatttatttaatttcaagtgacctaaccataaactcaattagttgagcctcgaattgaacactagggttctggggtaattagacatacgttcctttggagacatgatttcgaaatttaattaaattgagaaaagcaatggtaactttgggtaaaaataatggcctcgctacaggatacacgggattttgggcatgttgcatctcgtgggaaacaaagttttccatcaaaaatctcatcaataaaatatctagagcgagcagaagtatcctctcgatcaagtttttcattaaacaacctaactttctcatcattcatttctaattttttttccagatgttcaggtcgaggtgtgaaaggtaaagctagtaattttgggttttcctactcaaaaaactcttaaaattccaatttcgaaccagaaatagacattcttttcttataaatgtatttgtcttcaaggtccaaagccttaacaccttaacgttaactttaattaaaaaaaaggttcaacattaatataaatataacatatcatatctccttaacatttactaaattttttttattaaaaaaatcaaataaaaaaataacatcaatgtcatgcaatagtagcagcaaaattttctacaacaacaaccatttatctccaatgatttagcaccctttagtttaccaaataagcaatctacctaagcaatcatccttagaaattgaactattaggactcatttggtatgtcgtataaagattgcattatattaaataataaataacactatatttggataaaataatataatgtattaattattacgatcaaaatttttaatacaatgcaagttatattatttaatacataacaaatggtccgtattagc

SEQ ID NO: 326605 - DNA, 2912 bp, Cannabis indica
tttttaggtgctctaagcatattttattagacgtaagccataatgcgcctcaaggcttacacctcgcctcacccaaaaaaaggctcaaaacttaaatctgtaattttaaacattgagtgagcctcatttggcaacttgccaagaccgtggccaatggccatagcatgactaataagagttgtgcgatacaaacatttactattagataatgtttaaaattacaaatttaagcctcaaggcttttttttttcttttgtgaggcgaggtgttagcctcaaatatttaattgaagaaaaaatagagcacctaaaattatcaagaataaatgaaatgtctcataaaactcaaacataacataaatttctcaaaaaactcaaacttaaataaagataactttgttttcatgaactagaatcgtagattctactattccagaaatttcagcatcatttttttttttgtttttatcctattcgtgaagaagtcaactgaggatgagggagaataaggagaaacgaaatgtctcataaaactcaaacataacatacatgtctaataaaactcaaacttaaacaaggataatttttatttcattaattagaatagtagattctactattctagaaatttcagcatccattttattttgtttttgttctatctgtgaagaagtcgactgagagatgagggggaataggggagaacggttggattactaaaacaccctaaatgatatattatgtgtattgtgtttttattggactttatttgtttgagttttatttgacttttttaaacttaagttttcttgggcttttttaaactaaataagaactttactggtctattttaagttagtaacatcattttaattaaaaagccccaaaaaattgtgttttctgaggccctcaccaaattttcacacctcaggccacttcgagccacatcacacggctgaggcgtacacctttcttccccctactgaggggtgggcaatagggagaattttttccgcctcaaagcatggggcgcctcaaggcgcgcaatagccccgcaattttaaacattgctataagggacaaacacagagacaaagaaaaatctaaatctaatgcagccttctctgatagaacaaatacaaatctaattcccaatagttaatagagccgcaaaaattggaggattttgtggctggatcagaatgaaggtgatgaaccatcataaaattcataacaaacacaaggaactactatgaagtgtgaagcgagaacaatgagctatgagtcagataaataactctgttggcaatttaggaatgacttgcaaagtgcctatctacaagtacgactaccacatgcatagacaacaatctaaataatataataatgttattttaatatccaaagacaccattataatttatattgtatacaagatcgataccaattattataaaagatctactgaatgtgggttaggggaagatctcatcagaccctaacccatcctctcaccaaaatagaatcatccttctctttccacaatccttccctctaacccttattctacctttaaatccaatctatatcgtatggtattttaaataaaagtcaatttatagtgctaatgaagtacatactacttttaatctgattaaccaatactaacaaagaaaacaagcaactaaagataatcaatcatgaatactatgacatcttataaaacattctaatcacaagtttttgttgctgtgtttcacacaaacatttttcactctacctgatctacatgatttcaagaaaaaatcatctcatgcatgtgtttcataagaggaagtaactaagaaaaaatcttaaaacaattgaagcgaatcaaatacattttcaaacaaaaagactaaccagaacgatcaatttgtccttctcaggcgccgctggagtagtgtctatgtttaagccaatgttgtccagaggcttaaccaagggaactgcttcaaatacagttagacgctcatggaacgagtccaccattggaaacctgtggttactgtactgtgtttctccccatcgaaccaaccctttagaagtggtatctcttcgcaagtcgaattcttgctccagcaacatgatatcccgacgcaacaccatctcgagttctcgtcgccttgcgatctcggacaagataatgtcatcactcgcacgctccctcccgaactcaagaacggacgcggtattcaatctcccgaccgggtcacaagttgggccagggtaatagcgaaaatcaccaaagggaaggccattagaagggatcggtcgggtgtcgggcatgaaattcatcggcggtaagaaatgttgggctgtttggttgccaagaaagtaagggaaatgagagaaaaaaaaagagtagaacttgctgtgaaatatgaggagacagagaagacaaacctgagaaaggtggtgcggaggagttgaatagcggtgggtgaggtctatgatctacggctcgaaatttgaactccatggaaaatcgcatagaaaggatgagaaaacgtatgaggaaaaagagtgtttcttgaatgaacagaagagcgactaaccaagggactgtgtgtgtgtgtacggagtggcattttttcaattttaaaagaagggttgcgtgttttgcacgcgcttatgtcgcgcgtgtgggttatccgaattgcgaatctccagatgttgtcatgaaattttgtttgtttttgtttcgaattattgttaaagcactctcattcctcatagagataaatatacgagggaaattttacattccaccctttttaaaatggatacattcatttattcttatctgttttagcacttgaaataattttttagttaaattttttctcatgatcatgtacgttatagttattt

SEQ ID NO: 326606 - DNA, 1851 bp, Cannabis indica
tgtaaggtttctaatactttatgtgtctttatttcataatcgttttagaagttcatatttagggtgttaatcaacgtacttgtgagtagatctaagatcctggtaaaataatttccaacaattcatacttacacacttattgtcttaaccctaactcatacatactatatttttttaataaataaacaattattcatataattaataatcatgcttttcttatgacattatatcttctagatgctcatatgctggctataacgaagagtagtaaagatttaatcacagaagtagttaagtatttactcgcaatacttactgcagcacaagtcaagcttgtctttggcaatgattgtacatgttcggtcggtctatagaaagtttaaagcccttggcgctctaataccaaattttaatggcctaacaataggaacgtcacatactgcaaacatacattaatctcgctaatacgggatatattagagccaagagcaaaaattaaactttaaaatacaaaataaacataccatataagaatatagtctataaacacaatataccgtaaaattacgattcttacctttcccgggtcaaaattacaaaaatgtcctcgacacacaaaagggtcttaaaatgcaataaattacaataattctacataataaattatataataatataacttctcatttatacttaattaacttagtttagagttgttaataaagagttaccaattcaatttctaactttagggtcttacactaactcatgaaacaaacccctgattctttaggatctggtgttagaggtatgtcacattggattgaacccgaagagttaacctcgtgacaccccttggactactcgtttgagaaacccaggggacgtccgtttatgccttctcaaatgcttgataagttggatgagttaactttttggatttatcggtccaactgtaactgaatattgattaaatctggacctcccgtttggatctcttcggaccgggtcattggtctttttgggctttgtggacgagtctgtaagttaggacactaaatgcacacgtgtcacctgttcagacatgcgaaaaaggggcatgttttcaactattgttatcgatgggggatactttggtcacacaaaaagttcaaaatatataaatacacataaattatagatcaacgagaggaaaaaaaaacttatttaacgtagcacatttactaaattataattagaattggagtaatcgatagaagaaatgaatcatattaaaatataaaataatcagaaataatattttattatgttatttactaaattggccaaaaaaaaattataatcattttattttatttacataaataaaaaagataatcgagaatgatttagtttgactattttttatttatagattttttaatagtatatttgtcttaaaatttttaattgataaaactgaaataatataaattaagttaaggaaagcgaaatgtattctttatcgaaattaagggataacattttcttttatttttttttcctaatttgtgttgatcctactaatttctccaattctaaaatttagtaaataaattaataagaatcaaaccatctctaatgcattgggtaaaagatgtgctaaatttgacataaaaaattaataaatactatatttagtacacattttataattgtgctctaatatataatagaaaattaaaatacaaattaacgtaaaaaaaaaaaaaaacaagagtaatttacggcataaatatctaagtttaacttttagttgcaaataaattcttaagtttaatttttggcggtaataataactaagttata

SEQ ID NO: 326607 - DNA, 1383 bp, Cannabis indica
caaacttcaacttattttttttatctttttttttcgtaaaaattatttttttttaatttttttagttaatagaataattctgacccatataatataaaataaattatttttaattagataaaaattaaacataaaactattttctaatactattcatctatatatatctaacttcttgctcaccatgggtttgttttttttttttttttgtaaacagttgctcaccatggttaacattgtaatcgtaagcaataatgaaaataaataattactattcacataaattttaggcttcatcattaatattagatataatgtgttgagaaagcaagagactgagagaaaactactgagaagttaattattactagatgaaattgaggtgtaacatatcatatcatccaaattaatgtccttaccaaaactagtgctgctagtaagaataggtattggacattgttttttgcgtccatacactaatataatatttttgcagtgaagttgctaattttcacagctatatagatagatccgaccatctaattaatgtgccatatgcccataacaagtataactagccttacaatgtagggaattgacccagaaatcacatcacaaatgatcatgaatcatgatcttaaataaatagaatgtatagtaagccaagcaaaacgaggtactactattaataattataagtatctatcaactactcacaattatgatcaatggctgaaattgtacattttcctcttggatactcccttgagacagaaatcaacgcatagtaattagccacatggacatatctatatatggctgtatgagctatatataagagttattatttggcctttttgctttaaatatatgttgctaggtgtatgtatgggactctttcgattgattattcctagaagtcccatctatatataatttgacttaaatgctacattttgaaaaataaaataaaaaaacttgtttttctcaaggagagggagagtaggagtttgcctgttgtagatggaccaacgcgctttgtcaaaagacactataatcctcacacccagcacacagtgagaaaggctaatggatttttagtgtaatttcgttgttaggtagcgttttgtcggaaggaataaatatatgaataagaataagaataaaaataagaataaaaatagaataaataaaatttagaatgcataaaaatattaataaaatatcattaaatttttttcatagtcattctacttaaatagtagaaatgatattccattagaatattatattattccaatactttaaaatacaactaattaaagaaatggaatgaaaattgtttcctttctatttcattctatttcattacttccaaccaaa

SEQ ID NO: 326608 - DNA, 1173 bp, Cannabis indica
gttaaaatatacaaaatttaatatttattttcaccaataataatataacacctcgtattaatattcaatttttaccattatattactctttaacattttttatttatttatatattctatatatattaattaaagttgttttttttattattttgataaaatggtttagggtaaatctacaatacattctttaaagaggtattttggtagattttttatctatttcggcaattatgagagcattctagtctattttttttttattatgtacgttataactatttaaaatcacatgtaaattttcaaaaaaattcaagtaatttacatattttattgcatacgctactatttttcttatatgtgtggtaagtaacagtttaaaatttattttcggtagtataaactattcaaaattttttgaaaaatttacaagtagtcttaaatagctataacgcatgcaattatcagggccaatcctaagtaataatgggtccaacaatttgttttgtgtgtactatctctaaagtaaaatatgagtattattaagtatatttttacaaaattttacaaaaatatcaattttgttttaatataaaaaagtatactgtatataaattttgatttctgaattatggtagtcttaagtacgggcctaactcaccttagtctaagatcaaatctggcaattataaaaaaaaataaactaaaaaattctcttaaatatcgaaatacataacaaatctccaaaagtgaattttgagagttgtacaagagaaatttgaaatggttatatataataattagtaaggatgatgatgagggtgactggtgcttggtcggtgcctccttatgaagtttttaaatcaatggtctacctcatggctcaataattttatttatttgaaagcaatttcatcaaaattaattaattaattaatcaaaacactaaaatgttatatatatttatataaatatatatgtatatgatgatgaaactggattggccaaatgtggtacattttgacaattatgtatatggctacacttatgtgtattgtgaccacaatatcatatccaaaagaatataatttattgattctctatcaaatgttaaatcatattatatctttatatattaaaagtgcctatctaacggcatttcttggtttaaca

SEQ ID NO: 326609 - DNA, 1663 bp, Cannabis indica
gtaaattaagtgaaaattattttacaaattttaatatttacactttagtagacttaaaaaatacaatacaaatacatgattaattacaggtatatctcacagtatattatgtatatataactattatatatagaataatataatcaaatttggtcactcatgtatgttctatgttagtactgaattcaacttaattagattaataataatatatagaatttaattcatgtcatcatgcactatgaatgtacttaattcatgtaatagatcatgtttaactatctcttatatcatttgttatttgttcttcttaatatataatatgtaattttctttttaatttcataatatgtagttttttttttctttttctttttttgaattttcattatcgttacttttaagaaaaaatacgtttcattaataaagaaaatcaactgttacagacgaccaaacaaaaacataatcaattcataaaccgaaagtattatagtaacaaaaaataacgtacaaatataaagaccgaccattccatttgtaactccctaagtaaaacgacaaacaccaccacctacaacaatcaacacatacgacaaagacaaaaacgaaactaaaaagtctaaaatgctcatcgaatcgagtctttgaaaccgaaaccgccatcacgaaagaatcacactccacaattcgataataacaatgggaaatcaactagtcaccaatatcacttaaattaccgaaataacattattaacatctcgaattacactcaaatctatttttttttaatttttatttaaaaaacattataattaaatgggtatttaaaaatgaaggaagaatctttacaactgtcatttattatctttattatgaaaaatctatatacgtgtaaaaactttatacatgttgcagtagatgaaagtcatcatattaacgtttttggatgactccattgcaaattccattggaaagcttatttttttttttttttttcttttgtttttttctttctttaataccaaagcatgggaatctacatcaactttattattattattatttattttattttattttatttttttttgaaaatatatatatataaaaaaaaggaaagaaactcattgccttttatatttttgttttgggaatataatggtaatttccttactttaacttcaattcttctttaggtactattttcactagttgaaaaagataagagagtggtggtggtgactctttatctatttatttatttattaaatattattattattttattaaatttaaattaatttatttattactttttaacttcagaggtgccatagctcataataatatctcatatagtactcatagctggcatgtcaaataaacaatataaagtattaaatttaagcacaaatttttttgttattataatatataaagcaataaatatttaaccatttacacatatttcctcatttacacatttatgttcttaatttttttaggaaaaaaagtacaaattttaatttctacattttcatatgtataacttttttatttttttcatatgttgtgtggtgtagttagtagcgcaccaacgatttaaagtgaaagaggtataatttttttaggagaattatttaatatattatttttttaactt

SEQ ID NO: 326610 - DNA, 626 bp, Cannabis indica
taaaataaaataagagttagaattaaaaaaattgtatatcaatttcgtatatatttaaaatttaatattactaatagtataaaattcagtacacatcaatttaatgtaaatattgtgtactattaaagtaaaattgtgtgaacatttcacatctaatttagtaaaattgtatacgagtgagtaagttagaagaggagaaaaggtgggaagaaacatatgcttaaggggttgatgcatgtgcagaagcatttaaagccttaaaagttgagacagacctaactcatatttttataaaagttaaaacccataaactcaataaataaataatcgccactgtcatcattcttgttctcttctggatatggaaatttatacagtgggacccgcctctaatggggtggggattttccgtcttggtggttaatggggcggtcgtggtgggagacaatttcaatacccgaagcgggaatggagtgggggcgaggatactactatctgcaccatatccgaccccaatataaatatatataatttcctttttattcttaatatatatatatatatatatatagtatatatacgattgatatcataatcaaaattatatatctcatatggttaaatta

SEQ ID NO: 326611 - DNA, 687 bp, Cannabis indica
gtattgctcctgtacctgtttgtgagaccactaaattctctgtatagagaaacatttctactcaaactaccttcaggagttgttgcagttacaactgttgaggttctttgtctaaacctcaaaatctgtttgaggacttctttcagaaacttgtagtccgtatatgcttcctgccattctggtaccatttgagatgcaaattctttctcaaacttcatctttttttggatttcaatacaaaacaatgaattcccagatcagaaatatggtacttaactaacatcaatgaccatatatgtataatatggattaaagtgaagaaagtttaaatatttttgggtacgtattagtggttatggctgaaatgatacattgatataatatatatatatatatatatagataatgtataatgaaaagttaggctaattagtaatttttcgctccgaactttgacatgtactaaatcatgccccttgaatttttttggctattaaaaatttcgcctgaattattaaaattgtgaaatttaaggatttttatttaattttagtaaaaaagttctaacatggataaaagttcaggagcatgatttagtacatatcaaagtttgaagggcataatttggtagatatcaaagtctgggaagcatggtttagtacataaacaatcactgaaacagtaaaa

SEQ ID NO: 326612 - DNA, 513 bp, Cannabis indica
atatatgtatatatatatatcactctaagtacgctctgtggtcgcagtttcaactaatcttccacatcaaaaattgactcttgtgattttcttttaagtattgtgtgaaatttgcatgcatcattggaaacgtgattcaaagaatcgttttgctaaaagaagactacattggtttgacattgaaagtgttagtagaaatttaagcataatggatccccctgttgttgaaaatgcattgcaagaagaaacccttcttgaacatttctctcctactgcttgtaatgctccttcttgcattattttacctgctactgatgctacccattttgagctaaaaccgtcaattattcaattttttccatcattttatgcgttagatagagaagatccttacatgcatgtgaaagaatttcttgaaatttgctcaacttttcgatttcaaattttttctgatgagtcggtcaaacttaggctatttccattctcattaaaaaaataagtctaaggcatggt

SEQ ID NO: 326613 - DNA, 977 bp, Cannabis indica
acagacttttattgaaagacaaaccaaaactacaacaagttagaggccacagaaggagccacttcgctaagaagtctcatacaattcgaagaattaactctagcccactgggctaatttgtcagcaactacattttaatcacgaggaatgtaggacacttcaatatttacaaactccttacataacttaaggcatttagaaaacagaggaaaaatgctccagcataagacaatagaacccgcctggaaagcagtagcagcagccttagaatctgattcaattctcaccatcttgaaacctgcctccgaggccatttgaagggccataaggatgccctgcaattccccttcaaggacactgtagaccctaccaaagttagttgcaatgatataatcggccaactgattacccatgataagaactgctgcaaagccagcctagctcctccctaaccactgaggcgtccaccctgaatctggtatcttcgtgcacctgttggtgaggtttctccccacccaactcaaaagggatatccatataaatagaatagtgagtcaattggaactcactatatttacgcatgcaatccacatagatatcttctaaaatccagaccctttctttgtgtatcatgtcatttcaccatctccaagtcgtatcacagacacaagctgcaaacaaagataggttgtcatctgataatccacaccaccactcgccaaactccgtaagattgttccagttaagactatcgactcgaagaccccacaggcttctaaatcagatgcctcggacaacatgacaattgcaaaagaggtgtagagttgattcctcactagaatgacaaaacctacataggaattggtctcccttggataatccaagacgaccctttgttggaataatgtcagagaaaatcttctagcaacggagttgtaactagggctgagcatgtaacccggtgggcagaccaaccc

SEQ ID NO: 326614 - DNA, 1627 bp, Cannabis indica
ataaatattggacataaaagacttaataagtctttcaattatgacactctcctgaagaataagaataatcaacattatgtacacaaatacgactccaagaaatgatcaattcaatatataattaacattacatcaattgtataattcttctaaatgaaaaaagtctccgcaatcatcatttttaaaaagttgtttactcgcaaatggcagtctcgaaagaagtcttgtggaatgatagttgagtccaaattaaagggagtttccagatgtcaatcatgtctactccgagtatagttcttaggatatctagccttattccaggatggagttctagttggctagtcttccttcctagaatggtagtttcggatagtccactccagctcaattctatcccaaaacatccttagcgagtatcgttaatctgtgagtccggaagcttgtttacgttttcggaggccctgatactagagttgacgtgaaaacttcgctcaaagaggagttggttaagttagttatttctaactaacttaacaaccttgtttcttccagccgccaccaactttaggatcttgatcttaagcctataaataccaccttcaattatcattttagacagactgaacacgcaaagatttagaactaagttcagatgagattgatagtttgagagagagattgagagatagagagataggtgcagagaaaacagagagattgagtttgagttttgtaagaagaatcttgtgtagatgaagattcttgagtgtaagtatgagacttgaaatactttgtgagaactcaacagagaatcttgtctcgactgtgttgtaccggttcttgctcaatcaataaagaaggattatggttgtattccagaattggagtagagtcatagatctcatcggtctatcggacttgaaccagtatatatcttgatattgatttttttatattatgcatttattgtttctgattttacatactctgcttgtccctgttttattttcgattgttgttctcgatttgttaatcttgtcattgctaattgtttaattgtttaaagtttaattaatttgattctgcacatttaattgtaattttcttatataacatccaaaaatttgggtgaacaagtctatcttctttcttttaataattaatgctttaaattaaagaggacacatctaaattggcctttagagtagaaaatgtaggaagatgttcatgcacgtatcgatacatttgacttgtctactcgatacattcatatatcacaactttgcaattgaaaatgtcaaagtggctgtctaaggggcagcaaaaaaaaattcttagtgatccaaagatttagttacacttgtagatcaataagagtaacaagaagtcattatgataagataatcctaaaaaaattattaaaaaaataagtaggtattaggaggggtgtagaggaaaggaacgacacaacacgatctctaataggacagtcgcaaagcgcatcctccaaaaccctcctacataccgcaaataaaagtctaggactattaaattgagatttttacacttcatgtcaaaattgacaccttttttacatttttatccatacacggtttttaaacttttt

SEQ ID NO: 326615 - DNA, 565 bp, Cannabis indica
atattacaattatgttttacttgggattcaaatatatcaaaagaaatattcttatttagtatattgtgttttcataaaaaatatagttggaaccctgtattttcaataatatgtaatttgtatctcatattttcaaattgtacatatttagtaccctaaagtaaaatttattcaatataattttattaatttaatcaaacaaatcttagttatatgtaatcaaataattaaatttgaatttagaatttataaaattttaaacagtttgattgtatagataaaattttatcaaaaaaatttaaatttaaagtatcaaatatgtatgattttaaaatacagagtaccaaataaatattattaaaaacacaggatacctaatttatatttagagaaaatacaggattctaaatgtgtaaacaccttatatcaaatataaatatatatatttatatatttatatatttatatatttatatatttatatctttatatattaaaagtgcatatctaacggcatttcttggtttaaccgaatatactttaaaaataaaagaatattctgtta

SEQ ID NO: 326616 - DNA, 480 bp, Cannabis indica
ccatctatttttggctgttaactgccatggtgcaatgtccacctgtacacagtgtaaacgtggcacaatttcactcgttcacataataaatcaatcatcttcaatagatttcatgccttgaacaaaacacttaaacaaactcacacacattgtttaatcgaatcacattaatttaaaattagactttagaggcaatttttaaagcatttcatcagcattgattttgataaattcgctaccaacactgttttaagcaacgctataggtgaaaaataaatcgacaacataaaaactctatgacgtcagttattatgaagtaatcaacttcataagatctcaatagcgtcggttattatagagtaatgggcgttgtaggaaccctatagagtcggttattatgaaataacggactccatctataggggcttactatggtattttttcagctttaaaatttgtgtttattaattattatttttt

SEQ ID NO: 326617 - DNA, 879 bp, Cannabis indica
tagttattaatgtgaagagaagaaattttttttttggtggtggtggaatatgggattcgggtgtgggtgtaaaattgatggaagagagggttcgagagggtagatgtaattgcggagggtattatggggaaaacaatagaagtgtcatatataactaattttgttaagtataagtttaggagaaaaaatttaagataatgtaagcatattaattcaaatttcccattaacaatgggatcctaatttgttaatatcatttttattgtaaaaatttttaattagtaaatgatagcatagtgattagaaaataggtaaggtgccttaaatatttgggcattacatgattattttaaaaaaatattatgattattatgtaacattatactatgtttcaataacatgaaaatactattaatttatatgacataattttaaaattgttattttaaagtttatttatgaagttactaaatttatttatttcatatttttggtctaggtatcaacttctataccagcaaattttgctttcttgtttggattaagatggatacaaggaaatctcacagttatttaggcggaagttggagctctaataatggttgtgttgaattagttgctggaattggacttcctctcatttcttttgagcctaattgtttagatttgatctttgtctttttttagagattttctttctgtaatgatttaggctctctttttgatatttttttttagtttactgtctaattttcttaaagcgtcccttattcatgcaaatcattcggccaatttggctacgcatgaatcagttgcgcatgcatttaaagtggatagtgagctaatttggatagaagatctttgtgttggaaattattt

SEQ ID NO: 326618 - DNA, 630 bp, Cannabis indica
acaattcaaaatctcaaatcaagaaaattaaaagtttagatttataatctttacaaatatgaaaaacttaaatagatctatctaccattgttgttgtcgttgcttagttactgaattcttaaacaaaaattactagaacttatataaaactaatatttacgtggctcgccacgtaactctcatctagtatataatataggcatgaattaattatgaaatgaaagtagtttttaattgtgttaagatcaaaggattaattaattaaagggctgtattttcattataatcttcacagtatattatatacatgtatatatatcgatatatacatatataaattgaaatattaaagttataagtatatatcgaaccgtgatattataaaagggcttatagtgttttgatgaattatgagtttcgactctacatttttaaaaaatttattttaagtgttgtgttttgtaaaagataataattattaaaacttcatgattgtctaaatatttttaatcgtcgattctgtctttccctgaagctgatcaaacagatcgtcgattctgggcaacgggtacttgtttttaatcgtcagcttgtttaattcccgataatcgatacacattctgagggaac

SEQ ID NO: 326619 - DNA, 1670 bp, Cannabis indica
aggggaaccaacccaggggttccgacaaatgccgaggtaataccctctaaaaggcaatagaaaaccaccgcctataggaagaagagattttccgagcccattgaccttgaggtctctaaaaccgagatccatgaacagactcctcctttggttgatgccaacacaagcgcacctcctcctgagacaactcatgcctatgatttctcaagccaggccattgaatctttgtcggtcacagcggggaaggttggctgtgaatttcgccaggtgtttgggtctgcctgctggtgccaacgcaaggctctttttcccaacgattgggatctaatcaatctctagaatccagaagagacgctttcgaggaacttgcaccataccctcatggtaagtttgttgtatttttttttgttcctcatattcatttcctcgtaattctccaagcttctttcctctcttttacctcccatcagcgaatcctggaccggcttaaatacctggaggtagaggtccaaaaatcactagctcaacgcgaggtcgtgattaaataatggaacgacactcagcaggaagtcacccatctcaaacaagaagccgagaagtccaagaaagactttgaagaagctaccaagaccaaaaccgatgaatgaaatgaactcaggaaggtgctcgcggagaaagaggctgagcttaaagggaaagaagccgaactcgaaagaaaagatgccaaaaccacagaaggatgcaataaggtcggtctccgtcccatttatcgagcctggatggcgaatcccaacacggacacgagcttcttggagaaggaggaagaggaaacattggcttactgtgaaaaggccaggaaggaggaagaagtggccgaggcagcggaagaagaagatctatccaagtctcccccaaggtcagcttggtttttatttatctccttttttttcgaaatttcctttgagccgacacaatggttttccccttgtggcccattttgtaaagacaaatttgcaaagttggatagctaactttgctttttctttattttatatttaaatgcctcgtatctttttgtttgaacttcaatatgcagttgtttgcttgtgttttattcacaatttaaacaatcatattttgatcatgcataaagttttttaggagtttccatttctcatatatctctttgacattaagtagttaatagccttctttacgcgcgagcagtttatcatctgccctgcactcgattcgctagcagtcattgattccgcttcgcgatcgtcagtagtaatcttgtttcaagaaagcttgatatattttcaatgatcttgtctcttttcatatatttttattgcttacatgagtagttagatcttctacctacgcgttaggtttaagtactttttttcaaaacaccttgatgtctcgtttaataatttcctttagtgcgagctgttagtgttcagctttatacgcgagttatgatttgtatctcctttataatttttgattttcctttcccgagataagtttttatcaaaaaattatagttgtttgagccctttctcgtcagaaaggtttgatcaggaagttataacgattcgatccctctctcgtcaaaaagatttggtgagggagttataacagttcgaccctctttcgtcaaa

SEQ ID NO: 326620 - DNA, 629 bp, Cannabis indica
aaacaatgtaaattataaccataccagataactcagtatcacgtttttgaggtttgtggtcccaactaaccaaccccttcccaccaataaacggaagcataaccggcaaagaaaacgggaatttgtcggcagccatcggacgtggagaagaagacattgaactagaagctccttcagcatcaaacctccggcaagagaaactgctacaactctccgactcactaacgtcggcactcaaactgtagcttccgcaacgttcactctgctgatcggaaacggcttcatcatcggaagagacacttcccattgttgaaataataataataaaaaaaaatgaagagatctcgttggtaagtcacattcgctgccttgagccgtaatagtaccgcagccaattatcaccgaaactttcgcttccttcctcgcgtggtctgagaattctgcacagagagaaagagagagaaagaaagaagaagaagataaaaagcagtagtggtggtggtagtgatgaaatgataaaaagcagataaagtaacagacacactctctttctctctcctctctttttctctctcttctcttctctttctctctcctctctttttttcctctctctctcttctctctct

SEQ ID NO: 326621 - DNA, 785 bp, Cannabis indica
acatataaagttttgctagggaatgtctcaactctcaagtattacgagagttccacacattttttagaaaaaaaaattaataaataatatacaaacggttaattaattatagagtaatatcttttgagaagtgttctatatttttatatattaaaagtgcttatttaacgacacttttaattatgatattaaaaaataactaaaaattaatataacactatatacgtaatttgtcacgtaacatttatctagtatatataatatgtggtataaatttagaagtttatttataattactcaattctaattacttcctaagaataattttttaaaaaaaaaaaatctcacatggaacttctgggcaactgatctgggccagactctcctcacataaatctttattataagataatgaatcacatcagccaaacacgtaagctttacagatatgatcagatgccgtggattaaactaataaaatgtttgaccttcaccaaagttagattactttgacttttttataaagggaaaataatttgattcagatccctttcatgaccacaaaaccaattaaacaacatccaaagattcccaaagcgtatatgttatgcgactctcgttaacttttctcgttgctatgtatcataactttgttaaatcaaaactttattcatttttttttttcattattattttaacctaaaagcaaaagatttcacgttgaaaattaaagaaaaggggttgctcacgtgaattcataatattttaagggaaatttgattttc

SEQ ID NO: 326622 - DNA, 1041 bp, Cannabis indica
ccattcatcatacatagtgttaaaccaaatgattggaaagactgagatatttagagcttgtttggctgtgttttcacttttcagcttttaaaattgtgctgtcaaaagtgagaatagaaaacagatttttgttattttaaaatttaattgtgcttgacataaattttttaaaattatttttagattttttttactaaaaaattaatatcttaacaccataccatgatatgaactcatccagatttgggttcgggtttagttccgggtctaggatccgagtatgcaaacaaaaatataaaatataatatattagacaaaaaaaaaattgtttttagaaaattaaaaacaacattttgatgtttttcgttttctaattttttaaaaacttcaattttaaaaaattattttaaaaattttttagtccaaacgctcctattagtttttaaaaaacttagtttttaattttaaaaaactaaaaaaacaagtttttaagttaatgaagtcaagagcctcatacttgttgtaatgccaattttgaaattactacgaatttgaatatattagtctaatggattatgtagattgaaaattgattcttctttggtcaaaaatcacatggctcccaattgtttcaacgagggtctatcgagttttcatttattatcattaattagttccataaaaaaaattataaacaaacaaacaaattaaaagaaaaagaaaatgttctttgattttgtttgattatatagattaaactgctccataaacgatcacaaatcttacataaaaataatgataaatctatggtttggaacataataaaaacacaaatataatcagctttagcaatttaagcttgtggggcttcttgaccaatccaatcaccatcacaacaaattaagagctatgacatagtgcttttttaaaggcataaaaacatgttccagcctaaagtcaaacctatgaattttgcagaatcatgcagagatttcagcaataagattggctgagaagaatcttttatgtgttttttttttt

SEQ ID NO: 326623 - DNA, 1171 bp, Cannabis indica
gtacaatatttttgtaatttctgccgtgtggactataaaagtaataaaatgccaaaatacagtataccatgtaaaaatcccttatttaaagtccattaatgggccctaaatgacaagaatcgggcaaagcccaatactaacaaaatataaattaacataataatttaaaactattttacttgaatcagttgattatcattaggcgacaataatgtataatcattagttgaactaatcttcaatcctattcactatacataaaccattaaaatgtttttttttctttttcgttctgaaatgacatcaggtaataactattattactatgatctaatatggatttttcactgatttataatcgatataaagattgttattcttatcaaggatcacaccacagtccgaagccttctattttttaggacgaagattcacccctagatactttagaggaaaagaactctcctctatttggaccaagttaagaatcttcaatttaacttcatctttgattccaccaaaaaagaatccgagacttagctttatttgtagataaccttgtagcattacaaaatttagtaaaggcttcttgaacaattctcactgatttcaagtttcctttgctaaataaaatgaggtcatctgtaaaacaaagattagtcaagcggaggtttttattcctcaattgatccactcggtgttgcttggtataaggaattactggatgagtatcattttaattcctcaaaagataactgctgccatagacaagagttgtcgggacttcttatggggaagaaggggaacagaagcaaattgcatctagcttattgggaaaaagtttgccttcctaaaaagttaggtggaattggttttcgagaaggaaagaagtggaacaaggctttaatggccaagtttctttgggctatatcaagcaaacaagataacctatgggtgaaataggtgaactcaatctacctgaaaggtcaatccatctggagttatccctcaaaaccttatacaagctggtattttaagaaattactgaatctcagggtggctacaaatgaaactcagctgaaccttgctgtcaaaggtgggaaatttagtgctacaagattctataatctgttgggttttatgccctaaaaaaactctatttcaatgtaat

SEQ ID NO: 326624 - DNA, 1423 bp, Cannabis indica
tggaccataaaaactaacaattgtttgaaaagaaattatttattggacagtcgcaaatagaattccttaggatgaaattatccaaaagacaatatgaaacccaaccacatatagtccatgaactactcaaattctctgataaaaatcttactaaagtttaggtccaacaattattgggtatcattaatgatttgcgagactttgtttcctaactttctgtactgacaagaccacttagtaatatgcttaaaaagaataatccataatggtcatatgaccatactgtagtagtcagaaagctaaaagaaatcatgcaaaatctaccactttcacagatttcctctgatagaaaacatgttcttcaaacagacgctaattaccaacattggggtgttatccttctcgagcaagatgaactatgagaaagagaagaatatctggatataagagtggacacttcaaagattcccagctccattatcattcaacactcaaggagttaattgcaatcaaaatgggaatcacaaaatttgagttccacctcataggtcatcattttttggtggaaacagattttgctacatcaaaaggaatgataaacctgacaaagaatatgccaaccaatgctcaaattttgagattagcaacatggttcgatgatgtactcttttgaaataaaacaccttctcagaaaagaaaatattttggttgaccttctatctatacctatgtctataaatatggcctcttcacatctgctccaaatcatccccttaatctcctacaacttttcttatactatctatacatatatataatggcatcatcacaaaagaattactcattttcttgagatgcaaagctcatcctttccaaatctaaaactcagcaaaagaaagggcttctccaggactgtttatactcacatccaacttctccctaaacttggccctattttcaacatgattttttaattcaccctaagtatcttttcgccaatctagtacccctctagactgcacttttcgctccaaaatccatagccatcttttcgggtacctaacatggatctgtatgattaatgttgaagtccaaactatggctcttcacacttctatacagtcctttctcaaacaagaaaaattaagtcagcttaccaaatccaaaaggatattttgttttggtacgctcctctagagaagtggaaaaaaatcttttgggatgaatgggaaaaaattcgcaacattagacacgtctttgtttctctatcagggccacataccgccaatatgatggatcactacactgatttccttatcagtcttaatgctaaaattggatgagaataagaaaatagtttacaatctaacttttgaactatactgtaatactcggtaaaaatatacatatattttaaatttta

SEQ ID NO: 326625 - DNA, 1026 bp, Cannabis indica
taaaatattaggtagatgtaagtatagaaaatcaaatttcccttaagaaattcataacaaacacaagcaaattaaaactagcaagtagaacattcatcataatatggctaatgccttcatcaccttatttttccatctcatgtatttcaagcatgaatattaattaatataagcagtgggaatcaaatgcagaacatttttccttttgagtgttgcaccaagtgactcaatcatgtcaagatcttcatgtttcattccattagggagtttccaattgaaatggtatagtaacaatgcaagggtaaactcgacatttacgagaccgagcgatatccctgcacatattctcctcccagcaccaaatggaagatactcaaaatggttaccctttgaatcaatagagctattaaaccatctttctggaataaaactttcgggttcagtccaatacttaggatctcttgcgattgcccatacattaaccatggctcgggttttcgcaggtataacaaagccattgatttcgcaatcatgttgactttctcttggaattaagaaaggaagagaagggtgtaatctcatggtttctttgacaattgagatcaagtatgtcatttcactaagcattgtttcatcaatatttgaagacccttttctgttgaaaacttctctaacctcttcttgtgcttttttcattatgattggattctttatcaattcagccattgcccattcgattgttgtggttgatgtctcaattccagcactgtagaggtcctgaaaaaaagatataatttgattaaaaccttaattaatctatacatgtagtcattaaattattataatatataggtacgaaacttatattgttttttaactatgaaaatgtaactaaaaatatttccatttgctgcaaattatctaaaatagttctacataagtacttaatttaaaatagctttattttaatattttagtttaatttctaagacttacatatatatatttatatatataatttttttg

SEQ ID NO: 326626 - DNA, 521 bp, Cannabis indica
caacgcggagctatctcaaccgtgtccttggtttttgaaggtggttgaagtttgatttttgtgataatatctcgctatttttgtgggtttgtaactgtccttgagcttcttgcaggatttgaatatttgaatttgtcattgatgatgagggtctcgcgagggtgtgacatggtcgttaaccaccttcggggatagaagctagtactaggggtgacacccctaagacccaacatgaggatggtgtcaattaccatctttgggtgacccctaaacatcttcaacgttgtgggtaatcatggtatcatgagaatgtactcatcttcttttgaggatgtcattacgtccatggtgggggtagtgtcatctaataccccctagactaatttgacctgttggggtgtggtgatcgtttatctcatctgtgagggtgttatagtgtcacgacccaagccctaagccatgagagatatgtaatatccataacttgggtggtcaaaggtcacactttgacccttgtagga

SEQ ID NO: 326627 - DNA, 561 bp, Cannabis indica
aagtcattaaatttttatttaaaaattaatttaaatatacaccaataagaaaaataatacatggataatattgactttaacactataacgatcagatacctaaggaggttccagaaatataacttaggtattattacggtcaaaaattaaacttaaatatttatctacaactaaaaaagagtcaaaattaagtatttacactgtaaattactctttattataatataaattctcatcatgaaataaatatacatacaagtctgaattatatacatgaattttcattcacattccaaattatttgaaaaaaaaattgacaaatcatttgctgtataactattaactattaaattatttttaaaaaattacatatactaagatcattaaagatgaaagatacaaaaattgtgttatatttgatattaaaaaataattttataatatacttgcattaaacttaacattgtgttctaatataaaattacaaatcttgatacaaaatttattatttaattaaattttttattaaaatataaaaataataactttatcattaatttt

SEQ ID NO: 326628 - DNA, 720 bp, Cannabis indica
ttttttttagttgtttttacatgtgattttggttctagaaatttatatattttatttgttttgtttttatattagtggtagatttactgatttagaatattgtttacatttagttttttcgacataaatagttatttattggtgtattttttcattcattttggattttattttgtaatgatcatttgtattttttgaggtttaggtttggtatggagttgtttgctaacagtttgctaatagttgtattgtaatttttttatattgtgcttactatttgcttttatttttgataattttattatttgatttcaagaatggaagtataagtacgttgaatctgatcactataaatcgaaagtagtcactcttgcacttacagtgtcattgagaagcttattatcactctttcaagaaatatcaagactttgtttcgtgctacttaatttggtaaatttgtagacattccctcgtataaactctaccctcaagtggtccatgttattcttttaagagaggtgcaacagtccaatgggaagaaattttgaacgaacattgctagtcgttgtattcgttttagtgttgaagaattcactttgattatcagtttgaattgaatggagaattgtaataaaaaaaatttttactcaagatccaaaccaaattataagttttttacggctaaactctcttaactatcactctacatgcacttaattc

SEQ ID NO: 326629 - DNA, 673 bp, Cannabis indica
attctaatttataaaaaaaatcaattagaaaaaaggaataaaaaatcaagatatttttattataattgttaagatatatttccttataacaatatattaattaatttctgatttaggatttatacaaacactatttcaaaagaaatgatggtatgttatatttatagctgtaatcttttcacctgaataggtgtgatatatagttcatagtacatactatatatttatgtgtatcaatattaccaaagttgtagctttcaaaaaaataatattaccaaagttgtacaattttttatcataagggtgcttatattctattttggttatatctaatcatgtttatcacttattatatatatttctcacgtttcaaaatcaccaacaatatattactattttttttgttgagacattttgtaataacatatttactattaaaatatatctcttagatatatttttttttcaaaaaaaaaaaattatctaacacaatttgctatatgaatgaataaaataaaataaatttataaaattttaatagaacaaattacaatctgttttgctctattcttacttttattgtcgttaatgtgtacacttaaagtgcactaaaaaataaagagatgatttactttaaagaagaaaaaatatttatgtatttttttttaaaaaa

SEQ ID NO: 326630 - DNA, 932 bp, Cannabis indica
ctgacaccattatttttcttgaagagagagtgcaacaattcaaaccccaccataacattatcatgaatagcacgacccggcacaaaggcactttgaaacgaagagatcagtggagataatgtacctttcaaccgcaacgccaatgccttcgccacaatttttttaatataccatggcaagccgtagattaataaagtggtccctgaattatagaatgtatcaattaagtcattaatctcagaattaggtccctacatatatgcaatattttctttatgaaaattgattggaaggcgttgccaaagtggatatatataagtataaaacacactgccccaattaattagcatcacaaattcacactcttgtatataaagatattcctctactaaaatactatggtatgtgatatttcttaagaatgtgattactttagaatctgatagttgtattaatgctattcctattgctgtgattcttgacaagaaagaatactgcttttaatgacttggaaggtcttgtttggggcataaattaaaaaccttatcattaaggttttgttttaatagaaactaattaatagatcaactcatcgtttagcaaagttagctctagagatgaaataaccatgttttctttgcttcttcttctgtctttgaggcatttgcacattcctttctagtgcttttctattaaatgaagtactttccttgaaaaacaaataaaataagggtgcattatgtaaagtttgttttcaaaaaataaaaatgtatttggtattttttttttatgtatttaagtaaggagagagaaattaataaacaaaagtgaagtgggagaaaatggtgagagaaaaattaagaaaatattgataggaaagaaatgtacaaaatatactgtgattaaaaaaaattgtttaaataaattttaaa

SEQ ID NO: 326631 - DNA, 3481 bp, Cannabis indica
tgtagacccgcaaccttgatggccaactctgttctcccgaaactttctgttacttcccggtgttccagaagctttagccttgcgtttgtgatccgagtttccattgtcggtccccttactgatactaccacccacattagggttcaatgtcatgacgacatccttagcagcctgctctttgatcacatgttgttttgcttcttcaacaatcaatgctaactcgaccacttttgtataaaaagcatcatgattggtcgtaattttcaagtcctgactgataatggcattcagtcctcttacatatttatgtttccaagtaaagtccgttggtactaggtcactagaaaacttggataaacgatcaaattctaaggtatactcggccactgtcctcttcccttgagtcagcttcaaaaaaatcttccatatgcaaagttatgatggtaattttataaaaattttcttcaaacaagatcttaaattcttcccaagacatgatgctaacatctcaggtctatcccaccagacgcgggcatgctcttgaaacatgaatgcaacacaattaactcgtttagttcccatcactctcatattatccagaatgtaggtaacaatgctcattcattgctctgcataataatatcagtacctcccaaaaacgttgtaggttgcagcttaataaaattctcaaacaatgaatctcgatgtggcaaaataaatctagggttacccaccactggaacaggagatggtggtaacactttttcaaatggatttggctgggccggttacctaaaccaacacaactcatcctcttgacgaagtatgacgcttcgtattttgagaaacatttgttgatagtcgacaggtggattagcattgttaacccccgcattatccctcgagtcctgcggagacacaggcggtgccagtggattggtttgatcattaccaggctctacgtgctcgccatgtggtctaggtgattgattagggtctatttttctcaaatagccctgaaatcaacaaccccagcgagtcaggcaccaaaaccacatttacacacttattgccttaaccctaagtcatacatgtttttttcctcttttaaaataaacattcatcaatttaaacactaatcatgcttttcatataacatttcattttctagatgctcatatgcggctgacaacagaaagcagttaacatttgatcacaaaatcaggtaagcatttactctcaatacttaatacaccacgagtcgagcttgtctctgacgatgattgtacatattcagctggtctataggaagttcaaaaactttggcgctctaatatcaaattataacgccctaataaaaggaacgccacgaacagtgactaaacatatgttgatcccgctaaaccgagatttttaaagctaagagcagaaatttaaattttaaaacaaatacagagaaaaattataacttgtaattatttaactttacaaacattcgaaaggtcacattttgtatcaggatctcgtaaaaacttctcaaatattacaagttatcatttcatgccgacctaagcgacaaaagctgagattataaaatatttcttctcgtagacccaacccttgtggtctagtatggcctgaacatgtacaatacatcgctgagccctcgaacttatggctgatcaataacaaatttaccttttcctgcacagtagagcacccatgagccaagcccagcaagacaatataaataataataatacgcataataatcaaaaatcacataattattgatgccacttcatctatcatctatttgatatagacctacgtgttacgctcacacgtctatttacaataaggccttataacggtttttctcggttctaattaccgagtataacctatttatgccttacacgcataattctttatctcaatatacacagtatagtattgcattcaaaaatcacttaaatactagagtaataaccctagaccatataaccgcttattttagggtaataaccctaatctcgatttctcacttaacatatgcataataacatacacgagtgccacaacacttaactctatgtgctaccttactgtcttacctggtaatccaagtatgtggagattccaaactcccgagtgttcccaagcaaatgtcagtattcctagtcacacgttcctgggatttcacaaataggattaatcctaattttaatttcacatatacatataatttgcattctatttacagattaacatatagagctcaaaacggctttctaacgatatcaagaacgtccaaaacggagtctcgagtcaaagttatggcaaaaacaagcatacaaaaattctcggggaaaatagggcttcaccgtggcgaggcaggccatggctggggcggcaccaaccaggttgcccacgccacagcaagggccctggaaccccctaaaatgctatttttttaatacctcaaaaatttacctaattcataccaaatctcattccaaaccatacgtaaattcaaatgctaaacctcacaaatataatcaagaacttggcaaaaaaatgagtttgaccaaagctctaaacaacaccaaaatatataaattaaacaagtcattcaaaatcaccattatcaacaagcttgaactctaaacttcaaagcatttcaaccttcaagagataccaaaaaatttagagcacaaacccaaaatttaaaccacatttctcaaccctacaattatccaaaacaacctatatgcaataatcataatcccaaaagctcaaacacacaataattacaaatatttcccctcaactcaacaacatgcatccacaatctcaagaatcaccgaaacatcaatgttaaaacttaaaaatcagaattcataataaaagaaaaagatcaaagttattagctagtgttcttcaagtttcaaacacaagaatttgcaccaagctacaccaaaattcaagcctttccacaacaatcaaatgaaattatcaaaagggagagggtgagagagggaggtcggctaagagataagaaaacccaaaattttttaatttttcaagaattgattttgttgaataataaacttaattggtcaaatgaccataatgcccccaaggcatatatatccatatacaattaaaaatggtaaacatgtcatttaactcacacttatacatcacaataattcaaaatttctcatttatcatataaataccaaaaataaatcccaaaaatgtattttgggctccgaacccggttcggcccaaaatacctagttgtgactatattgtgccgacttattagaaaatacttgtaaatacacccaataaccatactatataataatatagtccacaatcacattacatcataaaattatgattttacccttcacggatcaaaaattacgaaaatgtccataacacaccaacggggtcttaaaatacaata

SEQ ID NO: 326632 - DNA, 1230 bp, Cannabis indica
tttttaggagttgaggtactttgaaactccactggtatgtacctgtcccagtccaaatatataacagatctactcacaaaactcaatatggaaggggctaaacctgcttcaaatcccaccagctctgctcatgttctcacattggacagtggagaaccttttgcatatcagactcagtttcgaagtacaataggtgctttgcagtacttgaccttaaccagaccagacatcacattcattgtgaataagctcagtcagttcatccatgctcccagcaatgtgcactaggaagcatgcaaaagattgtttagatatcttaaaggtaccatacatgagggaattcatctcagactagctttacatttgtctctccatgcctattctgatgcagattgggcaagctcacccaatgacagatgttccactggcggttatgcagtgtttttagggggcaacttaatctcatggtcagcaaaaaaacaaaatgtagtagcccgaagcagtacagagagcgagtttagagccttagctaatatagcaccataggtgaaatggctctgctatgttctgtctgagttgcacttcacgttaccagctgctcctgtaatctgggtcgataattaaggtgcagcatctcttgctgcaaatccaatctttcacgccaggtcaaaacacattgaaattgatctgcactttgtgcgagatcagattttagctaaacaacttgaagttaggttcgtaccatccattgatcaaacaactgatatacttacgaagccactcataaagagcaattcaactacctaaaaaccaagcttcaagtgtgcaccacaccattttgcttgaggggggatgtcaaccaactaactcctacagttaattagttgtttctgtttttactgtttgtacctaactgtaactaattctgttacattgttgctccgtcttttctttagttggtttctcaatttctctatatccttctctctataaataatggaatggttcttctctttggcttaacctttacaagccttagagactttgtcttcaattgtttttgtttagtgctttgtattgataggttcatacaaaaaccatcatattttcctcaattacaaaaaaagttgcaattaccgttatccacaattgtaaaagtaaaatcttaggtaccgtttggtaacacttttgttttttaattttttaatcacaaaatgaaagtaaaatctt

SEQ ID NO: 326633 - DNA, 857 bp, Cannabis indica
gatctcaaggatagtcggacaagaagcctacaaactgcaagcatcagatggacgtgatataagcaacagcctacaaactttcaaattattttaaatttaagctttaatttctatcatattattttcaccttactgacttaagaactggagggtcgacggcaaagccgtcaaccgcgccccttgacatttgaggatccaactacaaacatcatgagaccttggtaattgaccgccaggtaaaaaagttttaatcaattgaatttcacaataagatcttaatactgacttaagcatcagagggtcgacggctttgtcgtcgatcgcgtctctaacattgcagggtgttgcttggaataatatataagtgtttgacaaaaaatgcaatgttcagatatgacaaaaatccaagcatcgacatagtaccatgcccatacttggattggggagtaagatatgagcatttgaacaattcgaaggagtaatctcacaacaatctgaggttagacaacttttataatattaacaattagcactaatcttatttttcaaatgcgttattttataagttcttcatatataatatgatttcctcattttttccaaagttcaatcctttcaagtctaagacgcgtaggatgtcctagagtggcactctttgctacgtgaaatctctaggatagatacttaaatcatatgaaggatgcttgaattccttcacagatggaaagtcctaaagtggcactctttgctacgtgacatctctatgatggatactggaatcctataaaggatgctagaattccttcacagatggaaagtcctagagtggcaatacatcattgatcatattaggatta

SEQ ID NO: 326634 - DNA, 978 bp, Cannabis indica
ggtagggttttaaaggaaaaagtgcaagtttaaaatgactaaaaaggacttgggatcgctaccttctacgaaatagttaaccgttttgtcaggtatgcaaaaaacggctaattgtttcttgcagcagcttattttcccaaaaaatgcttcaaaacatgttttatgcaaccatttgacctcaaatcttttgtaacaccttaaatatgataaaacaaatgctcaaccaagaaaatcataaaaatgttgaaaactgacgatttacggtatacttttgggaaaatgccataaaaacaagaaccttaccaaaaatgaattttatgcaacaaaattgaaaatttatttttctagtactttgaggatcttaaatttgaggtgtacacacatacaaaatcaaaaaaaaattaaaaatgagaaagtttggtgaaaaacactcttttaggcctaaaatctataaaatcaatatgtagcataccaaacatttattcaatgcatatttcagttataaaaaatctttaggcatactaaatgcacttaatttgacatgttcaaataaataaacacacataatagtcaaatatgccaaaaaatcacatgttcacttatttgaaaataagtccaaagtttacaaaaaaattcacacaatgacctataatttagatttttcagtaagtatagttcatgtaggtcaagcatcaagaaattttctcataaatgcatataagtcatgtaaatatcatttttcaaatgaatatgcataaataagtgagcaaaccttatatttcatttaagttggtcatgtctagctctcatataatgaaactaaatatctcatcactaggaggcttggtaaatatattcgctagatggaattcagtgcttacaaagtctagcatagtatcacctatttggatatggtctctaaagaaaaggtaccttatgtcaatatgcttgcctctagaatgcaatattggattctta

SEQ ID NO: 326635 - DNA, 736 bp, Cannabis indica
ggggtgggggagcaatccccgcacccgcccaccccgtttacatccctatttataatatggattagtaaaggcaattagcactaattatttatatttaataattatttgttaatttatttaattgtgagtctcattattaaaggtgggcattagagttataatttcttaattctggagattttattaaactctaggactattatttgtattatatttggattatgctatttttacgatttttgctcggcgacaacggaaaatgtgatggattgctagtttaatcacatggttaagtctagaccctttttcttagcaggatatatgttggagaaaaatagaatatcgagtttgatcgggattacggttttttaccattttatccctaggcttgaatttgcctaagttaagcaaaaaggggtattttagtaatttggcaagtgggaatttggtggcagcctagggagttgacacctagattttgttatatcggcaaagattaatttagttaatatttattcatttaggaaaataagagaaaaataaggaaaaagccaaaaaaaaaaaaatcaaagaacactctctctttcccttctctctcttcgaacccaacaagaacagccagcttgggattgttttttggtgtaattgaaggagacttagctgaattcaagtaggttctaagcaaaggtaaccctagaattcttaatctcttgtttttgaagctttgattttggtt

SEQ ID NO: 326636 - DNA, 951 bp, Cannabis indica
attattatatcatgttaatttttgacataatatctgctccacttacatttattagtatataattttttagtgtcatcatctattttttttaaaaaaaaaattactgtaatataaaaataaaaaatagagaatttattctttaattaacgtatgacatattattacaattatttttacgattttaattgattattttaaaaaaattgaacttcatgtattattattattattttggaattctttggtaataggatttgatatgtaaaataatttatttaatataatatactttgtttcaaatatttgaatatatgatattagtaaatttataatgtggtatatttttctgactattattgttataataactaggtaaatgtaacgtttcgagccatataaatgttagttttatttaagatacattgtcataaatcaaaaaaaacatctcatcttaataaagtataaatgcattccagcatgagcttcaaattgggaaggactaacctggtcaatatagtgcaaatgatatcaacaactaattaagatacatcaaaattcaaatatcatactacataacatctatctgaatcaagaactttacctctttattacagtaattgtagaatatgatatccttttcctacttgcagccaccaataagtatcctctagaacatgataattcaggcgaattatacattaattagttacctgttcataaatcccatacatcaactttttttattattattttatttttaatttgaccaaaacccccgaaatcaaacaaatgcatttgaagtatatatatgtccctgccatttaagtctaactcaaagtgtaaatatgtctgctgcggagctctataaaattaaaacaccagccaaaggataaaataagtaatatgtgtacagtataacaactaattgttttatttataattgagcaaaaa

SEQ ID NO: 326637 - DNA, 835 bp, Cannabis indica
cataaagtaaagtaggaccaaatgaaaattgacatgaatagatgaccatgtatgtaaatttttataccacattatcatgattgatctttgtcattgactgtgttgatatatgtgactattgatacaatgaaaaccgctttgaccctatgttgatatagttaatggacgaggttgtacatgcctacggttataatgataaagttatgagctcaataaaattaatatatttatatatatacatatgtggcctagtgggagattgttagaaatttatttatttgaggccacaattgtatatataaaatatgtgttggatcatcatataaatgagtcaaatttatgtgatctattttgaaataaagtttataacttaatggcataattgtcatgattttttaatatgtggataccataaagacaatttctaatttgatgaggggctgaatagaaatagtcaatgaatatttgtaaatgttttgtcagttggtaatagagctattaatggtctccaatttgtagtgccgtatcttttcattatcttgaaaccccatcatcaaaagataaaagttcttgagaaagattttactgcaaaattagaagatcatatcattccaaaattgattttatggactctggtacgcttccactaatctttgattctgttattgaatttctcatgaaataattagggctaaatacatattaaatgcgcctaccatttcttgttaaggacaaggatgatatcttttgtcttgataacttttttctcaacaaatcttgtcttataaattttttcgtaacaatttttgtcttttcctatttaattaatttaaaa

SEQ ID NO: 326638 - DNA, 1297 bp, Cannabis indica
attttatgtaaataaaatcaaaaaaatcgtaaaaatgtttaaaattccgtgaaactatatttttgttgttttttttgttgtttttatgcattggtgaaagtatcccttcttttttttttttcaatgtgctaaaatataataatacaccacttttttggcactccattagaaatactcttatttttacatacatataatataataacattaccttgaaaagaattgcatcagcttgagggattgtttgaaacatgtcaccctcaataaacttcaagtttggagtactattatgggaattggcttcaactgcataaggtaggtcaaaaactgagcatttcaaatgaggaaattcagcaatgagcatcctacacattgatccagtattccctccaacatccaccaatgaagttattccctcaaaagtagacttgaaatccttgagaacaaatttcaaaactccggaatcactttccattccttcatccaaacggtcaccaaatccatcaacattcttaccccaatactcatacaagctcaacccttcatcattagctaaatgaaacggtgagggcggactatctttctttagccaatttccaattaaactgaatgcagttacagtaactggctcaagaacggcaagaacatagccgcccacacttgggacgccattgttattaccgttggtgagaagtaatttggaagaaggagtaagaccatatacttcttctccttcttccttatcatcgtcgtcttgcttctcatttgagaagataccagagtgtaccagtacacgcatcacgcgacgaaggaaggaagttcttgaggggggaatttgaagagcagaggccaactcatgaagagtaatggtttggcctttgcctttgttgaatattatatctggtatgcctaactctatagcacattttagagccatagaacttgcatagcttagcatatgtttgtacacattgacataaccttgggataactcttgagtagtggtactattctcatgaatggaacccataattatatgatattattattcaaatgaaaaactctcaaatctatatccctataacatacaactatagcttcctttatatagcactactcttacggttcacatgtgttgatgagagattataacaagtaatttttgaaaattaaataaaaagctttaatactagtactactaataatatatttacgggtgactattcaatggttaaatttttattgtaaccatatggttacatttttctttaacctgtaataacaggttactaatagg

SEQ ID NO: 326639 - DNA, 992 bp, Cannabis indica
agagagagagagagttcagacttagcacttaatgacttagggttttttagcttagcgttttagatttttgttaaggctttttatatatgaggacttaaacccttattatcagataaaataagcagattaaattagtaaaatacaaattactaaaatgtccctaaaaatagatattttccatctactttcgtggattgttaagacctaattcacagtctagcttgttgtccacgtgtaatgttgtgcactgaagtcctaccagaccaagttctggccggccatgcacctacaggatgcaggctggccggcctagtactgtccagaagttggccagccagtcccgttggggtggctagtttattactcatcatcccgtttgagtgctaagactccctgtttattgaagtgcgtagatgacttggccttcttgttggtgagttgtactgccacatggcgctgagattggctacgtagacatgccacgtcaagtgggcaaaattcaggataacaccaattttacccttgtcttggtgcttaaataattaaatgactcaggggtaaaatagtctaacaccataaccccgcctaaccttaatattccaagctcaaacatataattgtccccttaaataaaaaggttctatgttcacctatgtgactttactggccatcaaatgcattttctatcaccacggagctaaaatcataaaaattgcatatttcatatttagcataaataatactcttagagtttaataaaatttctagaattgagaaattataaatttaatgcccattttttaaaaatgggacccacaacataaatatattcacatataatcatcaaataacagtaactaatgctaattgcctgtaacgtccccgcttcaagcctccattgggtccttacagccacggaatgaatagcgcttatacacgaatacgccactctgactccttcctggattgatgactggccctacagaccaaca

SEQ ID NO: 326640 - DNA, 1106 bp, Cannabis indica
ttagacgaacagatacaaaaatgtaaacagttttgtcatagcacttttagatcggattataattaaactttattttgacaaaaaatcaattcagggtcctatttgtactattttagaaaatacatggtccattttgtcatttaacaaaacacagggtccaattgataacttttgtaaaacagagggtccaaaatggtatttacccatggtgatatattaaggaaaaaaaactacatgtgtaggtcaaagatgacaattaatattttgcatgcgttacacataagaatacagagacgttacacaatcacaatgatagaattaattatattaatttagttttaacttaggttggtttaatagctaaaacctctaaagccaaagacattgacaataacgctaaccttaacattctagttgaacccgatcgatcatgatcttaaatttaaataagaaataataaatttacctaaaatttactaaatataatattatttttataacataataaaaataaaattaatatttttaagtaattctataatacactcctaaaaagaggtataccaatacacctcttatttgttttggcctctagaaaaaaaaaaattaatttaatttttctatagttgtgtactttatagttgcaaaattttgagaaatttaaattaatttacaatatgtaaacagtgttcaaacaatttatttcaatatgtgtataagatgaaagagtcacacgtgcaacagactgtttgaatgttttcggcgtattaaatttttttgaatttctcaaaattttataaaatatcataaataactataaagtacataactaagaaaaaaattaaactaaaaaattctttcaaaatacgagacaaatgaaagtgcaccgatacacttcttttatgaggatgcactgtaagaaatgaatttttcttttaatttataaagtgggagaactgcttgttgaaattattattattattattattattatttattattattattattattattattattattattattaggctaattagtaatttttccctccgaacattgacatgtactaaatcgtgccccatgaacttttttggccgtta

SEQ ID NO: 326641 - DNA, 719 bp, Cannabis indica
ttttttatatatagtaacaataatgctctttaattcatattagaatgggacagtagtgagaatataattagtaagctttgtcatttgattgactcaattgtagcattaaaaaattgactaatcaccaccatctaacaaaacaacaaaaagttggataattaaggcatttttcaaaattaaaaaagaaaaagttggaaaaaggcatgggatgggcttgtgccgcacacactctccactcattagtgggcccatttatacaagacccgtgcccaacacacgcacttccttgccttattttctttgtttattttcactggttcataatatatgcatgttcattgaaccgcacaaaccgcccgcaccgcaccacattgcataaaaaaatgagatttgaaattttttacagtgtagttacggtttgtatttttgtcaaattacacagtgcggtacaatttataattttaaatttaataattacagttcaaattgcatcgcactatacattacaaatttactaatttttataatataatttttattctctttttcatgtaagaacaaatatatataacatatatgtatagggaaatttgaatttctacgcatacattaggggataatttttttcttaaacttaaaataggggtattgataaaataggataacatttacttaattcccacaatactccccatttgaaacctgccctctctctctct

SEQ ID NO: 326642 - DNA, 747 bp, Cannabis indica
tgttatgtgcctttccaaggcctgacataggtagacaaaccgactcatttcttgggattcttgttaagggtgtgccacgtaggatggttcccaaacaaccatccattattggatgcatcttcaaatacccttccttcgatgactcctgagggcatcagtcttcatcttttggatactcgttgatagagcaagtgtttgtcttctagaactatatgtccgacttagtcattgtgagacattggtggaatctgaactctttgtctgactctgctcatggattgggtggtcactccacgggctcagtaaatgggcctattaggctagatgggccgatatgaatctacaggtgtcacctatgcaaaaacacagataacaataccaaacatgagattttttttattatttcacttttcttcccctatattttctttacatttttcttccccaactaaaatccaagttttaaacatagccttaaggatatataaatcttattgagcacccctgccaagcacgagaagcgaacctcttagtccatcgatgacgacgacaactgttacgaaaattgtaaatcaatacgcaagtgcacgcaattaagtagtaaactcacgcaagtgaggttgaaccacagggaattggattaattaccactaaattatacttatgattctatttggcaactcgataattttcaagatttaaacaaaataaaagtaattcaacaaacttaaagaaacaagtgaatat

SEQ ID NO: 326643 - DNA, 965 bp, Cannabis indica
ggagttttgcgttctcatgtttcggttaagcccaggtttaatggataacaacatgatcagtactactaatgctactactgctaataatactcctactaataatattattaatggcaaacagtgctggactgatgataatttagaatttaatcatctcatgaataatgtattaatatagtcagttatgtattgatgatattaattcttctcttgtcatcttcgtcatcatttctagcttcttacaaaataagtagtatattgtaaccttacttcatcaatagtacggtccgcgtataaaggtatactacactatggtagattgtttaattaatttttgatgataatccattttaatctttatgtaatgtaataacgttcattctcttattaaggaatagcaataattatgctaattaattaatatgtccaatttatttccatgttcagatttcgatggctataatgtttgtgcaggatgaaagagagatattttagagagagttaatcgtcattcacatttctattatatgttttattccctgtctaccattagctatacacacacatctggctctatcaatcatctacgtcactgattggaaataacatgtcttcaataataattaacatatcaaatatattccttcacgaaaaccgataattataccaataataaaataaataaatgtgtggataaaaaagaagagaaatagatgtacatttttctcaaaaaagaaaaaatactgcttttttattttttacttatataaaagtgttattggtgtaattcatgaccattttatccaaaggtgatatttttattgacaagtatagccttatttcacaacctactcttatttatttttttctccaactattttgttttggacgtatatgataaggtgcacttataaaacatctcttacatatatatgtatcatgaataattaaaaagtttacatctc

SEQ ID NO: 326644 - DNA, 723 bp, Cannabis indica
ctttttagtaacaaacttgtaacttttgtaacatttatttaatcaattaaaaaatattatatcacaatataacagtgggatcattgattatgggatcattgattatgttaaaagtattctttactttcaagacctctttcacttctagtgttgttgcagtaagacatgccaaatatagtcttgctacagcgtgtgatattactaataatacatattttttattgttgaataatgcatatattcttcctgcactacaatgcttttgaaagagtaattgttatcacatattaaatagttgtcttaagttcataaaaaaaaaagtaattgtctcaaatattgttgcaaaagactgtgatattactaacaatacatatttttattgttgaatagtgcatatagtcttcctgcactacaatgatttgaaagactaattgttatcacatattaaatagttgtcttaagttcataaaaaaaagtagttgtctcaaatattgttgcaaaagactcatctaatacataaattttgatccattgaaaattcacgaagaaaaagattatagattacaaaactttcaaacatatatataaatagaagaaaaagaaaatgcaacaaacatagaaaaccagaaattatttgaccaaataaaaacacacttcttatatcctttaatactcataaatctttttttgtcagttgataactctaaaaattagagttatttt

SEQ ID NO: 326645 - DNA, 1244 bp, Cannabis indica
tttaattagtaatcccgattaggggattagggtttcataagaattttgggtagcgtgcctaattatttagggcgttacatgtctgctaggttttcttttgttccaatcttcattacttgaacttcaccttttccaattacatctttgataaagtgaagcttgatgtctatgtgtttagacctttcatggaacatggggatcttcattaagtgtaatgcactttgattatcacagtgcactacaatgtcttctacattgaaacctgattttgatgtgaaaccccttagccaagttgcctctttgattacttctgttgcagccatattctcagcttcagttgaggatagagctaccaccttttggagatttaatttccaactcacacatccacctagaactgtgaatgcataccctgttatggactttctaatgtaaatactccctccataatcagagtcaacaaagccctcaacctcggtagttttcttgttgttattgttgtataccagtcccaggttcattgtgccctttaggtatcttagaatccatttgacagctgtccagtgttcatttccaggatctgaaatgaacctacttaccatgcttagaccataagcaaggtctggtcttgtgcagaccatacaatacatcagacttcccacacatgaaacatatggaatggtgtccgtttgagccttatcttcatctgtctttggtgcctgtgactgagagagtttaaaatgaggtgctagaggagtagtaactggtttagatcactcatgcagaatttgtccaatatctcttggacataattggtttgtgacagagatatactattgggactttctcttttgatatcaatccctagaattcttttaacttcccccaaatctttcatttcaaactctgcactgggctgcagcttcaatttgtcaatctctagtttgttcttgccaataatgagaatgtcatccacatatagtagtagcaaaattggtatgttgttgtagtactcacaaggatcataattgctccttgtgtaacctatttttgtcatgaactcatggaatctcaaattccattgtctaggagcttgcttaagcccatatagggacttatttaggaggcaagctttatttggtttgctgcttttgtagccatcaggttcaaccatctatatttcttcttcaagtttcccatgtagaaagctgttgggttttatgccctaaataaaactctgtttc

SEQ ID NO: 326646 - DNA, 535 bp, Cannabis indica
agagagagaggtatttgtgaagtatttcagaagctcactgttttgctgattttgaggcatgaaatagagagagagaaaggaaggtagagagaggagtgcttcacaagtttagtgttacacacacacattcatatcatataatataataatactacttgttttttctctttctttcagtttttaggccagagagaagaacatataattttaccatacttggctcatttcatcctataaggctataacgtcatctttctgaagtttccagagttgagaaacaaagaaagaaagaaagaaacccaggtttccatttccttcttcttcttcgctcacattacctctcttttatcgctttagcattttaagctgcattctcgaggcttctctttaacctttgttttctttattatttctgggttttcatttccttttgcagttcaactttaccttggaagtttattattattattattattattattattattattattattattattattatttattatcttcctctgcttcttcaaac

SEQ ID NO: 326647 - DNA, 572 bp, Cannabis indica
tttttttttctttcatgtcaaattttcatttttaatttcaaaaaattcaattatcatcaaattatatccattcacacatactcactcttcatctctatttcattattataactatgctatatatagggtattgagaatgatatagtgatgactacgagtgaaatataatgataacaacgattttgaagtcatacgatgagtttctataaatttctcaattatctttttttagatctctatgtaaggacatgtattatttaatttctaatattttttcattataatgtttgaaaatatctcttagagtaaatgattataaaaaattaaaaatattcaaaacataacaatatagtattttgaaaactaatttataataatatatatgtattaatttttaaaataatttgtataatattaattaatttttgtcattaagagtaaaaagtaaaagttagttgctcattttattaagaaatttttacatcaaaaatccaatttactcaatttattacaaaaaaacccctacacgcttacatcatcatttttacatttcctctttcttttattacaat

SEQ ID NO: 326648 - DNA, 547 bp, Cannabis indica
catttatgaaaaaagcccttttgtgaatttaagagtttaattctgagtctataggagaattatgtggaattcataagctaatgaattcactgtaaacttattagagcttgaatttagaggtccatggttcccaccattttttcattaatttgtttaaacatactcaattaattgttttaagtaacaattaggactgatgaaattgacttggtcaattagaagaattagaattgatgaaattgacttggtcaatttcaatataaaatagggaaaatctagccaaataattaactttgacatttaaatattgttaatgttaaaaagtggccaacaccagcttgttagattggcaagatgaataataagtttaagtaaataatttagaaagacacaaaattaaaagtagttgactcacttgttcaactttcaatttgaggttgtactttaaaatttcaggacgaaatttctttaaggaggggagaatgtaagacctcagtttgaccgagtcaaagaagaagaaatattcatatatatataataaataaat

SEQ ID NO: 326649 - DNA, 853 bp, Cannabis indica
aaagaacatagtatttctccaaatactatgttaggccttgggattagtatggtgggctagcatatattaaataaaagggtaattgagtctttgtattgagggtaggtttgtgaatacaatagtatatatagaatattaaggggaattgaggggtatgcaatgttttgagtaaatctcaatttgcaccaaaggggcctaagggctcccttactttgtaattgaatttctcaatacattcaatatacaattcttattgtttgctatactattgctactgttttattaaattcttgagttggagttctcgggtcttatcaattggtatcagagcggaagttcttcgtgattgccggtgactacagcaatggaatgaagagtggttggaatgaagtcgatggaggcggaaactgcgagaaacagaatcggtgataaactcgaatctgtggtgatcggtcgaggagggttcaacagaagaaatatggatgtcgcggggattcgatttgagtttcgatcctcgaaaattgaattgccactgttcgacgtcggagatgaccccgatgaatgggcgtacacagttgaatggtacttcagtttgcagcatttgacaccagcagaaaaattaagcgctgcaattcattgtctcgggggagaagctctgagttggttcggctgggaaaatcgcaggcatccttttgagacgtggaatgaactgaaatccctactgcttcgtagattccgctcccaaactatgcacgaaggttcagtgtatgatcgtggtgttgttttccatcgaggaaagaaagtgcaagagtatcatcgaaggtttaaggttgaagatgacaaagatcttgtg

SEQ ID NO: 326650 - DNA, 603 bp, Cannabis indica
aattttgctcaccttaagcattgattagcatcatagcatgacctatactatgtgtttcagcaaaagcacccaaaaatctattataaatacatagaagtgggtaaatgccaagactttctgtgagagaatttatcaaatttaatgcctgaacatgcaaagcaggaagacacaacatcaactccttcattgcacttaaatttgaaaaaaaaaattgaagagcaaccttaagtttcattccacggaccattataccattatagcatgaccattataggttttgtgcttgagcctgctccataccacagaccattatagcatatgagtttaaggaaaatgtagaaaatcctaaaaatacaacacttcagacttaaaatgcaggctaataagaggaagattagaaaacttatactgagacaataatacaagaagatctgttcttgtaaataggcatacactctaatagtaacaatactactaaaatcataaagtgaaaacaacaataggatattttttagtacaatggagattctaacccctcccccttctcccacatgcatactcgctcaaccaattgaactacccaacaatagtattgttacacat

SEQ ID NO: 326651 - DNA, 1143 bp, Cannabis indica
ttaattatttttttaaaataattgtgcctaaatgagctacacgtgcgaagcacgtgagactccactagtataaataaaaacctctattttggtacaaaaattagataccaatttcaactagttataatttaaaatactgttatattattaagttcgtattaataaaatatacttttatatctgtgtatattattggataaaacttaatacatctctctaaattattgttttgatagatattcataaaagttttttagtctaatttatgtttcatgattatgtacattgtatataaatacgacaaaaaaatttcagaaaatatagataaagtaaatatattttatgtataaaactgtaattatgtaaatatgttaatcatatttttaaatcaaataattttgggttaatattattttcgattttgtgttttataaaattattaattagactattaattttgttaaatgctaaaataaattttatattttttaaaattatataaaataaaattctgagttcaatttttagtatttttttttttagtaatttgtggtataaatacttaattttaactcttgattgcatttaatttttaatagtaataatacataaatatttttaaaacttctatagatacctgaccattaagtatcaagtcaatagccatgtagcaataaaaaatattatatatttagttcaggtcattaaatatttattttttatgtattataaaatttaaatatactaataagaaatgatatatggataatgacttaatatttaacggttaggtatttacgaaagttttagaaatataacttaagtattattaccgttaaaagttaaacatgttataaatttaaatatttatattagaatttttttttaatataaacaaactaaagacatacatatcacggggatcatgtgagctcatacaatgaagtaatgataatgaggttagtccattacatattggttgaactatggaccacaccccttttccccacttatgtaaaaagcaagtagtaataatgaaataaagtgtagttatatacagtaataatgatatttgaagcttaaatatttttatattttttttttttttttttttttatttttttttgaattttagtcgtttat

SEQ ID NO: 326652 - DNA, 1919 bp, Cannabis indica
tattccatacctaggacaaacagcaaaggggacatggggtccctttgtctaagccctctctttgattcaaagaaaccatgcaaggctccattgagcataagagagaacttaggggtagagatccagttcataactattcggatgatgctctgagggaaatttaagcttgttaacacttcctcaataaactcccattcaatagtgtcatatgccttttggagatcaagcttgatcatgcaactttgtttgttcgctttccttccataatgtcttaccagatcttggcaaatcataatattatgccctatgaatcttccttttataaaacctccttgggagtgagatattataacaggaagaatgttactaattctagaacccaagagctttgttgcaatcttatagataacattgcagcaagcaattggtctaaaatccttaacagagttaggacatttacatttaggaaccaaggtaattatagttgagttgatttctttaagaatgttacctgattccaaaaatgaaagcacagccgcactgatatcctctccaatatactcccaattatcttgaaagaagttgcttgagtatccatcaggtccaggtgactttttcctaggcatactaaaaatagctttcttcacatcatcacttgtgaattgttgagtaagcattctgccattatcaacagtgagaatggggcctctagtcaatatgcttttctcaattttccttctattttccattctggtgccaagtaagctattatagaattccaggaaagcatctattatcttagaaggttcattgaccctaatcccatccagcttttcaatggataaaatcctattttgcctctgtctttgctttatacacgcatgaaatagggctgtattataatctccactttgcaccaagcaactttaggtttctgttaaaggaagatgcataatccctttgagacttaattacttctctctggcatctttttctcgagaatgcaactgaaaatcaaaaggattttgatgaatctagtgctgcagagtatctaaatccagcttgtttctagttacagcagcctgcaaatcatgaaaccctccttattaatctctttcagcttatgtttgagttgtttcatcatagagacaacttgaaacatttttgtgccagcaataggtctatcccaaacctctttcaaaccattctcatacttaggatgtgatttccacatcttaaagtatttgaatggcttatttccactcactacttctggatgaagagataagatcacaggagtatgatcaaaaagcccttcgtttagaaaaactacctctgcccgatcatatttgtcaatccaagttttgttggcaagtactcgatcaatcttgtaaaaaatcctctcatcaccatgttgtttattagacgaagtgaaaaaatttccactagctttgatgtcctccaactgacatgattttacaaaattcaagaactcattatcggggtggaatttgactctatgccccactctttcttcctttgaaaggatgtcattgaagtccctcattaaaaaccagttatcagtagtgttcaagcccattaaatctttccataatatcattctctcaaccctactattggatgcataaactacagttaaaaaattgccaaaaccttcaactgttgacaactttaaatgcataagttggctagtgcatttaaggatgtctacagtgaaccttcatgggttccaagcaatagcaatcttaccacctccatgccaagctatattagaagaaaaacaccaattttgaaataatttcaagtaaaaggtaccaagttttggagccttgactctagtctcaaggagcccaaaaaaaacaaccttttaggaattaatgaattgctttattaattgt

SEQ ID NO: 326653 - DNA, 1204 bp, Cannabis indica
tttttattttttttttaaattttaaaatttacattgaaataggaacttactagatcatgtgaggctcctattgaactattgagaggttgttaagagcatgaagggttttgattgctacaagtattttttacatttgatattataattaaataaaataaataaatttaattttcaccaatcttagcataaataataaaaacatagtcgtcaccctaagttcactaacaccacgtggacatagtttttaaaaaaccatttagcttcaaaagagaactacatatttgattaatttttattagtgtatatattaaagttcgtatttctttattagtgtatatattaaaatttggttgttaggattttgtatggattgaatacttcttattattctttacgaaattttttttaataaaatttcttgaacttctcatgtaataaatatacttgggtacaatgttgaatccaaattttttcagaaatattggtccattgttggcagtgatgtgatccatacagttaaacatttctttgcaaccgaacaaatgccagtagggctgaataatacgaatattgtgctaatcccaaaaaagaagaaccctgagcaaatgagtgagctgcgccccatttctctctgcaatgtcatggctaaagttattactaaggttcttgctaacagaatgaagggattactgtctgaggttatctccaagcatcagagcgcttttatccctggcaggttgattactgataatattatggtctctttcgaaattctacattatcttaagcggaagcaagtgggcaaggatggttttatggcgttgaagttggatttgagtaaggcttatgatcgagtggattggcatttcttgtgtgctatgcttgctcggttgggattcgctgataaatggattcgtcttatttttggatgcttgtcctcggtacagtaccggattgtgagtagtggccgaactatggggcctattgtgcctagtagaggcctacgacaaggagaccctatatctccttatctttttttggtatgtgctgaagctttttctgctcttattcgcaagtttgaagagaggaagtggctgcatggttgtaaagtggctaatggagcgcctagtgtctctcatatgctctttgcggatgacagctttttgtattgtaaggcgaccaatggtgagatgaatcgggttct

SEQ ID NO: 326654 - DNA, 699 bp, Cannabis indica
ttttaaaattaatattcatagttaaatttgtttagtagccaacaatgcgtaatacgcattaagaagtaataacttcatcgagcaaaaagataatgatgcatgagaaatgcataaccaaaaagttgtagagcattgctacgagttagcatggtacctagcatcttagcatctttatgatattaaaataaataaaattcgatattaaaattatactagtagtgatatgatatttttataaatgtgacagtcatagtcccatgattcgcaaggaaaaaaatcaggagatgtgcaatcccaaattgcttgaggaaggttaagtgtgatgacactcaaactatgtaggtatgagactatacaattgaagaaagcttaaatcggtactagctatatcaacaaggagtattcttattttctggtagccatcacaaaagaactttacagttaaacactcgtgttggtctatagggaaagatgtaccttattttttgatagtaatttcagaataaatgacctcttgagaaattttttaaaaaacgtatcaataacaataaagcatgctgaaaatactcgtataggcaccataaatatttttagcatttctcaaaactatgaaaggtaaacataaacaataaagttgtaaaaactaaaaggaagtcatttcacaaatgcacaaaaataaacaaaaaaaacaaaaaaaaa

SEQ ID NO: 326655 - DNA, 1875 bp, Cannabis indica
tgggcatctcccttagtcccatattagttatatgacccataaaaattttgatggtagcatctttgtgaatggatttgtaagttatgttccgacacaatcttcaagaccatcacatcacctctctctactgtatctcttactagatggtacttcctctcaatatgcttgccgctcttgtggcttcttagttccttagaattggccactgctccactgttgtcacagtagagcaccagtcatttttctacttctggaactactttgagatcagtgtagaatttcttcaaccaaaccacttccttagctgcttcacaagctgctgtatattcgacttccatggttgaatttgcaatactggtttacttaatgcttctccagaatacagctccaccaccaagagtgaatactgacctatatttcaatttctgactatcttggtccgattaaaaatcagaattactatatccaataggatttaactctccaccagaatatacaagcatgagatttctcattctatgaagatatttgagaatgttttttacagctatccagtgttccagacctagattaaattggtaacgactaataatccctacagcatagaatatgccaggccttgtaaacaacattgcataccttaagctctcaattgctaatgtataagggtacattctcatgtcctccatatcatgaggagaattctccaagagtgaatactaacctagatgtcaatttttaactatctttgtctgattaaaaatcagaatcagtatatctagtaagatttaactcttcaccagaatatacaagcatgtgatctctcattctaagaagatatttgagaatatgatttacagctatctagtgttccagacttggattaaattggtaatgactaacaatccccacatcatagaatatgtcaggtctttgtacacaatattgcatacattatgcttccaatgctgatgtataagggtacatattcatgtcatccatatgatgagaagtctttggatattgatccttgcatagagtaattccatatctaaacggtaactttccttttttggaattcaccattgagatctttcgagcaccttatcgatataagttgcttgagaaagtgctaatgttctctgctttctatctctatagatcttaatgacgagaacatagcttgcttctcctaaatccttcaattggaattttccggctaaccacttctttatgtctgataacctttctacattggaatttttcaatctcttcttgataggattaagaaaagagtctcgaattggaagtctcgtgctttctcttcagggtgtagggaagttcttataaaatttgttatctagtctattcccacgtactctatgaatctttttaagcttcttatttctttaatctaggagattcataaattgtgtgcacgattttggtggggtggtaatgagaaaaaaaaaggacttcattggtgtacttggtagaaactttgttggcacaagtatgatagtagtatgggtttttgagatttatctctatttaatcaagctcttttggttaagcaagcaaccgcgattgtactcagctcctgactctctggtggcttgagttatgaaggttatttactattctaagtcctcttttcttatggctaaagaatccatgaaaacctcttttatttgaagatctatcatgttgggtaaggggatatttgaagttgggggtcattggctcattagtgatggaaccaaggtgtatgtttatcatgatcattggattcctagcttggatggttgtaacgcccccgcttcaagcctccattgggcccttacacccacaaaatgaaaggctcttatacacgag

SEQ ID NO: 326656 - DNA, 864 bp, Cannabis indica
aagtatataaaatcaaaattcccctcttttattacctaagatgaatgtacagaaaactaataaataataattaaaaaaaatagatattggcatgtttagtgtgttgtgataggaattgtaatggaatcaaactttgtttttaaaagtaatgcaatagaattacaatgtgatgatgatatatatgtaacgaagattataccataaatgactgaataaaataagaataacaccgactttagtattctttctttatataaatataaaaattaatggaataattttatcaatttattattgtggaatccaaacttttttaatagatctaatattaattcacttattaattctgggagtactaacaattggatccaaatctataataagttataaattaactgtatcacattaaattaatggtacataaaaaatcaataaataattagaagggtaaaacagtgttttgacgaactttaattatgaactaataattggagagcgtgctacttatattgattatatcaatagactataagtaagaattctgtaaatataattctatattatcaaagagtacaattttatatttatagtggagtaataatagaattaataaaatagattattttgttgatgagattgatggtaatcttgggtttattggagttttaaaatataggtccatgatccccaagttatatacaacactatacatggaaaaattttatttaatgaataaatgtcgagtaagaattaattttcatgggaagtaaactcttaagggcaaaataatgatttatgaaattattgttttgattaattatgataattatgaattgtaaaataaattagttaaatataatatta

SEQ ID NO: 326657 - DNA, 921 bp, Cannabis indica
aaagtgagggcttgaattttgggtctcacaatacccagattaagctcgttgaacataggggttgcatactctcttattgttcgggctctatatcagccaaatcaataggattggcactattataggcaccctcaacttcaaacccttcgaccatattgcagcattttttagccgtttgttcctttctcctttgtctaaaagtacatccagtttaggggtcaataggagcaagctcaaagtcttcttcttgctcgttcatgcactagattacacttgaaaaagaaaaatacagcgtaaccaagcgaggttagaacctcaaaccaaaaataaattgaaaaatagttaataatacacaatttttaatttcaatccccgacaacaacgccaaaaacttgttgtgaaaattaatatttatacgcaagtacatgcaatcgataacaagtaatgtaatgataagtgagtatcgtctccacatggattacaaattaaaataaatgtaaaaccaactagttaacaacttaaggtgttttaaaagaacattaaacaaaaggaatagatgattgacgaagataaaacaaattggtgacattgaaaataaactcaaaataatacaatactggaaaattatctgcaagaaaagatatctatggaaaaatagacttgaatagctaaattcccctatgttgaatctgttagtttttcaacattgcttcagcattggttcaacaaagttgcacagagttaacaaaaattcttctatgtttatgagaatttttcaaaactcacaaattaagttctactacttagatcaatatatctatatcaaccagattatagaacaacatttatgttggatatttattttaccaggatcttagatatactcacaagtatgttgtttaacaccataaatatgaactt

SEQ ID NO: 326658 - DNA, 637 bp, Cannabis indica
tgggcttattcaatgaataacaatcatttaatgaaaagttgtattactctcttttgggccttgtgtgagagttaggggcccatagtagtgggtacaatatactggaccgccaagtggcagaagaataaatataaatgaagcctctctgaagacaggtgaagcctttctgaagacagcataaacagacccgcaaatttcctaagacaagaacaaggagcttcttgataaggtaaggaagcttgaggagctccatcaggtagatctcgagaaagtagctagtgcaactgtagagcataaggagcttcgtgactttcagaagcaagctaagctgaaggcctttaaggctaccctgaaagctcttgtggctccaataacttgtgaggagtgcgtgaagcgttttgaacacggcgtctttatgacatgtagatccaaaaattttgagcccaaacttaacttcttgcctgattgagaggttgctctagcccatttttgggagaagaataagaaattagaggccaaactggctgagaccttgggtccttgtttacctcccaaagccaactaatgtaccatttttaggacttctcttgttaactttctcctctctctctctctctttctttttcttttttttttt

SEQ ID NO: 326659 - DNA, 695 bp, Cannabis indica
catattttttcaaatttcccaatattattttagaaaatacaatgtccaatgtatcatttaacaaaataaaatattctatcagtaacttttgcaaaacacaagatctaaaatagtatttactattttattttattgaagctgaacacatgtttatttttggttgtgtggcctgtattgactgacgcggtttcaattagtaaaacttggcttggttcaacctgaaatagcagtgtcaataggggttaaagaagctttaagctagataaagcgtaaaggttggactgatgtggtggaatcagatgctatggttgtagttcaagcagtgaacaactctattcagatgccatctcagtttagtttgttggtgcaagattgtcgcttattgctttcttttttaaataatatttctttatcttttgttaaatgatatgtaaatagggttgtattgttggagggtcttaatttatgtcatattgtacttttaatgagttgaatgctcattctactttaaagaccattacaatttatctaatgaatgattcatgcatcctttttattcaaaaataaataaataaatagacgataacgtatttttatttgattatacattttttaaaaaaaataaaaaatttcattaataagcaaatcagataataatacattattagaatattttatttatggaaattattttc

SEQ ID NO: 326660 - DNA, 772 bp, Cannabis indica
atacacccaccatttgaaagactcaaccaacactcgtaacaaaaacatgcataaaatcaggagacaataataaaccctaagttctaaataagggttgagatagctaaatccccgggttttctaaaaattatatgcgagtatttgagatgatcatttcaatactcgcgaatattcaaggcaatcaacataaaagacacgaatactcgaagtgttcttcctgagatccacggttactcaaatttcaagtatattttctccagaaaactacccagtttctaaatagaaaaataaggctctatacacactccctattatatcatgcatattatgttctctaaaaatacagaacacagatcaatcttcaaaaaacaggaaaaatagttgcaaacaagattttttgtactaaccttgggatcgtcgattactccttggacgattccgtgaatctcagaaacttgtgaagattgggtttctagaggaaacgagaagaaatctggaaggactttttgaacttttaagaaaagaaaaaagtgataatgagagggaaaatgtgggaatcatttcgtatcagggggcttaaataccattaccctcattaattgggattaagacacgtggcaggagaatgcctaaggtctcccaatctaacagttatccataaccacgcctacacgaatttcgaagagtttcgtgacgtggcaccccaaatgggttaaatgtaataattacagccgtcattttgaaaccctcgatgggacaaccaaaggtcacc

SEQ ID NO: 326661 - DNA, 866 bp, Cannabis indica
actaaaagtaagattttttttttgtagtaaccagtgatatctcttatttttaatgttatatatacatagtttaaatgttacctttatttcactcaattgaacttttagctccaacactaattacttatattaggtatatataatttacgaatccatactaattaatattactcatgtttggtaaaattattgttttgctcatctgataatatcttatcagaaactgctcaagttttcaaattatggtaatattccaataatttactaaaaatggtatttttcatagttcttcaaataacaaattccactattataaaaatgaacaagacctccacattgggctcacatataaagtgtggctgcgagccaattcgcctaatgaagtctaacattcacttaaaaaaatattttagttacaatttttgttaatcaaatgtgattttttatcaccataaaaagttactagtgactaaaatataatgatatttaaatacaaattatcactaatttaattttagtgacaaaaatatatttaaatacatttagtcacaacaaattgtaatttttgtaactaattatacttttagtcacagatcttttagttacaaaataaaaataatgatttataattaatcttaattttttcttttttggcaaaatttcgttgtgactaaaagtaaattttttttataataatagctattaggtacagggtgcctaccaccacgaactagcgtcttttagcgatattttataatttactatattaaataaagtgatgagacctgatatttaattttactataatagcgatataatattttaagtgatgttaaataaagtgtttaaatttttacgttttccag

SEQ ID NO: 326662 - DNA, 645 bp, Cannabis indica
aaaatattttttttgagatttgatatcaattagacaattactgtagtttaatcatctgtcgagtagattcttggagtcttggtgctgcttattggtgaggtcaaaggtgagtggcgtgtgaatgtgatactgatatcaaagcatcaatatatcatatattgccaatcaatacaatcagcctcatatattaccaatcaatacaaatacaatcagccacaaagcccgcgaatcttcacatttcacctaggcacttattagcctattaatattacaatcaatcaatacatcacacacgccagtcattacatttaatgtaattatatacatcaatatattatcataccaatattaaattatcaatattatagtgtgaaagtgaaacttaaaagtctaatatatcattaatttttttttttttaaattttgatatattgagaggaggaaacgggccaaagtatttccataacagttaatagttaattattatatatttttttgaataattaattattatatgtattaatatatataaacggggatatatcggggtggatagtactttccccgacccgcctctgaatcgggtatgtaaaagggcattttacataaatgtatacattttcttaaataattacaaaaaatgtg

SEQ ID NO: 326663 - DNA, 2060 bp, Cannabis indica
cgtgcatgaaaaaagtggagaaagtggcatgaaaggctgagtaagtggcttcattgcttcagttggataatcccatgtatcaatgtccctgtaactataggatatatttgaggcgtgggaaagccaagaacatgttttagttgatggcttgtgagtggaccaggtggaggaagctgaaacaacacagctcaattaatgaatattgatccaactacttaaattgataaaaggggcattaatagatagattggtgagaagtgtattgatagataaatagagcccatggtgattaagttgatatgttggactgggaacttgggcttggactgaattgagttttaacatttccattcacatatatattattattattatcattatttgctcaaaatttgaaaattaacacaaaattaaactaaattaaatattttcaattaaaataattttacaattaaaaccatgaaaatatctaattaaattaattttatgtatacaactagaggcttaaaatatacaaatttgcacattaatcagtcacgcaaaaaaaaaaaaaaagactgatgctggagttcagaagctagagtctcgaagggaaaatcgtcctcccaatgattccaataacaacgatgaggatgttaatgaagtacatccattatcagacgacaatgtcaaaaacctttccacgattgaactctgaagaagattgaatgccaagaaggaaagatccaaagctaaaaaactaagacccaacgagaacaatttaagaaaccccatcaacgatcatgttcgcgcaagagaatcttcaagtgataaaactcaatgccttgaacgtaatgttgaggagttgatgaagatcacagaaaatatttctaaaaaaaaatggtgttgtatcagactctaaggaagaagatacagagccttgtgaacagaatcattgatgcaccattgctagatcatttcagaatgccccaaatggagctgtatgaaggatgtatggaccccagggaccatttgtcaacatagaaccacatcatgcaagtttccaaggccagtgacgatgcaaaatgtctatttttttcattgacattaagcgaatccgtggacgatggtggaagaggttatctccgggatcagtccacagctggagagaccgacaagtaatgttcaaaaagcagtttatagcagccaaggactatgatttggaagccaccaccttgaccaacgtcaagcaacaacaaggagaaagcttgaagaaatttatccaatgcatgatgaatgtggctactgcagccaaagtcattgatgacatgaaaatggtggctctagcatcaggacttataactggatccttactgtggggagatctttagcgcaaaaaggaagatacattgagtgagttcttaattagagctcaaggatttataaatctaaaagatgcttatgctacagcgtatggagtactcgcaatgcattccaccaaaataacaaatgcctaaccttcaaagatgacaactccatcaatttaccctctgccagctgcttttactactcctacggtatatggacaaagtgcttctgtgcagccagttgcaaagctagtttttctaggttcggagctgcacaaactggatacaatgtcgctcctggacaaataaaccaaaaagttaaagctctagagtccaatataacctactcacggagtaaaaggagtacaaatggaaaaaactcaagatcaagatacacgtagtacacaagtctcatagatactcgggaaaatgtatacaaggaaacctttaacatggtataatgtaggaagcctctaccaatgtataaagtctaaaaaacaaagaagagatctgaacaaaaagcgcgaacatcatggtgatattggtcacaccaccgatgaatgtgactagttaaaagatgaaattgaggggttagtacagaacgaacacttaaccaattgggtaagaatcccagtcatctatccaggataggcagttgcacacggatagattttcattccaaaccagcaaggagccataaatcctcctcaagga

SEQ ID NO: 326664 - DNA, 1184 bp, Cannabis indica
aaaaataaaagtggtcgattttattttaaaaaaaatgaaaataaaaattttattttcatttctataattaaaaaatttaaaaataaaaattttaccaaatgtcaccttaatttttcttttcacaaaacaattgggagatccaattaatttttcttttggcaaagcaattgggagatccaataccccaagttcaatcttcttttcatattgttaaagaaaaaaagaaatgatattttttattgcacgttaatatatcgtttgggtgacggttttttttaaaaaataaatacttttttatgagagattttagaaacttggtatactgctactcttaatctcatgtgagctcccaagttagttatttcagttctacttctttatgtgacaatctagaaatgaatttagatgataattacatttgtaatgagtgaggaaagttgttaaagaggatgtgtgtgtttgatcacatctctctcaagtgagttaatttgtaaggtatatgacaccattgttgatgaactcaactcttgtattctcctctgtattcttctattattgaagatcaaataaaagtttagccaaatggcagttcctcccgtggattaatcaccacaaaaagagcaatgaaccttattttagttgtcaaaatattattaaaattatttgtgtattaaatggcattttcttatgttaatttcgtagctatggttacctttttgttttatgaaacttttatttacagctggtatcttttgtttagaaaacttgtcttacaagagaagtaattctctatatggaaaatcgcttatttttaaaaaacttaacttttcatttttctaattattaatttcagttttactatgtatatagaaaataaaataatctttattttgcaggtattgaagaccaaatcgtgatcttggtcctatttagaaagtttctcatttggtcatgatctgctgcagcagaatctaaatttgatgctacaaatcagggattttttaaagaaagttttgtataactttgaaatgtgtgtgtggctaagtccagggtttctatcatgttctataaataagacctagagagtagccaaacgtttcttacctcttctagtttcattttgcatatttttatatttgtgaggagagagttctttttgtgaaaacctagagtgttcagctagg

SEQ ID NO: 326665 - DNA, 1364 bp, Cannabis indica
gaattaattttagatcttaaaatatgggccacacgtgtcagccaaatccacacgtgcagggtgacatataaagacccatgttaattttgtttgattattttattggttaaaataattcaaattatattaattaattatcttttaattatttaattagatatattattgaatagtttatttaattaaaaagataataataaaataaaaagatctaactgatttttgttaatcagatataagatattatatttgaatttgaattatgaagttaaatcatattagatatttcttttattttaaaaggattaattaaaaaagtttgtttataatattatatataggatatgtattattataaacaaagacagacaactagagataacaaaaaagaagtgtaacaagcagtgaaaaataggtttgatttttcacttccattctctctctacacaccacacactctctctctcctcattctcacacgccacacatagtgtagtgtggtgtgagtttgtgatcatccatatctcaattacagtgtctcatgagctgagaatacaatgtaatacataaatccactcatcttatagaatctaatagtccactctattcttgagtgttgaggcaggattgaaagattgtggtgtgaactcttcagtaaaattcttggattagattttcgtaattatactaaaagatagcgaagatccactaataggctacaagaggtattgtatctctactcattagactagatttaatctatatacattatgttaagattcttgagcttatggttcataatggataaaactattattatcaagtttgcttttccttttctaactctaatatggccataaaaagtaacaattagtatcaagagctatattcataattgtatagattaaatactgtgttgggtatttatgcatttaatatatgttaatatattgtgaatggatggaattaatttttatgtatgaatgccaattgttaattatatggtaaaaaatgagttgggaattttatagttttttattagaaaaattgtacaccatatttgtggtataagttttcaatgtatttttttcttaaaatttatttgtgaatttttttttaaataatgtaattccttattccacaaattcttccattgatatgtgagctcgagtttaaggtgtaaacctcgacctcatccagacgatattatttgaagctcatgttggaattattttaccaagatctagatttactaacaagtatgttattaacatcctaaatatgaacttctaaaacgatatcaaataaacacatataaagtttcgggaaccttacagtggttgcagcggaatataatgtctctt

SEQ ID NO: 326666 - DNA, 620 bp, Cannabis indica
cttggaacatatttttttagttcttccaactgtgccagcacggctagactagcctattcggcctgttggccgacctaagtcacatcagcatctccttgagggggattttgagcgtgggttctggactgtacgacgggtgcgtcatgctgatcgtcaactggccaccaccattaacctgagtggtagtattaggtatcacttctcctgtcgaattactagacaaggtctacctgcctaccgcttggcctacaggtggaacctgtgaccggggattggacagcggaccgtttatagtctgagagttgttcaacgctggagcttcgtctttctcgcccaggggaatgaaggttgcaggttgttgccctcagcctaataagctttccgtatcaacacggtggcctacagagtttagccgtcaatggctgcttgctgagcctttaccgtttccatctccttgtccctccattcggcgaacatgcgcctctggtcttcaaacacaagatttaccgcggtgtggagttcctcctgatcatgatgcaaggtgttggtatgaccttgcatgactccaagagcagcacaaaggttttggatttcattatcatctccgatagttgttcgaa

SEQ ID NO: 326667 - DNA, 643 bp, Cannabis indica
tgaatttgatctcttataattaaaatgtcgttttctcatgtttttatgcaattatatagggttgaaactattttaagtgtagtctcacttttcaagtccagtaaatacttattaaacaactcgtaccgccaaattttaaaaaaatttaaattatatatatcaaattaattatgtcttttagttaataattaaataatttttttatgtatctatatgcttattaattaagagtgatgatatcgagtctcgaagaaaaaaaaaattaaaccctaattatatgagaataaatagaaatttaaaaaaataataaaaaaatatatatttttaaaaagtttattttatttagatcttaatcacgagtctagtccgtcttaatctaaggcgggtctcctgatgcttaatataattatatgtaatttattaattaattcacgtaataattacgtaatttattatgtaatttattttttttgtttgaaagctattatcctacgttttagtttttactacaaactgtaacgttgctttcatataaatatatatatatatatatatatattttacactctctacttgttttggcatccagaaaaagttttagtctaatttttttcatattcatgtacgttatagctatttgaga

SEQ ID NO: 326668 - DNA, 611 bp, Cannabis indica
acatttagtcacaacaaattgtaatttttgtgactaatatttttagctacaggccttttgtcgtatatggtctttattgcagacttgtcatctcatatatagctgtttcatctctttggaggttttattttttaaaaataaaaataaaaaattattattttttttcttcaagttattgcgaaaataaacaattttataataagagcttggttggttaagtttttgctttagtttctcaaaaacacattttggagaagttacaaattaagattagtttctcatcaaaatattaactctttttagtaaaaaaatcaaatcaaatcaaatgtatccaaacatgttctaatataaattaagctccaaaactcttaaaataacttttaaaaatcgaactaactaacacataaattatttaaggggaatcactctatatatcttttttttttatttatttttataatttggactgctcccgtggttattatgtatatttgagctacgatttaagttgctccgttaattggtgtgtggaatattacaatgtgaatttctgtcaaaaaaataacaaaaaaaaaaaaaaacaaaaaaaaaaaaaaaacaaaaaaaaaact

SEQ ID NO: 326669 - DNA, 1300 bp, Cannabis indica
tctctctctctctctcacgcccatacaagctatctctacactcgagattgccaaactcgaatcctactttgtattttttaagggtgctatatcagatcccacctatatcgatttgaataatattaacccttggtattaatacaactaaaaggggagtaggtcattacccgctatcaaagggggccaaacctctataacaaatctgtgtgttcttttttttttttcattctgcttgtgtaacatgtggcaagcatcagatctatacgaccccgctgtcagttaatcacttttcaaggtcaacaatttagtgctttcattgagagcgtggatatcgtatctgatcaaatgccatgtttaatagagaagaaccccaatcgcaccatctacatcttcgggtctccctcaagacccaaagactatagatccaaatgctcaggttttagccacagctagaatcccgttgaacactgaagatatggaaaatctcgtcaccacaataggcgccacacgcgttgccactacagccggccaaactgatacaaacatctcgatggatctgaatagcaggcccttgtctctgagggaatacccaccattggtgcctcccattgaagggaggactaatgggcgacagccccgacgaacaacgaccggctcttatctccgatattatgttggagagacaggaacaagagttggcgagcctgtgattggggagccccatgtggacttaggagaggatctcgagttagccagactcagagaagctgtaggccaagctagcctaaccaagaaccacgtgctgctaatgtgatgtattcgctcaatagagatgtaaattcctgagatggatggatgactaggagtacatccttcgatctcatcaagtagaattggattgccgcaatagagaggctagtaatttgataaggcgattcaactagagaaccgatagtaggggccaagatctcactagatatccacttcaaggatgacttattggtagatcagggagggcctatcaaaaaactgacaaacttggttcctcaagaacaaggaaagatctccccttgctagaaggaggacaaaccttgccttaaggtctaacaacgacaacaaccagatctcgacaaccagtggcatgaggatccgtccaatgatctctagctcaacagtaacccccaccattcaacctttggccggttaaccacttgtaggagttcccttggccggccacaggggagcacttcctccccaaggggagcgaggtgcccagagatcaatctgttgggttttatgc

SEQ ID NO: 326670 - DNA, 985 bp, Cannabis indica
cgtaaaaattgattaaaaaattgtaataataagttgatagtacttaaaatataattaaaaaaaaaactgagatttggaaggagatgagtagtgacgcgccaacataagaaaatgaaacttaactttccctcggaaaacaaaaataaaatgaaaaattttctattttttaaagggtggaatcaaaatgatgccacgtcaatttacaaaacaaaaaagccattcattaatgattattatgaatggtttagtttcggtcaaatacttgaacaaattaattaagggcttaccatgaaatcaatcccagctgtctgatttgatggaattttggattattttttccaattttggtcccaataggcaaatttttaattaatgcatttttatcttattgaccaaaaataaaaaaataataattttattactttaatgtttttatactggattattgacaagttcaatacatggctatttataacctttggttacccacatgggttgccaaaaacaaaaaccacccaatgtcggtgttctttttttcttttataaaataataatgataatattaatatgattgtatatataatggtttctttcttgggaccttgtattattgagtattgataaatacccaacacactaatcgtaacactatattagttgtcatcctttaaaactcactgccacgttcatttcaatttgtagtcctattcttcttcttcttctttttattaagatattaacatatgatattttatatgaaattatcataaggatcaatccaacaacaacttatgttatgtttcacaacttagatctttgaataatatcggctacaaggtatattaagtgtatttgaataatttggttgttatttgtcaatttttatttaaagattattagttaatagtttttatatggattaaatagtttagatggtcctttggtggtttattaaacttttttttttttgtttgagattgttgtt

SEQ ID NO: 326671 - DNA, 1230 bp, Cannabis indica
tctctaaaggaatctaatacaaactttacagcaattagtaatgaattaccaacaacaatcaagaatcctgattgttagtgcacaatcccttgtgcagcaactgagttcttcttcgacatttcttcaacctgaaatcccttcagatctgatgaggaagttgacactgaactcccttcagttagaactcagcaactccaggctctgatctttccgccattgatgaccatcttcaagctatacaatcaggcctgtagatacaacaacaagaatagcaagatacgacactaactcccacgataacaactgaattaacaaactatacgattttatcgataaactgtttacagaatgaaactgactatatataccacaaaacgcactaactaacactaacaataactgacttaacagaacactagtacagatataacagacaaaaactccagacacgactagacattgtacataactaaactgtcacaaaataatgacacttacataagcagatatcacttactataccatgagttgaggttgtcttcatagtaattgaatatatccagctagtcttcaggacctttaaaactgtaactgctctgataccatgttgtaatactctaacccataggaacgctacgtgtgtgcctttataaattagtttataataataaactaacaatttaaagaaaaattgtgatttaattaaaaatttatttaattaactgaaatatgaaaccaatttttggcactatacagtaattggaatcgaggcaccgcttttaaaaatatttacaaatattttgatcaaatgttacaaccaaatacttatacttttcaaagttgccacaaaccaaaaatctcactactcgacactgctgggtggataagctactgtgtacatttgcttggaaagtcctctaactcatggctgacctagctcaatcctttctttacctgtactacaaagtacccgtgagtcacaaaaatccaacaaaaaaagtaaaatcatacatagggtacatccaagtacaaatataatcaaacacaatcattaaatcataaccagatactcacatactaaactcacaagcaagacatcacattttctaataaaataatcactattagcaaatatttatcttataaggcaaactaaattgttacttaataaattaaccatttcttacctttgcataatgaggtagtccaatgtcattatcattgtttaat

SEQ ID NO: 326672 - DNA, 1563 bp, Cannabis indica
tttagggcacaaagcccaatacctacaacataaagaattactacaaaattaaaaatctaattatttaactacttgctagttatataatttatgagtacctagttactaactagttaagttactaatttattactaactagttactaatgaataactaattagtaataatacatgaatataaataaaaattagtaactaactaataaaaaaattaaaaatacatgaataggaactaaaaaaataaataaaagagttaatagttaacatatacaatattcaacatatttatcatacaaaacaatataccttaaaaacaaaacacccaacaactaatctttatctctcttaccccaaatcatgcagtttgtttatacccatttatatgttcttatatgtatacatatatatatacatacccaaactacctgattatatatatagttgagtgttattatcatttcaatctaattttttaaaaataattataactaaactattaaaatatagatttttaccttatcactgaaattcgaccactaacaccgaccaacatgtacaaccataagaacacaatttgggtaatctaggaaaaccctaaaaaaatttacaaaataaaaataaagtaatttacattaataaaattattagagattagatttataccttaatggacgttgagattcaacgatttctccaccaaaagaggcagccggagctacaaccaccacctctaagctcaatttatcatataaaaccaaacaaaagacgatcaaactccatagatatatttttggatatgaaaaatgcaagatttaaaaaaacaaatcggtaaaaacaaatgaaaaatgaaaaaaaaaatagggaatggaaggtagtggttaggcaaaggtttcgtgaaggagttgcagttatattgtttggggagaagacgaagtggggaagatgaaggctgatcataaaccctacgacattggttattttgtaataactgacagcatacgggacatgcttcagccaatgtgtgtccctatggcgtcggttattacaaaataactaacgctataagtatttttttttattaaaatttgtcactttatgacgtcagttattacaaaataactcacaccatatgtcattttcattccagcttcactctatgacgtcggttatcttccttctttcattaattagctaaaagaaatacctctaaaggtttgttttatagtagtgtgataatatacttgcgcataaccaaacattgtagtgttgctatcttaggtttaagattgcgttcatcactttttaggcaatctcaagtctattctcatgaaatgaaacttatatacctttaaccaaaagaaatgaaagaaacatgtataccaatcagccctgaacatagtgtttgttatgtgggtttgagttggagggagtggaattgaatggactagacttgtagggaatataaaactcaagtattggaatggagtaacattctcaccaatttaatttaaaaagtaaaacccacttgaaaatacaaacactttagtcactaagatttaattt

SEQ ID NO: 326673 - DNA, 1512 bp, Cannabis indica
attgattattagtattttacaaaaaaatagtaattattattgtaaaaaaaagttgtcacattccattccaatgtgaaccaaacacggtaatgttgctttcctaggtttatcaatcccttcattactctccaagcaatgttaaacctacttctatgaaatgaaacctatataccaaacgaatcctaagagtttatgtgacacaagacaatgtgaggtggaattctaataattcattttcctatgttaacttttttgtttttttttgttacattttttttaattaactttgttaattttaactcaaaattatagagttctttaagaaagaaaaaaaattccacaatggtttagaaatctctaagaatattatattatatgctatataaaggtgtttagcaatttttgtaaatgttgtaaaataaatttttatttttcatttagtaaaatatttatatatttttataagcaattatttttttttatattttttttaaataataatttttctatgtctaaaaaatattattttttataagtgattgattaatatcatatctaataatttttttttaatttacttttcatctaataaatggaattattacatagaacatataaattgacaatttatttacaaaaatacctctataaggtgtggacaacatttatatcttttatgtaattttaattactaaaataccacttacactattacttacacaatcagacgatggttgtagggtagttgctacgtggttgcgcgatggttacatcagacgaaggtattaatcaaacgatggttgcatggtggttgctgggtagttggtcgaaggttgcatcagacgaaagtttctgggtagttgttgggtggtttgctgaaggttgtatcaaacgaaggtttcaatcagacgaaataactgttagcaaaatatttatgcaactgtaatgcaactattgtgaaatattaaaaatagaacagtatgtccacgtacgtataaatctatctacatgtctctttatgatttaatatgaacaaattcaccattagaaatttggaaaacaacgaaaatacaccaggataaatattttactatagtattgacgtaattttttttagattatacttgagttggattgtttaggaactctagttcaactttttaagatatgtctttcatggatctgaaaattgaagtcagaacattagttctatgcaaattaaactagattttcggtaaaattttagtttcgtagtagtttttctacactttttttcatgaattcgaaacagccttattccgattgattctggttgtcttgtcaggtgaagtcaccggaattgatggttgttctctttctggttgaatttttatttcggttgcgttaggttgctgcgtggttgcgcgatagttgtgtgatagttgcccaggaagcatggatcctaggttgaaggtgtgtgtaagtggtatttgtgtaattttttttatttgggttgtatatttgtttatttgg

SEQ ID NO: 326674 - DNA, 814 bp, Cannabis indica
gacaaataaaaatatttacttcaggaaatatttgccaaaatctatatcaatattagattattttttattgtcctcaaagaacaaaagaacatatatatatatatgaatatgtattcatctcttttattatatttcagccaattatatgatgaatattatatttacataatctttaagatatatgcaagattttattgagtgagtgttttatctatagatttctttgtacggatttggcaaaatataagttttaattttattcttttgtgcacgttaatttgaagttggcctatacctactctcaagctaaatctatagctctaaaggctaccacgaccaccaatgactttaagaaggcaatggaagaggcttagaagagccattagttgggcgaagtaaataagcaacttgttgttgcgaacaagttcttggagattgttttactaggatctagatttactaccatgtatgttatttaacaccctaaatatgaatttctaaaacaatagaatttaaacacatttaaaattcaagaaaccttacattggttgcagcggaattaaatgactccttccgctcagatctctaacccttgtatcctttctgtagcagagtatcaccaagatcttgttcggctttgtgccttaaataaaacccattacaatcagattagttatcaatttagaattttgaagtgatttatgtttacatgtattttacatgtttatggtttaatatacatatttaatatatgcacaaaatgagttaaatccagaacatatattcattcacaattacagtattgtcaatacag

SEQ ID NO: 326675 - DNA, 1187 bp, Cannabis indica
gtaataaataaaagatttaggcatccacataattattaatatttataacaattctaaaataattatttagatgagttaattattcgctttcttttctacttgttagcatgattagactaattattgggtaatccataagtttaattttgaaataatttctatctatttaaattttattagtattggttttttggtgtaaattgtacaattgttgactcaagttgttggttattcaaagtttttgacgttcaagaacaactatttctcattttatttgtaaattattattgcaaaccaaaggattagctcagcgtacttttgacaatcaaatttttattgtctttttcttcctaaattttactcaaaaagaattaaataattatttatacaaaatacaaagaaaacgacataaaataatttttaaacattgaatggatgcggctgagagtgatttattaattaaaaaaaacgtacatattactggatatgaatattgctttctagtttctcttgttgtattttaacacgtaaatatatatatcgttttaacaagtaatacttaaataagtgagatggttcttacgaaaattgtaagtaagtattaatcaattaaattcttatttttatttcccaatagaatagataaattttgaaactaaataaactaaagcaaaaataaataaacaaacaaataagagggtttaacatgcaataaatgtgatattagggatatgatattacaagaaatgtcacttttaccagcacagttggctactgcgctggtaaaaataacttttaccagtacattttgcaaactgcgttggcaaagaggtcaaaattttacgagcgtacatttacagtggctaaaatctaacttttaccagtacatttacgcgctgggaaaagtcatttttgctagcgcttttcattttatgctggcaaaagttttaataccaacattgatttgccaacccccttttgccaacacatcacaagtaaaaccagcgcaatactaacttttgccagcacaaaaatgtgctggcaaaagttaaatttcttgtagtgtgatttcaattgtatctatttattatggtctaacatgattcaattctattaccaaattctatgcaatatatagcaggtttagtcaagtaatttatagtcttctcagatatataaatctcaat

SEQ ID NO: 326676 - DNA, 858 bp, Cannabis indica
tttcttttttcgatgggggttttcaacagtcaaaatccgatactaagtctgttccacaccaacaaaatagaaatctgttccttttattagcgtatgtgatgacattctcattaataaaatttagaaagaaagaacttaatttgggctctctctctcccacactgttcattatttgatattggtcatcaatttagaccgttgtcgaaatccatattatgtttctaaaattcctagaaatataataataataataataatagaacaccaacacgtggtgtgatgatgaagaaagagatgaagcttgaaacagaaattattagcgtgtgtggtctgaaatctttattttcaaatccaaaataatctatcttacctgccacccaacgctaccaaataacgtgtgtcttcactccttcatcattatttttgtttttggatcaaattgttcataacgtgtatctttctataaagtaacacgtcttttaaacttgttcataaatcccaattttatttactcgctttcacattcaatctttatcttcttcttcttcttcttcatatatatattctctcaatattccaaacaaacacagatttatttccaaattaaaacacagaacattaatggccacagtgactattcctccggttctaactacccctcgtgatgatgctgctcagctttaccgtgctttcaaaggtctcataataaataattatatatatatatataactttcttacatgcaattgggtttaattgattgattccaatattcttttaattgaatcagttttaccttttataagttggcttttgggttctttctttcttttcttgttttcggtaaaacgggttctt

SEQ ID NO: 326677 - DNA, 805 bp, Cannabis indica
ttaatttttttatcaaacgatctaaaaattagacggctgattatttaattcgtttttttaattttaatcatgatcgtgttttaaatgagagagatgtccccattagagattgcacgttattattatagttaatttttattaataaatttattttacaaattgtagagagtatttatttaagtcaacaaattttttattttgcaatttttaattaaaattttaaaatattgagcgcgtaatatttatataatcacaaaacttatattattgagcgcgtaatatttggattttagtgcccaaataatgttttgtacatattattttatttatttatgaaaaagggaagaaaaaaaattaaatcaagaatgctatcactttgtcttgtcattttgtatgacatttcccttagttttggagtcatttagttgttgtggctcattgtatgtgggcaaaatctgtgtctcttcttgctaagattaatgtattgttaggtttatttggttttggtcagtcattgtaattagttgcaattaggagtgataaatcgtgttgtgttattgtgttttgtttgatatttgttttcgtattagtcgtattaatctatttttaactcgattttaattaacaaaaatttatgttgtattcgagttgtgatattatatttgttgatcgagattttcggcaactaattaaataatgtataaaaaaaactgtagagagtttaatgcatgagatttttacgtagttgaggcattaatgagccttagtccatgagtcttttttttattaatgagagtatttatta

SEQ ID NO: 326678 - DNA, 498 bp, Cannabis indica
tttagaatacggcatcaaagtgacttgaaacaagcaaccaacctcagtaaaccatttgaaaaatctagctgcattatctgttggctctccatctccataactacaaagtcaggcccaaatgtagagtaaatatattagctatccagattaatcttatttatcaaaaaatagaaaatataagtttttattctcacgtggccaccataaaaaatgacaaagtctccttcttcagccttttcttcatattgatcatcatccgcagcataatcatcctgattgaaagtgaaccataaacaaattgaggtgaagaaaaatatgcagctgattctcatgcagatatgcaatgtcaagaaaaaaaattccatctagcttaccaggtcaataactttgacagctgccttctcatatcttgccttgatctcttctgctaatgcctagatgataagaaaaaatgtagtacattacaacactatttttgatcacgtgctcaaaaattag

SEQ ID NO: 326679 - DNA, 834 bp, Cannabis indica
aattggaaggacatagaagccatcctgaagccctgggaagatctgttgcctttgttactctatgaattcagagaattctgaaataattaccaaatcatggccttagatatgaataagatcagcaagcttccgaggatgcatttatctcgagtcactcacgacttacctccgaaagccaaaaaaaaggtacatatcttaaaaaaagtactatagtaataaaatcaacattacattctactaattccatatttttatgttgcatttagtgatgattgtggcacttatgccattgtatatgtggagcatctgatgatgcaatgtccaataggtgatgtgacgtaggatcggatgagtatgtttcgtgaacggtggtgcatcgatctctattaccaaaatatcgattgatatatatctgtgtataattgaaaatacactatatattttgtgtagtctttatatattttgtataatttacttattttctttttttcaatttttatctttttaaacaattagtgtaaccatttattgtcatagtatatgtattttgtaaaattttacttaatttcctttcttcattaatttaagactttatcgatagtatgttgatatgctgtagatatattatcgacattaattacttagtgtatttttcttgacaaataatgtgttgttatctcaagcaaagcgtttgtcgatgatatatctgttggaaatatcaaggatttaacaaaaaactttgataatgtgaaattcctctctatatgtgtactctcttgggatactggattctatactttcggcaactactttttggttaatcaggatgtaaca

SEQ ID NO: 326680 - DNA, 494 bp, Cannabis indica
gaatggttacctttgttgtttgacttgtgattaccattcctggtatctcttgattctgattcgcttcttgcaaacattcatacaccattgatgtcaaatctttcctctcatttctttcgaattcagagtagctttaacctctgacattgtcaaggtttctttcccatatagtatgttatccacaaaatgtgcataacattttggcagaaatctcaacaacagaatcccttgatactcattctaaatcttaacacctatgttgctaagattaaggatgattctattgaattcatcaagatggtttttgagattctttgtatcatatcttcaaggtatacaacttcttcttcaaatagagtttgttggccaaggacttcttcaaatagattgaagcaagtttctcccataacccgattgttatcccttcatttgaaacttctctaagaacttcatctcccaagcttagaagtgtagggttttgtgccctaaataaa

SEQ ID NO: 326681 - DNA, 1644 bp, Cannabis indica
gagctctccttttataggtgaagtaggcccacaaaaataggataaaagtacaaattagatatttttgaccgtagatgatgatctaacggcgaaaattaggttctggtagtcatagccattttttgatgcctggcgggtgtaacttggagcttatttttcgtaactttcttggggtaaattttgacgacgatagctttagaattacaattagagtgtgagacatgacttgatagacattgaattatctttgaaatacaagtttaatcacatcaatcaaatcaaaattgagtgagttatgactattttattgaagacagttcatgaccgagcacccaagatgatatatgccgtcaacctggacgctaggtaagtgcaaaaacgtccaagggatgtactttaatgtgcctaagtaatattttgacatcacttagttaattttctgtgtactggtgaagctggttactagttgtcgaaaagttgttgttttgtagaattgatagactcgaaactcttcatttctaagtgagccaaaaatgagaaataaaaagtttgaatttgacttctctgtgttcatgaatctttgttattgtgaaaaactagacggatggtcaaacaacattagaatcggataagcagaacctagcgcaccaggccttttgtcacacatgcgctcggtacttactcccgagctctcgggatatcgttttgatacttctaaggtttttgaacttgaggacgaggtctcctatgccatttttaacaattataaattcaacggtcgcatcagatttggtatttgagtaattgaaggtagcgtcccaggttgatcatcaacctaggcattgggccctgtttccagaggctcgggtttgtgattttctccccgaatttacttgaatcttcattatttctgatgacgaaagaaatgccaagaacacttttttcccagaaatttcagaaaaacatttatgatgagattcatgaagtttttaagcataaaaaacaagtgaaaattgactttaatttcaaataaagttttcgggtccgaatgtgttcttaagattttttttagatttcaatggtttttcaaattctttccattcataaaatcaatctaaaatattatattaatgttgtaaattagcatatgggattcgaaatgaatactgaaaaataaaaacataaaaatttcgtatacaaagaataaattcatgaatatagatactcgtatataatctttattttgtataaaaatatgataaatatatagagtagaatattctacttaatattattaaataagattattgaatgaatgagtatatatataatcatataggagtgaaaatataattatatatacatgtatatatgtatacgatactaataagaatatgtagatatgtatgaaaataattattttgatgcctaaaaaatattaatgttgaatgaatataataattttaacaataatatgaatcaaaaagattaaaatgaaaaacatttatttttattggccaaatgaccataaagaacatatatgaatatgggtgactattcaatggttacatttttattgtaaccatatggttacatttttctttaacctgtaatagcaagttactaataggtagactttccatt

SEQ ID NO: 326682 - DNA, 733 bp, Cannabis indica
aattaaaaaacaaaaattttaattaatcacaatttccataaacctcgttgattagcaacgagctgcacattacgtttaaaaatcacgtaacatgcctatgctagttagggtgttacatgatgtatgcaatgttgtgtacaaggcttgacatatgctatattgtggggattgttagtcgttatcaatctaatccaggtttggaacactggattgatgtaaagcacattttcaagtatctttggagaacgaaagatctcatgcttgtatattctggtggagagttaaatcctactagatatactgaatctgattttcaattagacaaagatagtcaaaagttaacatttagatcaatatttactcttggtggaggagttgtagtctcgagaagcattaagcaaacccgtattgtagattgaaccatagaagccaaatatataggaggttgtgaagcagctaaggaagtagtttcattgaagaaattcaacactacattggaagtacatccagacgtagagaaacctctagtgctttattgtgacaaaagtggagcggtggccaactccaaggaactaaagagtcataagagaggcaagcacattgagagaaagtaccatctactaaaaaaaatatattagagaaaggtgatatgacgatcttgaagatcgtgccagaacataacatggcggatgttgggaatattttaccaagacctagatttactaacaagtat

SEQ ID NO: 326683 - DNA, 1219 bp, Cannabis indica
agagaccgaataattcgggccacggtcggcccgtcgggccgggggcccggcccggcccgcgaaaatagcccagattgacattcctactaggttgacatattatcaacctcgatccttccaatcagtttctcaaaaaaatcattcatgaaattttttccatcattaaaaataacaaaaatacaagcaaacttggggagaaaaccataaactcgaagtttggaaactgagcccaacacccatattgaccttggttggtgatgggcccagtgcccaggttgacaatcaacctagtacgttggtttcaattattcaaatgccaattttgcttcaagaatactctctaaaatagtcaaagatgggttatgagacctcatcctcaagttctataaccttggaagtatcaaaatgacatcctcaaagctccaaaataagcacctagcacccaggttgtcaaatggcctggtgcgttgggttctacttggcaaattttaattttgtctcaacagttcatctagcttttcacaataactaagggccataaagtgaaaaaatttgaattcataatttcgtattttcacatttctgacaaggtgatttacttagaaagcaagtagttttgagtctcccgtttctgcaaaacagaaacatctttgagaacaagtgatcagcttcgctagaacacaatggatgacatgatggaaaaatatcacttaggcattaaaaaataaatcctaacacattttcccactcacccagtgtctaggtttacatcacatgtcaacctaggcattggatgtcagcttgggcattagatgtcaactttagcgctaggatgtcaacctgggtgcttggcccagaaaaccttcaatatggtcataactcactcaatattgatctaattgatgcgatcaagtcatgtatcactcttcaatcacaattttgaagttatcaactaaaaatttcacccccaaaggagttacgaatttaagctatagcttacccagagcaggtcctatcgtcgcgactcgaactctgaatattggaaatcaacctcaaaagttaattttcaccattagatcatcatctacggtcaacaatagcctaattatatttttctatattttttggattattttattcccatttaatatgacctccttcacctataaaaggagagctcctctaggtcattattcatattcaaaaaaagtagccataa

SEQ ID NO: 326684 - DNA, 742 bp, Cannabis indica
ttatttaaaacttatttatcttattttttaatttttttattactttataaatatttagtaagtaagtttcaaaaaaaattatcttatttatatatttatatacaattaaaatactcaacataatcttatttaaattttcaacaattaaaattaataaaaaaatatttatatcttttttttttgaaataaaatatttatatcttaattatcaataaacttataactgcacgggtttagtttccttgttagaaaggaaataaacaaaataggaaatgaattttttttggctagacatacgttaatttttttaagccaaaaaaaaattattttaattttttattgaatttttcttactttttaaagattttcttaggggtttgtaaatacgatattgtccgtatttgttaccattttaggtagatccactattatgttttgacaaatgtacccttatagtttaattactcttttacgttattattttccaaaatattttaaaatattcaaatgaaattaattaaattttagatttcaaaaaaaaaatatcatgaaaatttgattcaatataatgttttttttgttaaaacaatttattataattttaaattagaatacaccagttactttcactatttaggatttttgtttgatttatgtattattgtatcccaaaatgatcttgtattttccaaaagttattaattggaacttctatttgctaaatgacaaatagactttatat

SEQ ID NO: 326685 - DNA, 703 bp, Cannabis indica
gagtctgtatgacgaatgagaaaaattacagttttacaaacgttaggtacatatgcagctaaaataaaaataaaatttatgccgcttacaaacataaaatttaaatatatatgatgctattttctgaaaagaaaataccaaataaaatcttaattcgacttaatttattaattatgttttagatttatatttcagatttcaacaattttttttctctcaacaacattactttataagtttccaaattttgtttcataacatttcaatctcttcagttcatgaattttccaaaagtgtcacttagatagtatttcattacactactacaaatttaagctttaaaagcgatttttaaggcctttcaacgttgattttggcgaaattcgttaccgagactaatttaagtgacgttgtagggtctaaaacaaccgacgctaaatagtaccctatggcgtcagttcttttatagtaaccgccataggatacttatggcgtcaattatatactattaatggatgccatatacccatataactgatgttatatactttaataaccgacgccaaatctataataattattttttttcagttaatttaatttaattaagatatatatttattaatttatgtattatattatttcatttaaacctaaattaaatatttattttttaaaagctaaattaaatattatttaaatt

SEQ ID NO: 326686 - DNA, 1655 bp, Cannabis indica
atattttggccctaaaacatacaacatgtggtagagctcgtcgcaagcttcgaaacggtatatagagcgtccaaaacggaaagtgaaaagttatgacaaaaatatctttcctgagttctcgaggctactcgaaacggtaaaccgatcggccaaaatcggtcgaccggttttaaaaccggttgatcggattttcaatggtaaaaaaaagatttcttaggtttaggcactcaccgaaacgctaccagaacctgtccaaaccacccctaacttcataggacatacttataccatacatactaccatacttacacaatagaaactaaaatcaagcccttaattggaaaatcgctactaatgttcagacttaagctataaaaagtttcaaactcaatttctaactcaaaatcacctcaatttcagtaagaaaatattggaactagtcccatgactacccgagaacaattctataagatcagaacctcataattattctaattcataaaactcctatacgaaaataattgttttaaacttaaaatagaattaaaccttgccttaagctttcctattaggagaatttgctattctgctactaccgtagcttagatcactaggtttcggatcgaaaattgaagaaaatagataaaaggagaagagggtttcgtcgaaagagaaggatggatcgttctgtttaatatataaacttatatcatataatatatataatataaacgataattgtttatataaaaaaaatattaataatataattataatataataatattaataataactttattattaataattatcttattattttttagccacttagaatttctacttctagggcgctaacttaaatttcgcatgctcctaattacctcaatatctacactatcaagctatcacaatattcatatcaattctatcaattaaatctgttatgacaattctcgcttccgatagagtctccaaggtcgtcaaatctgaaaatatttttattacaccgataactcatattacattcacatataccatagaaacctccgtcatttataaattatgcttatttatccacctatagcaaatttaaaatttgtgttgaactagattagtaggatcataatctcacttattacctaattaacccataatataattataaaccctagttatttaccattaggtttatcgggatattacaaaaataatattacagtatgtttgaattttcttagtaaattttccatgtagtatcatcctggaagggtactagaaggagttaagcaaacttaaatatactcgtcagcagggacggagggactttagcccatttgtaggctaaagccctcactcaaatatatacattaaattttttatatatagatatatacatatattaattcacttcacttaatttattaaagcccaattcacaaaaaccctcactcaatatcttaatcctgactcatgagctactctcattctaatcaagcccattttaaaaatagtccaatacaaataaaaaaaaataatactttattaaaaaaataaaataatattattaacaatattttattttattttgttgaagataaaaatttgaaagatacatttatcagttatttttattagttttgacttaatat

SEQ ID NO: 326687 - DNA, 902 bp, Cannabis indica
aataaattttaaggtttttaatatattgtgtcgtgctttttgggcttgtcgtgtgttgtgcttttgggctagtttatttgtgcttacgtctcgtatctttcttgtttctcgtgccgtgttgtatttaattaagcacatattcttatgtcaagtcatgctaatttatagtatgtcatgtcgtgtcaaaactcatattttttcgtgcttagttatgttcgtgctaatttttgtgtcgtgtcaaataatttcaaactcctcaaaccatgtatatatatgattgtttgtgagatgaatcaacttcagcaattgatatacaaatggcttttagtcctaaaacctactttgacaaaatatgcgcaccaaaataaaattaatattgtattgtaacaaaaatactaattgctgtttatttctgtatagtgtgtacttcaaattttaaatataggaaaagctctaaagtcttctaaaattaaagtaaatcataattaatataaattgtaccattagaatattatttgaaatttttattaaattgtattgcatttttatataaaaaaaattgataatatcccataattgaacaatataatagagtccatgtaatattttgtcccactttacataaatatgttcaaatatatgttaatttcataaatgataaactaatattattcagaaaaaatatctaaataattttaaatcttcataaaattaatttatttatttttacatgcattcaaacattagaaaaaaaaaaaacaaaattttttgagattttgaaatactatgtaggccattaccacattttgaaaagcaagtatatgagttttttcaaattaaaataattttaggagttttaggggcagtttggcacagctgtgttgtgggaaaaaacagttgta

SEQ ID NO: 326688 - DNA, 398 bp, Cannabis indica
tctctacttcaacttgactccatcctttatcttttaaccaactgagagcctctttgacaccaagagcttcaacagtttctgcagggtatgtttatccatgatatttagctgttaagtcaataagatgaccgagagaatcacgagccacaactccaaatccatatgtgctttccttctcaaacaaagctccatcaacatttatcttgacagtattcaaagcacgtttagtccatcgctcaatgttattatcttgtgtcaagagagacaaagacaataaacaatttttatcttgagattttcgccagtggtcaagagtgatccatgttgagttaaaaacctgtgttggagatgagtgtttcttatcccacacaagagagtttctgttggaatttatttta

SEQ ID NO: 326689 - DNA, 896 bp, Cannabis indica
ttattgtctaaatttttgggacagttttttctcatgtggctcgcgatatgtattatgcaactcatggtttgacaaagcatgtcctttgattaaacgatgagctatagttcgaaaagttgccaccgccgattgtagaatataaattgctacattattaatcatgtgtgattttaatcactggataaaaaaaaaaaacccttgaaatttaatacgaaaattaaaataataataataatagggaagagtgagatttgccttttcaagagggaaaataaaaaaagaaagaacatagttgggttggggcccacagacggttgggagtaatctcttggaagttgaaacaaacagcccacggcccacggcgtggacagaatcttcctgtgccaatgccgcgaaacgcgacggtaaaaggctaccactctgcaagcctgctccttccttttccattttcttcttcttactcttttatttaacatttttctcggattttgaatctttgactgactagtatactatttttaaatttatatatatatatataaataataataaaacttgtagagaagtttctatatcatttagtcctttttgaaattgcatcacaactcatgcatgttttagcatcacaatctcgtatattttagactttttctcttagattgcaattttatgatttaggaaaatatttattatttaaaaaaaaatgaaatttctatgacaaatcaaatcaataagaaacgcacgcgaactcaagcattttgagagttttatacgaaagattaaaatttggctttttataaaaagaaaaaaggaattatttcaaaaatacacgaaaacaacaaaaaaaatacaaaaaatacggttttgcagaatttttaaacatttttatgattttt

SEQ ID NO: 326690 - DNA, 767 bp, Cannabis indica
atgattagtaaatttaaaattctaactagattatttccaagttttattagtattttaatgtcaaaataagatcatttcaaattttaataataaaataagtaatatttgatcttataattaaaataaataaaacaaacaaaaataataaaaaattttagaattaaccataaggctagtttgtaaaaaaaatcaaattttcaaattcaaaggctactaatatctaaaactaattttaattaatttaaaaattaatacaaattaaaattagggattctaccaaatttgaattttatctcattgaaaaataatttttgaaactcaaaatatcacaaatacaagtttggcacagggattgcatactccctatgcgtgcgcatgggagcaaatgtggtgaaatggggctgcacgcagccttcttgagggaaaaactcggtcagcgggcttgtctgaggccgtgtgaaaaccgagtgatgcttgtgcgcccgcgcatctgtgcaacaggtttgagatattttcattcaaacttcagaaaatcataactaattcaattaaaatctaaatgaattctgtagaagcctaaatttattaatttttcatctactttccagaaaaaatacttttagaatgaaactaaaaaaatttatcatcataaaattataatttacatataatcatcaaatatgtacataaaccaacatgaccacattcaaatcaacacaataaacaaattcatcgttttaaatttatattacatgaaagtaaatcat

SEQ ID NO: 326691 - DNA, 1258 bp, Cannabis indica
tggcctcagagccatggcaatgatttactttcatgaaatattgatttaaaatattcccaacaccagattttgaagagaatctgcccgtttagtacggtagtagcctactccccttagattgtattaactcgagaacaaagaatacagtgttacctttctcaaagctctcacaatgcaatctcttgagtatttcttttagatctctcactaaagcaattctttcaatccctattacagtgaagctagatcactatttattggggctcaatgtatgatggaaggtttcccttttgcttacaatatctataatttgaaagaacatttattacataattagaatacatgaaatggggtattgagaaaacctatcgtatcccttttattcaatctcatgattgtagggattgcctttgtgcttggacttcacggtaccattttgaagtagtaagtccaggtacacagtttggaaaaccaaactcgtaccatgctctgatagtctgtcctttaccctgctcgaatgagctgacattgtgtgtgcagagatgttacttgaagcctgttcagattatctttctacccaagtgcaaggactatttgacacgtgtcactcatacatgctgccacgtaatagtacaaaaaatgagataacaatatatattcagaatttattattagatcattataattttctactgcactcttaactttacaccaaattagtaatacataagtactatatcatcaaactagtaaatattgaaggaaatacaactgcaaaaccacatttataatgaatgcgctacataagaggattttactacactccaataaattaaaaccagaaacaaaaactactttaaggtaacgtttggttggaggtaatgaaatagaattgaatggaaagaaaacagtttttattctattttctgtttagttgcattttaaagaattagaatatcattctaatagagtgatctttcaattagtttagtggaatgactattctatttgaaatagatgaaaagatcattctcatgcaaaatttgaaaaagttaaataatatattttaccaattttcttatgcattttaaattttattacattcttattccaattctcattcttattctcatttttatattttcattctgcttaatcaaacgccacctagagtcataattttttaataaaaagaaatataaataatatagttgtccagagataatagctagatgatgttaactgttgggttttatgc

SEQ ID NO: 326692 - DNA, 796 bp, Cannabis indica
tcaagttttctttatctttttttggttcaacatccataattaaatatgggttccttggcaaaatgggagcttgcgaaaaatattctctaaacctatcaaaactcttgcaaggaaattatgtggaagtatcacggcattttaaggttcatgtttatcatcgaactatcaccattttttttcttttctcatgtatatattaagatgtttgttttgttttgctctttaattccaaaaatcagctataatttttagttgtaaaattgttttgccatatcttcactggatttcaaaatatactaatggtaaattgcggtataactacttaatagattttatacacttaaatattttatttttatttttagagtaaaaaatactcaatgttataattcttttacatccgttactatcactttaattaactcataaatagggacatgtagagggtccagatacattatatttatttattttattttaatttaatattcttaatatctaaaactaaatgctacttgtttcaaaaaataaaaagagatgcaaaattaaattagtataattgagtgaactagtgcagtatatgtaaaaattattatgaaaattaattgttttttataagggtgagagagagataacgttatcattgccgccaaacccaaaccaactcatcccgatgatcatggagcctcagagataacgttatctctgccgccaaacccaaaccaacccatctcgatgatctttcaaaataatggtacttcgaacttagctaaaaaaaacggattatttcacaaaa

SEQ ID NO: 326693 - DNA, 998 bp, Cannabis indica
aagttttgttgttgtgtataattcggcttgatgtttcattttctggtatgcgattttatgagcattgattttcagtttcacacagataaggaagaggatcagaagtaattgaagaacttacaggagttagagaagacaatcgaagacgacgattgttgctgcagctctgtcgtcaatcgatgaaaattctagtttgtgagattgatttgttgtgcataatacttgcgtttgaaatcgaattgcagacttcaatcgtcgaagcttatcgtgcgatttcgagagagaaaatcgaagagaaaatgtgagagagaggggatccgaattctagtgttttattttggaaaatatgaatttttttaagttaaatctatttatttactttttggtttcccatacttttgctattaattatttatttttttcatatcttgttgagttattttttttctgccataaaaaaataaatggcactaaaaattctcatatttataaaatttctccaaaaataaatggtagcatcgagcactccaagttggactgaatgtaatttgtcaatacaatattaatttagtgtggtcatagtattattattattataataacataaacccacaagtatgtactaattttttatttaataacataatatagatcaataaacacttactcagctagtccaatgatccgtttacaaaaaaaaaaaaaaagctagtccaatgattatgactgtttcgatctttattttatttttataaataagatcatgaaatgaaactactatatatcaagtcaacggtctgaagcggtactttgtcaattattgtatattcacatatagttgacttgaaacttgaattatactcatcctctctttatatatttttgggttcgtttagttcactttatcagtagaatctctatttaagaatactctattcaagaataacttaataaaaataacttctatattgtagttagttatatatttttttaagtcc

SEQ ID NO: 326694 - DNA, 785 bp, Cannabis indica
tttatttttttttaatgccaaataattcaaacctaaacctaggtagttccctataaatagatagtgatggcctcaaattgaaagatgatgaaaacacttgccttcagtcaaaaatttgagccttcttccttatgctattcatacccttcttctctcttcctctcttcataatttcgaaccctatagtgatagagtaactgcccacacacatcaagtggtaatcaatcatagtgtgtaaggctgtgaagaatccaaattcaagagaaggagattcaggctcagatcttggtgatcctctgctacagacaggatacaagggttagagatctgagcagaaggagtcattttaattccgttgcacccaatgtaaggtttctcaaactttatatgtagttatttagaaattcatatttaggatgttaaacaacatacatggtagtaaatctagatccttgcaaaacataatccaacaccattcagcttcagttactttagatcctacaacgtcacttggatcagcgtcggtaacgaattttaccaaaaccgatactgaaaggccttataaactgcctctaaagcctaaatttatagtagtgtcggttcattttgtgagattagtgcctgttattaattaccaatcaatataaaaattgatttacacctcatatgaagatcttttagtaaataagacttaagggcccacaatattgaatatttgtaactttcctaatatgaaaattttttttaaaaaaaaaaaaagtaaataaaaaattaaatattaaaaa

SEQ ID NO: 326695 - DNA, 826 bp, Cannabis indica
caatgctacaaaattaaaccatacagtcattaatgttcactcgtatgaagacactacaatcattactagtttaaatttatgagaaatttttcataaatatgagaattttttagtgacaataaggcaaaaaaaaaaataactacaaaaaaatatagaaaaaaataaataaaataatggcaaaaaatatgaaaaaatcatataatatataaataggcttaacataaaaaaaactcatatttttccaaacaaataaaccagatttcccctatcctctcacctattttctctctgattttctctcttagaattgcgcgatcatctccgatgattaaaccctgcaattcgatctcaaactcaagcatttcacacagcaaatcaatctcacaaaccagaatattcatcgacttctcaacatatatcaacgatcgacgacagagcagaagcaacaatcatcatcgccgattgtcttctccagcttcggtgagtttgtcaattggttctgatcctcttcctcggctgtgtgaacttgaaaatcaatgatcatataatcacataccaaaaaataaaaaatcaaaccgaattatacacaacaacaactcttcaacaacaattctcagtataatcaaaataggtatatacactcaataatcaaaattatatatgtttataattatatatgaacatattatataagaatgtatatatcatttgaaaaataaataaaactctacaatttcaaatacaaatataaaataacgaaaaatttaaatataaaataacaaaaagaaaccagttaaatcaagagaaaaaaagtaaggacaacctt

SEQ ID NO: 326696 - DNA, 1202 bp, Cannabis indica
ttcctagaggtattatagaagatgttttgattaaagtggataagttttatttccctgtggattttattgttcttgatactccacctgttgaaaatgctcatgctcaaatacctattattttaggtagaccatttttagctacgtaatggtgtgttgaaactatctttttggaaatatgactattgaattgaatgtgtttaatgttgctaagtctgttcagtgtgaagaaatacattaagtaaacatgattgaaaatatttttgacatagaaggatcatttgaaaattgagcaaaatatttttgtatgaatttgaatattgataaatttttagatgaggtgaatcttttgttagagtctgtacctttaatgaacattgaacattggaagaccaaaattgaacttctttcaccattagaacatgttcaatcaatttctgagacaccaaagttagatcttaagcctttaccagaatctttgaaatatgcatttttaggagagtctaatacttaccctgtcatcattgcatctgatttagataaagagcaagaagcaaaattgttagatgcccttagacagaacagagaagccataggttcgaccatgggagatattaaaggaattagcccaaccatatgcatgcatagaattcatttagaagaaagttcaaagacctctcgtgattgccaaagaagattacatcaaaacatgaaagagatagtaagagaagaggtaattaaaatgttagatgtaggtattgtataccctatatctgatagttcatgggttagtccaattcatgttgttcctaagaagtcagggattactattgttcaaaatgagaaaatgagtcgatccctgctagagtacaaactgggtggagagtgtgtatagattacagaaagttaaataatgtaacaaggaatgacttcttccccttacccttcattcacaaaatgtttgaacgtctagctggccatgctcattattgctttcttgatgggtactcgggatataaccaaatccctattgcccccgaagatcaagaaaagactacctttacttgtccttttggaacctttgcatatcgtcgcatgccttttggtcttgtatgctcctgcaaccttttaagatgtatgattgctaatattttctgatatggttgaaagtaaatcttgtaagtgtttatggattgatttttctg

SEQ ID NO: 326697 - DNA, 675 bp, Cannabis indica
gcacgtagatttgaagtttgactgtgtattaacagtagtcaatgtatatatagatagatatatagttacacaggaaccaagtcttatttggactgagacagacttttgtggtcagggcggcgcgcgttgcctatatatgtatcgtcttttgttttacttttcatgcccttgtcaaattttcagtgatttattaccatctagtaatatgggcattcttatttgacattaatagtgtctaacaatttttacagtgatgctttataattagtaagttatatttttttaaatttcttttaccaaataatagtaaaatatcgaaaaaaaaagtgacgctttttagtaattcttcttaataaagtattacaatctagtatttttagacatgtcactttgctattgtttagtaatattttttaaaaaattattatgagttaaatcagatattgacatataagaaaaagtattatacactacttatacctgtttaataaatttgtatctgcatatattcacgagaaagcagtatgtttaagataattttatacaaaggcttctctgaaataatttgtcaaaaaacaaaaaagttgcatatgacacatcataatccaataattaattattgaacttaaattaaatgtagagactctaaaagaggaaaaaaaataagggaaaaat

SEQ ID NO: 326698 - DNA, 1205 bp, Cannabis indica
taaaaaattattaccaaaagtaagttttttgtagtgcatcttggtactctaatgactttagatcaaatcacgaaaaacaaagaaaagttaaattttgctcaggtgttagtagaagtttgaatgtatgaagatttttcatttactataatgtcacctgcaagtagttttcggggtaagtcctggaaggtcaagagcatcaacccattgcctgttttctcgagagatctccttttctagccatctgaatcttagctctatactcattcattttggattttgagtgtgttccatacaaagtttccaaagcatgctatatagaggttgttgaatcacatcccataacttcaaatgtgattccttcagttatggaaccattcaaccatcccagaagcaactgatcgtttacagttcactgtttaaagccaggattaattaattttacttgtggacacttcactaccatcaacattagtatagagaaactcgtgtggtctacgcagaatacttttaatatagccatcaagtttgtgtctatacactattgtagaaattatgatttattatagtgtaaagttattatgatccaacttcaatgcaaaagactcatttattgtgctcccaaaatgagtcatgacaacatttggaatctgagtctgagtgtcgttgtttttcagtcactacaaaaaaatttacttttagtcacaacaaaacttgtgactaaaagtgaaaaagttgtgactaattataaattatcattcctatattgtgactaaaatgaccgtgattaaaagtattagtcacaaaaattataatttattgtgtgacaatacttgttgtggctaaaactaaattagtgactacttgtatctaaatacaatgctttagtcacaagtaatattttaatgtgactaaaagtcacatttagtcacaaaaaaaattatgttgtgactaaacagttatcacaaaaaatagcagttttttgtagtgagcagcaacattcaaaaccatatatgttggtactgtagaagctgttactttcagagcactattgtcaccttcaatagaggcctctaatgtcttctctcttggagccgccattgatgacaaacgtcagctctaataccaacttaaaatcagcaagaaaatgtaatgagattgagatgtattggtttcattatatatgcaaataccaattacaagaatat

SEQ ID NO: 326699 - DNA, 679 bp, Cannabis indica
ccacccttgcattgcctcacccactgagttagtttcagtggctttatggcagcatataggttgtgatgatattacttatcttttatatgaaaaagaaaagagagtatccaacgacacttattgatgttttaggttaattggtaagagttttgtccatattattctttcaataataaaatttagaaaaattcaacgcatcacccaaaaagaaagtactgtaattttttattttaatttttttttataatcgtataaattgtaattatttaagaaattttataaaattttaagttaaaaaaaattaacaccttgaaaaaatagtttaaatattgtgttacacacgtacctctacacgagtgaaatagactgtttgaacaatactttttatattataaattatttaaaatttcttaaaattttgcataatgtcttaaaatttataacgtacatgactatgaaaaagatttaattagaaaaatgtcttagatactaaaactataaaagtttcctaaaatttataatataaaacagaagcgcatgcatatataataattctaaatttatatacggtaaatactattttggaccatgtgttttgcaaaagttaccaattgaactctttattttgttaaatgacaaaatagaccctatattttctaaaatggtaaaaataagaccc

SEQ ID NO: 326700 - DNA, 549 bp, Cannabis indica
accgtttaccacccgagcttgaactgcttggcacctggggtagctggacgaatgtcccagcagagggaacttttagctatccatgttattgctcaacctctgcttgttgaatggcttcttcaagcttaatgaaaccattcgcacgataaatgaagtcactcatagagtctattagtccatttttcttcatactgttccaaagttctccaagaacttcgatgcccaccagtattgcggacaatttcccgtcttcgatcaattgtgcagccttagttgcctccgtcatgaatgtgctgatgtaagctcagagaggttctcctggtctttgcttcacttctaccaggtcttataagtgcaatgggagttggtgagaagaggagaattgtgcatggaattccgaggagaaagcgttccatgagttgaaccttctgggtgtcaacttgaaataccattgctgggcggcctctgagagggtggtaggaaacactctgcaacatactgttgggttttatggcctaaataaaactctttacaatctgattagttatc

SEQ ID NO: 326701 - DNA, 761 bp, Cannabis indica
aatacgttagaaattaaattgcctaatttattttgaattacatcccaaattccaattgggtcttagaaactatttgggcgataatacccaaaatttaaataattgtaaaagctgttagaagaattaaacaagttttataattcaaaaatgaacattggaaaaatgaggtggcattagcacatcaagaatacaagtagtcatggaaatttgactcgcgcggacgagtacccattttgaatggggcggggatcacccatcttattaggtaatggagcaggagtggggttcaatttatatactcgaaacaggtttgaagcggggtcggagattataccatcacccaaatatttagtttctaaagttttcatataatttttaaattattacgtattaaaatattagttatacttataaagttgacaattaatcttctctaatttactttgtaataaagactttttaataagtacaatgtttatttattctaaagtcaatatcttatgttttatttttttaaaattatattacatcattttcttattattatttaattttaattttaatgggtatccaatgggttcccatacccaaaggagattctcctaccccgaacccatagggcccgtttggtacgcatgattggattggattagacatgcaaatttgtccaatccagtatttgggcatgttagaagtctggattactaatccagctaacctcatctgtctggggattatttatcccatccagcagggtggga

SEQ ID NO: 326702 - DNA, 1339 bp, Cannabis indica
cataattatctaattagggttttgctaatccttttcttaattctgagtattacagtataagtactcatttagtatgagtattcatttatagtagcgagtactcaaactattagttattaaataaataaaaagaaagcataaaataaagagaacacaagagaattatagtggtttaataagagcttggtctgcttagtctactgttacaaagattgtcgcttcatttatttgatttggatcactcttttatatagaaagtaagtatcctttagatttgcataactgattggtttcagagccttttttttttttttttacgttaaataacaatattaactaaagtaaacaatgaaagagtaaataaaagatgattttaatttgtttgtacaataagtgtagcaacgtatgcgacttgctaagctacaagttttctgttcatatttcatcacacaagctcgcaggctctagggtgtttgtattcagaggatggccttagggcctatcgtttggatgtctacgttcacttttgatcgcataaacagacatcccatgcgttgacaacgtggaacatgcgaggccctgacgagtcattgagcacattagtcattcagaccaatcttatgttaaaaagcaatctttacaagtcgcaagagagaagatgcaagtattaagaagatccatttagtcaactttaacgaacaagttaaagaacatgaataatacatttaagccagaacctaactatctcaggattaaaatcattgatctatgattacctaagtgatatttacttaaaaaagatattatagtaaatttatgatatcttttctatgtgaatatcggtccagtccgatatataccaatacatccaataatagcttactttactaatgtgttggaataccattatctaagtgtaagtaaattaaattgttgattatcatatctgtataaattttgtgtactgataaattgtgggactaatagtttaataacataatcttaattactttccattgtgtagacaacacaagaatcatgaataacaatgtgataaggatttaaaataatttatatatcaaacaaataaccatgaaacaaacatgtgaaccaaacattatattaaacaagtaataaaataattttgttcctttattgataaatgaaattcaagataacattgaaatagaattttagtcagggcacaaaactaacacctctagcattagtggttcctcttatagtagttcttaggggtgttcgcggtgcggattgtgcggtttttaaccattttttcaaaccaacccgcacatgcggtttttctaattttccaaaccgc

SEQ ID NO: 326703 - DNA, 1955 bp, Cannabis indica
tttttttttttttttgacgtagtgaacagagtcacacaagattaacaaagcagcaaactacagtcggcggtggaacctcctcggaccaggatagcttattgtctaaccgaaatgcatgctttgccaaaccatgagctgcggaaatctaatcgcgagccacataggacaaaactgtctccgaaaatttagacaataaagctataacaacttcaaacagagcctcatcccattgaaatacaccttcgcataaataatacttgtcaccaaatctggaaaaatatcacaacaccaaaccaaaaaacaaaattatattagaatgacaatcttcaaaaaataaataaataaatttaaaaagcaaccttagaaattaacgcataactacatatcactagctcaacaatattaaaaactaaagaccaacaaaattctaagtataactagccaaaggtaaaacctttggctagtaataacatactaccaccctaatttaaaattacgtaaaatcaatattatacagattatatttaaaaataaacttatcggtgaattgtcagtaattgaagtctttctacaaaataacagaaaaataaaactctattacctcacaatataaacgatggtaaatcaatccaaaataaatataaggacttaaaagactagaaaaacttatctattaaaaatgaaaaggtgagaagaaattatgtgacaaaaaggatcatttctcatggccattgaccataccacaaaactatcctaaaaaataaggacaagctaaaaaaaatggcacaaaagccataaaagacacagaaatcataaaagacatcaaaaccatcaaaaaataatacataaactagtaagaaaactttgaatagctagtaaaaagaaacaaaacaacactcataaaaataataaaaatataaataaagagtataattttacaacatttatatcactttttactattatgcttgtataattataaaccttgatataaaatatgatatatcatttaatgtttacttaataatttattaagaaaataatattaataatgcaaaaataaatataaaatttaataataatacacatcatttaatataaaggagcttgttgataaaaattaataataaaattttaaaaatagtataattataaatataaatgtataatatttattgtagtacaaattctacatcatgttatattgtgatctaaatttggattaacatatttgcatcataatttgatacactattagaatagaattttaacaaaataaactatattttacatttgtatcattcatttacatcttcattacatataaatataaatatttatatctctttatagtaagaattttgaataaagtttgagcttgagtatgcctagctttattggggtctataatctataaagtattaaagtatatgggtaccttttctatatattggctactgaatttaaaaaaaatattgtacgaagaatagtgtatgaaatactctattattttttacaaaaaaacaaaaaaaaagaaatactctattataaacttcatcatgacattagaagttagaacataaatatgcgatgatgtatatattttttaaatgtaaaggagaaagtggattgaccaaattggatggccatggttgaaatagagattctaggaaggagtacttgcttgtctaaactacaaaaaaacactatgattacaaatttctatttagcggtggagaaaatctcaaacttgatgggaaagcaaagaaaaatattctacaaggtccttagggcacaagatatttaaaaagtgaatagaaataataagccttagagcatctccaaagagacaccaaatttggtgttacactatcactaaatttggtgtcaaaaattatttctactccaaccacaacactaaaaattacactaaaaaaaatattcattattattat

SEQ ID NO: 326704 - DNA, 1149 bp, Cannabis indica
ctcacagctccagtaatccgacccttttgacggcaagagaacagtgagggacctttaagagttatggatctggggtcttcaaaactttacaaatccatctatggcatttgtttggacccatggggtcggagttagctccatccgtgcatagtcgagagatgagagtgacgatgagagggagtcgagataaggggtttctaaaggttgtgagcacactggtgtggtccgtttcaatcatcgtcgatatcggaggatggccattgtggcctagccgtgcatgtttgacagtgaataaagagaaagaggtgggattgagtgagaggaaaggggaaagcttgggttgggggtttatgagggaaattaggatttttttaaacttttatttgtttaataaaaatagaaaaaaataattttttagtaaattaatttatttattttattttttcactttatttttttaattttaaatttatttttaaatatttatttacgtggaccaataatatagtgccatgtgtacattgtgtacacacggacaatatcttatgtacacatggatatttagatgaagtagctaagtgcttatagaacttgagtttatgaagttttactgctagaaaatgagtttggggttaattacttgcaaagtgaaagttttcgacattttgccacaaattacatcttgtattttaccaaggacagccctatttgcctcacaaagttaactagttaagagcagctagatataatcttcttcctattaatttcatgaaaaattgatccatctttaatatttgcttttatatcgatcaattaatacagtctagagttaataacgatttcatctatataatacacacatcagttgagccaaatactataaaccatccctaccattgtttgtgtcgttgagatcagatcagaaagcaaattcctcttttcctttgtgttaataatccagccgaggcaaagaataaaactcagtaggccaaagcacatttggcgtttggttggaggtaatgaaattgaatggaatggaaaggaaataattttcattccattcttttgtttggttgcattttaaagtattggaatgacattccaatggaatgctctttctaccattttggtggaatggctattccattt

SEQ ID NO: 326705 - DNA, 785 bp, Cannabis indica
accaattccccatttttttgactcaccctgagtttaggccgagatcttaccttccaaattatcctctggccttacactaaggcccatttcagaccttcttgttttgagtcaataaccaacaaacaatcctcatcaacattaattgtatcatttcccacacaatcaacatcaatcattcctcctttctctcccatgagagattcaccaatctgtcccataactacctctttattacgtgatagttggcccccaattttttccttaatcacaggtgcctgattcaaaattgttggtgacattaattgtctcgccagagctccacctgcaccatgatctgaatacgattgatcttcattcatctggcactcctccgtaacttctctgaattgtttcagccatttcttaccaatcatatgactagtacgcctgggttggactctcatccaatctccatatggtttaaccagttgaccatttgcagcatcgaatcttcgtggacagagcttatcaaaatgtcccattatcccacatataaagcaaaatgttggcaaatgttcatatttaaaatttgtccaaaattccattgcagcattattccgaagcctcatacgtattttgagaggtttagtgacattaatagtgactctaaccctcagaaaatccctccagagtcccaaaaaattcttctcgtcagactctacaaacttacctatataatttgctacatctttggccacagtagcagttcttaatcctgaacgtaagtcatgcagttgaacccaaaa

SEQ ID NO: 326706 - DNA, 1033 bp, Cannabis indica
tttggaaaatacagggtctattttgtcatttaacaaaacagagagtctaattgataacttttgtaaaacatagggtccaacatggtatttaccctaaaaactatcacagttaattgtaatagaattcaataagatatcaaagatagaatagttatggttactcctaaaaagttaaggaaatagatgtccaatgacttaagtaattgtaaatttttttagttcttgagctatttgtatagaatgaattctcaagccttttttaaagtgttgatagattgtatagatatgttggttgaatatattgagctgaagttgattcttcaaaaaaaaaaaaaaatatttcactaaaatgatagaaatgtcattttatctaaaatgatatttcgatactttaaaatataattaattaaagaaataaataaaataaaatttatttatttctatttcattagttcaaaccaaactcaacctaatagacatattgcattgttgtaacactattaatacctatgaattagctaaatttacacttagagctcatgagttaacatatagtataataatattccacaagtaaatatttttgtaatcttttgtgagagatgtgagtctcatctttaacttaatggcatgtttactaataagtaatgggaatcaatagtaaggtaatcattcccttacatttgtttacttacattattaaaattaggaaagagaaaacttgattaaataaaggagaaaagaaagggagaacttcccccaccaattttataaagaatgccattaagggtaatgaattttaattatttttattttattttttaatattaaatatataatgacaattttgtcctttaaaatatgtcttacaaaataactaccatataatatagtttaacttaaaatggcaatttagtcaatttaaacattccgattacgtttcctaataaagtaaacaagataaatcactaccattccatttccaaaaaattttagtaaacaatatattacaaatattgattccgattatttt

SEQ ID NO: 326707 - DNA, 654 bp, Cannabis indica
attaagctcagggtcctatttttattattttagaaaatacatagtccattttgtcatttaacaaaacacagggtccaatctgtaacttttacaaaacacagggtccaaaatagtatttacccattttattataatatatcaatttttcactgccatagccacccaattcactcacagtgatataatcttatttcttttgtcactgtctctctaatctccttcccaaattaaaacccattttcatgtttgctcaagttgtagcttagctcaaagttgcacttcaaatttgtccaactactacaaattacatctactttatcttttggtaaatttttttttccttcatctggttgggttcaaatattacttattgtttacatattgcaccctatctgtttgtacaaatgcctctttttttaattttgcatattaggagttatttatgtggtttcaattgcttctaccagtgttttttttatttcttttttcattttatcgttaaagaatgacactattttctcaccacattgggggtttaatcatcaacaaatagttacttctttgttattttttttgtcataataattaagtttatttaggtggcgtttggtaacacttttttaatcagttttttgtttttaaaagtagaaaagt

SEQ ID NO: 326708 - DNA, 1440 bp, Cannabis indica
agaaaaaaagttttgaggtgtgtggttctttttatatttttctaagtggttatatctgcttattgttttacatttgtttttatgctattttagtaattttttgttctgattttttaagattgggcttgtaaatataactgctactgcattgggtattgaggctgtgcaaaatattttttagtcttttctaatcatgtttttctttcttttgttttagtgttgtttaacagttgttttgccacgattatttatttgacgtcgatttcacttttttttctctatctcaccgtaattaatggttgttttccgattgttctggtgttcgtgtggtggttctgtccgtgggtgtggaagatggaggtctcattttttttttgtgtttacagtttaaaacaaaaaaaaattggtcaagatagtataaaaataatttttgtggtagtatttttgtaaaattgaatcaaaaatcgttatttttataaattttccgatctagaaaccctacttttatgagggctatcttaaggcattgtttagttatatattataattaatagaatatgtagggttaattaataatatatttggggtttatatatttcaactttgtacataaattaaaatgtaatagaaacttatttgtaacaataagtttactttatctcatgtttgaatttttattaattcatcattatattaacaagtggttggtccaaataattgaagatgatgaaggtggtcaagcttctaaccaattggttttttgatatattttctatagcttttttataaatttatttgaagattttggatagaatttatatgatttttcgataaaattttgaaactaatggacatgtgctgggagatatatgtaagtaatatcaagagtataataagtgatgatgtatatcatcatcaagagtagcattatttatttttgatatgagcattattagtgatgacgtaccactgactatgtgttacgatgtgatgcatcactgactgtgtaatacaaagtgatgcaccactgctgtatagtacgaggtgatacatcattgactgtgtaatacgaggtgatgcaccactgattatgtattatgagatgatgcaagatcttttatattacgaactcatccaagatcattcgtattacggtcagttacaagatccttgtactacgagatgttgaatgttttatcgaaataacatctcgacaatgctgaaatacctctcttcgtaaaatcttgtgatccttatttagattaggtcgcctcataggctgagtattgagtttttttcgatatgtcccacaatatatttattacgaaaatttagtatttatgtcacttaaccgcataaatagttgggatggtaagttcctttctcgtgctggtaaggaaattctgctaaagactgtcatccaatctcttccaacatatg

SEQ ID NO: 326709 - DNA, 1839 bp, Cannabis indica
tttggggttttgaaaaaaaaaggtatagtttttttagggtttaaattattggtttagaaatcaaattttttaattttctaagtatagaaaatcaaatttccctaataataatgaatattcttgattatcactttacacttaaaaaactagaaaataaaaatgagaaataatgaaattttatagtgataaaatacatgcaaagtagtaatgaatgttccattaaatttaatagtgaaatttcattaccattattattacttgatagacaagatttgactatagagtctcttcatttcttttttaaattttatcgaagacctataaatctatgaaactagctattaaaaatgtagtagagatgatcaacaactcaatcatattattactgacatgaatcaaacgatcaatttcacgtatgaaatttatattaaaatatatatatattgatctgaccgtacaaccaatgaaaaagtgacacttgtcttgtatcatccatatatatatatatatatatgtatatttgtaaattatgtagaaattaaaattagtatattctttggttgagattgatagacataagaaagtggagaatgggaaaatggggtcccatgaattgttggtaaattcatatacaagaaaagaattaagaagaagaggacatttccaaccaattgtatgccttcatccattatatatatataaatatatatttatatatatatcatatcacatatcatatcatgtcatgtcatatcatgtccatgcatatatatataatgtgtttttattatttataagttagtactacaatcacaaataattaatctatcccttgtgctaatgtttaggttgaacgaatgaaatttttagtaaaaaaattgttatgttattcatttttattaaaatttgttaattacataagctaatgttattataaggtaatttaaggtttaagggtttgtttggtaccctattatattgtattgtgttaaattgtacgtattaatattatttaatataataatattttttgtattgacttgtattaataaattatatgaaattataatatattttcaataaagtcgactccaacacctaccttgggtcatgtccagcctgggtccaggtctcgggtctcgatcctatccgggtttggagttcgatctgggtccgagtccgggtagggtccaaatcaggttggcttttgggttttgggttggagattggagttaaacctcgaatcttttataattattataatacaagctaatacgtataatttgttatatattaaatatacaacttatattatactaaaatttgtagtcataataattaatataatacattgttttatctaaacatgatatttattatttaatacaatgcgacccttataggcctactaaacgagccctaaaatatctaactaatactatatatggtgagagtggttagtaatttttcatattatttattaaattaaaacgtgagaattaatattaaattataacagtattaattggtacctaattatgtggtattggacgatgactcctactaggggtcattaaatatcattgtaattctatgatacattctctaaaagcggtgcattgatgtactttttatttgttttgatactcaaaagaatattttgtttaattttttttcacgatcgtatatattgtatttatttaagtttttaaaaatttaaaaaaaattcaacacatctaaaataaggttcaaacaacatattgtatatgtccttcatttattttaaacatgtgcgaagactacttgaatagttctttctacattataaattattttaaa

SEQ ID NO: 326710 - DNA, 1990 bp, Cannabis indica
tatagttgaatatttaagatattcaaactgaactaacatgaatattattacacacatccgaccgtagtacaatatatcgcaaaacctatacttcactacgaatgaacatttaagatatacaaactccactaagcattgataattaattaataacaaaaatttagtgaatgtatatacatacaacaagctaaaatctgatcaacaccaaattacaatataatgaaatacaataaaattataattttaagtaattaattacttactagttataaaaaaaaataactagttactagttagtaaattaaatacataaatttttgaaaaaattacatatacatacataataaattatatttcacactaacaaaattttaagaaatttatttctcaactaattaaatctctcctatctcattctcattacaatacatatatattacttagaatatatacataaataaaatacaatatttacatacacacaatacaaaatatacacacacatattcaataaaatacaaaatatatacatatataatatatatattaaattctaaattttttaccttataagtgcaattcgttgaccaatttaataatataagaaaatcccaaaaaaatacaagaacaaaaaataaaacaatgtacattactaaaataaatagaaattaatcatatttataccttaatgtacgttgagattcaacgttttctccactaaaatcggtggtcggagttataatcaccactttatttttatgggtttggttaacaatgaaataggagaaaaattgtaactttttgggtgtatgactttaagtttcgaaaatagaagatttaaaaaaaaaaataaggcacaaatggtacaaaaataggagagacatgtggattttagatggtggttggcgagggtttctacggtggctgttgcctgtagtgtttgtttcatgttgaggaagaagaagacgaagtgaaggagaaggttgatcagggttaatttatataaccctatggcgtcgattatttaaaagtaatcgatgtcatatggtaaaatagccatgtaaagaccgcatatgattaataccttgaattattaaataattagggtttatgtatgagattaaattaataattatgaaatgcatattttggaaatatatttaatatcatatatgttattatgctattttatgtaaattactcaatttctgtgtttgtgttcgaaagctgtggacagcgacgttgggcctttagagagtcgtattttatatgatatagaatattatcggggtatcattgttaggtattaatggcgttggaattttcggggtttgaaaaatgactagttcacccttgggagttagtagctattttaatttagttaggggcaaataggtcttttccttggttatttatttggactttagtggacattgggggctggttatatcttttagtaagataatatgattttaatttaaaatgatgtaagagtaaagtaaaaacaagaaaaggaaatcagaggaaaacctaaaaatttctaagttttcttccctctctttcgaacaccaagggaaccagttgagaacctggattttttaaattaattcagtgtgattttagttgaattgtgagcttcagcccaaggtatattgccctagctttatcttcctttgattttttttgttttttttattagtctttgatgcaagagttgagttttatggtattgtggtgataaggtttgtttaattgtgaattttaaagttagtctaggtttctaaagattgttctaagctataatggtaagtattgtgtggtttgttcaagttagaggtttgtatactcatctttagtctctaatggtggttttatttcatgagcggtttgttgagttttctagcttgaaactggtttattataatgcatacaggtgttctggaagttataggaaagtttgggcttgaaactggtttattataatgcatac

SEQ ID NO: 326711 - DNA, 640 bp, Cannabis indica
ttttttttgagttataaaagaacaatttattattttttgtagattaatatttaataaaggttaattaagtaaacattctttttttttataaaagttatagatagaaaaaaaaggacaattttataatttactttgggaagcccaaagccacattctcctttttatatagtaatagatagattttgagaatagcatctaataacatatctaattcaattaaaaatttaatttttgacacctaattcaatctaatcaattgaacatctaattttttataattaaattgaattaaattggttagattcaattagttcggattgaatcctattcctattgataatggtggattccacatgttatctggaaaattgatggttttttcaaacatgggtgattgatgttacatagttaaaatagaagagaagaatttgaagaaaaactcttaacgacgtaatataaattcatatttatctggaccttgaattttgaaaacaaatttctgcaacccttgacataatattggtagtagaattaaataaagctaagtatcccatatattatagggaaaaaaacagaaaaatacaaaaaaggaaaaaaaattacaaaaatactatgggccggcccattaaacatttataca

SEQ ID NO: 326712 - DNA, 841 bp, Cannabis indica
tgtcataagtacagggggtaaaaaagataattattctataaaatatgagaaatgtgaaatggtataattggtgcttagtatttctttatcagtatcatacttttattagtgaattaagtatcattgtataacttaagaaaataatttttaagaaatatcgttaatcaatcgtaagacatcacctataaaaaatactaaggtaccactagtacccaataacaatgcttataaaatatacaatacatacacatatttgcggtataaatattttatatttttaattttatacacttatatattacataataaatattatatgttacaattttattattgtctttaattctaaattggttaagtactaaactaacacatatcaattgattagtgattacggttgctccgataattgttccagtagtttgttatgtggattatgattgcgatttaagttgctctatgtgcatttttatgtagatttccgtaaaaatacaaaattaaaaaactgttttgaaatgtaaaaataaaaaaaatctctaataattatttaattataaaaactaaataaagaaataaaaatatatttttattatttttttcttgatatttcaacttttatttattttaagattatttaatgatattttaaaaaataaaaaatgagttaaactattaatttattgacatgtgatattttcctttagggttgtgtttgtctgtttggaagtaattactaggtacggtaattattagggtagtaattatacaatttgcactatattttaaaattagcaaggtgtgtttggacatcagatggtaattacatatgaattcctaatat

SEQ ID NO: 326713 - DNA, 691 bp, Cannabis indica
agcgaggtcaacattttggtgctttcattgagagcaataatccaagcttgttctttacttcaagtgtgatcagaaacactatagtcgtataaactcgtagagatgtggtcgatcacgtgaatttactagcagcagatcccacactgcagactccagggaatgcaagggtccgaccagccactactcctgaacaaccaaacacgcaactacctactgtgggtcaaggtgtgacatctcatttgtctagaatcacacccgatgtgcatgagactagaaacaccagttctacagcccacctgggtactcccaacactgagatcccttcgacaacaaatgtccaaacaaccattggagatgacacagagatccaaaacctccttaattctcttgggctcatgcaaggtcatactaatactttacatcacgatcaagaagagcttcgtgctgcagtgaaccttgcgttcgaagagtaaaggcgtcagctcaccgaatggagggatagagagatggaaacgttgaaggctcaataagcggccatcgacgaccgaacaagacatgccaccatactgatacaaagggcctaccaatttgctaatcagcaacctgcgtccaacatcccatcgggcagcttagatgaaaatcctgttaagcatactgcccaaactctgaacgctcagtcatccaattcctg

SEQ ID NO: 326714 - DNA, 927 bp, Cannabis indica
tggagaggaagtctttcccctcttgttacaatctttataaacagaaagatcgtgggatcaacgctgagtacaaagataatgggattgatgctgagtacactgattgtgggatcgtgtgtatgccatatacctgtaatttgatcttcgacttatagggatttcgttgatgactcacaatgcgaaagctgaattcgctaagtgttggttgctctacgcaaattgttgattgctttgctctgggcatgccagcgaggcatcctgctcggactattccctccgagcagatactccaagtggattccatgtctcaccattatgcgatgccacgttagagtgcaaaaattgggataacactaggattagggaataagtgagtttctctattaaaggttaccgtccttccccttccatgagccttttgttgatataatagactagatgctagacgttgttctcttctcttatcagcacagcgcctaccgcatattctgtgacagttaagtatattcctaattcttctctgtctagatgttttcagagtacgagaggttttacaagttgtctttttaattcctagaaagcgttctcacatttctccatccattcaaattttttgttacctcgaaggatgttgaagaaaggaacacacttatctgctgacttcgaaacaaatctaatgagtgtgattatccgacaagttaagctttggacttccttagtttttgtttgcaatttcatatccaggagggattgtattttctctagatttccattaacaataaaaacaagaaacttacccaagctaactacaaaggaccactttaagggattgagtttcatgttacattttttaaggattttgaagcattcatcaagatcctctatgtgccccctagccttcttggatttgacgagcatatcatccac

SEQ ID NO: 326715 - DNA, 544 bp, Cannabis indica
attttataaaatattttgtgataatttttttatgttaaaaaaattgttacaatttatattttcctagtgatttaaacatgattaataaattgggtcatgttcaatttgcatgaaccaccattattattgttgtttcttttttacatactttcacatatgtttttgcagtataatattttatttaattgtataagcactactactactattaaaagatctttttgtgtcatatatttgtgataaggcaaaaaattatacttaaaaaatgagtaatagtgacacaataaacttattcattattgggctgtgattaatattgggcctggcgtttaaagtcagttatgaacttatgtaaattatgtcacaaattttaggaattattttagaaataccaaaaaaaacctaaaaatttatgttttcacggaattttgaagttttttttttgtacattttttacggacttttttttttcttaaagaccgttgtttacactattgttttaaaaaactgttgttttaactttgtaaaaatatagtataacgtt

SEQ ID NO: 326716 - DNA, 653 bp, Cannabis indica
gttttcccaggaagcgtgcgagtaaggacaaagcacgctggaaactcgtgttggtttgtagggtcattgtcagtccataaagcagccagagtgacgtattcgtgtataaaagcaattcattccgtgggtgtaagggcccaatagaagcttgaagcagggatgttacagatctaatggaatatatttattaatactattcagttatgcttatgccacataattttgtaatataatttttatgagtgtttttgataaatgttgaagggtactaggtgtctattatgagatgatataatatatgcaaaagtaatattactattataagtaattgctctaattataaaatataaaatataagtttttaataattattataaaatatatccttttcaaaataataataataataataataataattataaaatataggttttttctaacatgaaatattataaaatatagttaatttgactttagaaacaaatttcaatcaatcattttttttaaaaagaaattaattaagattttattacaggcccactcctgagtgcgcctagagtccacctagctcaggggcccaatatttttttccttttaaaaatacacataattttttttttactgattttgaaaatattatattttttttt

SEQ ID NO: 326717 - DNA, 870 bp, Cannabis indica
ggcataatagtatagtgtcataagtacagggggtaaaaaagataattattctttatttaattttactgttttagtgattgtttatgtactaaactatgctacccaaactttaatatataccaaatcgtgcctctcaaactttgatatgtactaaataatgtcccttgaactttcatccatgttagaatttttttgctaaaattagacaaaagtccttaaatctaacaatctcaatagttcagggagaatttttaacggcccaaaaagtttagggggcatgatttagtacatgtcaaagttcggggagaaaaattactaattagtcatttatttattttaatttaacaaatattattgagaatcgataattaattataacacgttgtatcataaagatagatagcttgtatcacataataatgctcaatgatatgcgttgcttgtttggtttggatcaaattgtgtttgagatagaatgtgaaagtattgttcttaaactgaataacaaattcattctggatactagggcttgttttacataatatttttgttgactattcttagttttagaatatttttataatttattattctcgttctgttaatttggtcatccacatgatatttctagcgtaggtagcatattttggtggtcaaattatcattcttgtattcaaaactctattttggtcgatgccaacaatcaatgaattgatgtactcggcctccagaattttttttacttaagtggttggtattcttattaagagttagtcccacattgctaatgtgtggaaataaattgtgatatataagatgaatgggctactcctcccattgccaattgattttgggatggaacctccttca

SEQ ID NO: 326718 - DNA, 1196 bp, Cannabis indica
ttgatagtattgcactatcaaattgtaataattgttatggatcaatcaagtatatatatatatatatatagatctaattattatatgtatatattatagtgttctatattgtatataattttgtatcttgggattatttagttttctaacatgtggtatcagattgtcatttgtatataatttagaaccttcaatttgtataataactgatatgtatatgttaattttcaccaattacttattaacttcattattattttatgttgcatatttttcatttttcaatcttaaaagcttagggattttgttcatcatgaaattctctttctattgatatcttatatgattaaaattattgagtaaattaaaaataattttatgattaaacctttaggttttatatgttttaattatgaaatcaaatttaggtttttccattatattgattattgacaaaaattgattgtgcaaattttattaccgacttatttgcaatatttttacacaattaatttttcgaattgcatgagatatacacaaaaaaatttgaaattttttggtctcttaactttcggattacacaattaacaaaccaaagtttaagatgttcatacccaatagtaaccagattaggaatgcaaccaagttatttcaaataccacttgagctagacttctgtattcgacttcagtgcttaatcaagaaacagtatgttgtttcttgcattgccaagcaaccagattaggaccaagaaaaatggtaaagcctgatgttgatctttgatcatctggatcactagcccaatcaacatcacaaaaaggcagtgacatcataatctttgggacatttgaagttcaaaccatgtgaaactgtaccattgagatatctcagtattctttttgactgcattccaatgagtatgttgagggttggccatgaagtgacaaaccttgttgacactgaaagaaatttcaggtctggttattgtcaagtactgaagtgcaccaactattgatctatacaactaaggattgtccacaggatctccatcgaaggcagacaatttcaggccactggtcataggggtaggagcagcttttgcatctttcatttgagccctgcacaacaaatctctaacatacttagcttgagacaaatgcaatcattctttggtatgatgtgttgggttttatgcc

SEQ ID NO: 326719 - DNA, 1318 bp, Cannabis indica
aaaatttcttacaaccatatctttgtaattttttgtttagcgttgtttttgtgtatttttaaaataatcccattattaaacctaaaatgagatagaccatgtctagaaaagtcaaaatgatggagtagcccaaaatctaggcccaatatcattggatcaagaaacaatcaaggaagagttggttgtattactcagcccaggaaaaaaagcccaaggcaaccatcgccttctacttctagcctcatctgtgtgaagaaggagaagatgagcaaaacataaatgaggaaggaagagatagccctttggcttcaggacaggacttcgttatggttgagacttgagcctagatgaagattcagaaacgaggttattattaaattttattttcacaataaatcagtttatggtcctatttgtactattttagaaaatatagtctattttgtcatttaacaaaacagacagtttaattagtaacttatacagtgtttaaaatagtatttactcaattttttattaaaaaaaatataacatcaaatttcattgtataacatcaatacaaattactagaatgatatctgcttcttactaatgttatagcaccctcatattttgctaactaagtcgttcacctcaacaaatattttccgaaatttaatcattggagatgctctaaagtgtgtcaaatttacaacatgttaaaagttgtaccaaattggcacaatactatcttgtgccactaattattgtgattctttgacttttataaaactttacatacttcatttaccccattaccattatttaaataataaaaagataagaaaatattttttatttttaataaaatattaaatgactattattaatattttttttttttaacttatttaacaacttatggactgtagcacaaatataaataatagaccatatataacataaatatatatttttgtgtaaaatttagcataccttatattggaggtggtattatatataatataccttagctaggccatctctaaattttgtgttatacaaaatataaatctttacacttaggccctcctaaattaagggttgggtccgccactactgcgccaccatcaaagaatgagtaagctttagcctttggcataagcaggtaagtttgtgggcaaaaatcctaaaataattaatgtattgttgtgcctcattaattttttagcctattaaaaatggtctccgaattattcacaatgttctaaagtagggttgtacatcagtcggtttaggcggtttatcctatatattttctaacccaatctaaagttcg

SEQ ID NO: 326720 - DNA, 1395 bp, Cannabis indica
aaaattaaaaatatatatctataataattaataaacttatagaaaattatttttaaaattattatcatcatcgtaatcactgtatctcatagtcctcacttttcttctcaataagcttgctctctcacgtcaaaaaaataagcttgctctctatataaaaaaataatgaattaactactcaaatatactaaataatccattaattaataatgagaaattagataaaattatatctagctaatcaaatttaaatttaaatagtatatgaattagatattttaaatcatttatttaatttttagtaattatttagtcaaagagatatctacaaacattatagggaaagaaaaaaaaaaaataattagtaaacagatggtattaccgtatctcaatttataaaaaagtacaattgaataattgataattaatctataaaaaataaaagtcatatgattttaaaactaatattatcactgtatatcacttttagtcaccactacaatattcaaaataattatagttaagaaaatattagcaatttaaaaattctcacataaaatagatatttataaaaattaataatcgataaatctatataaaaaacttatcatattatttaaaaacttttacttgtagtcgctatcatcacaatactactaagaactcattatgagaattaaattttaaaagaaaaaatagtattatatattaattaaaaaaaccccgaaaaaaatgtgagagaaaaaaaaaaaaacctaaagaatatggggataggattacaaattacaatagattagcctttaatatatattaaataaaagatccttaaaaaacgtttgatatttaaattatgacacataatatagaacaaaattgaccaaaaaaagaggaaacaacataaataattctagtataaaacaattaaaaaattcaatgtggtagaaacaatttttaccaaaccttctaataaaaattatattaacttattagttctctattcttcttagtactaattaaaaaactttcacatcctatacaaactataaatgtatattgtttttaagttattaagaaacaatatccataaaaaaggaagcgagagacagaaaattcaaaataaaaaaaatagttgaagttttaaaaagaattataaaattaattgaaattgtttatgatacataaaataaaatatacaaatatgcttaactaactaatatgatagtagtgatgatgagatagttggtttttttaccttgaaggccacaaaatatattttcattgattgattccattggtaagggttgattataggtgataaatatagatgaattatgatggcatataagacctgcgtagagaaatatatggtctactttggaatatataatgttatta

SEQ ID NO: 326721 - DNA, 865 bp, Cannabis indica
aagtcattccattggaatgacattccaacattttaatatgcaaccaaacaaaggaataaaatggagatttgattcctttcctttttcatttcatttcattaccttcaatcgaataccacctaagtgttgaagggagatcattaatagctagaacaagaattctacgtctttgtccaaaatacttatttcccctactaccaagcacttagagaaaatatggaaatgcttttagaaatgaagaaattccactacatatctcttttaacttgatgcttttaacttttatcctctttttttaaaaatctattatgtttatctcttttttcaatcattccaccaattttacccctatcacttcacaataatttttattcttctctaatcaaaattttgcccaaactttctcacaaacctacacatccatctacaaagaacaaatttattatgtttgaaattatgtcttaattatgtgagtgtgtgaggataatttaagtgcaatactcataaaaagaggtatatttgaattaaattttatttagaagtaaatttaattaatgtataaaaaaagagtattcttcaatttctccctttagaaatacacaagctcatagagcttctagcttatatatagaagcaagtatatctacaagtgacatggagacctttatttaaagtatttgaggaccacatttgaaaataaaaaatctctttattatatgattgtcactaacagtttaattattatatattgggataaaacgttaaacaagagggttggaaacatgttgtataaattcatctctgttatggacatttttcaaaaactggttccaggtgatagaaaaataaccataaaacaatatgt

SEQ ID NO: 326722 - DNA, 1104 bp, Cannabis indica
catgtcagcatgtgtgacatagttagaggttagtatatacaatcttactttttaaactttaattattgtgtatgatctatgtacatttgaattatatgagcataagaactgaagtgcaagttcagaattggatttgagttttagttaagtttttggaaattgtaaaggtggttcactttcttgcgtttccattatcaattttttgtatttgtttttacatatatagtcgttgaaagagtttatttggttaggctattacaaactatctcgaataaggaaataacaaataaagtgttatattattgttttaggaatgatggaagaagtttgttgaaaaattaattttatgcaaactaaataagaagaaatagttgagttcctatattgtaacgtgatgaataagttcacttctgtatgatttctagtttcagtactagttgtttactgtagttttttaaaacagaatatttggtttatgttacaataaactaggtaaatatttttatattttaaataaaaaataataaaaataaattttcaaatttaaatttttgtaattaatttatttttaaactagtaaacaactcgcgtttcgcgacaaatattttaatttttttttaaaattatatctatgatatgaattatgtattttatgttatctaaataagtaaaattgtatcaaattttaactttattaattttttacactatttttcttttaatattagaagaagttagtgtaggtagactcgatttgtataacaatatgtcaggcttgacccatgttttcagggccaacatagtttataatcacgaattgtttgtcctttgcccgtgccaaagaaagaatttagtgaattgacccattttagtttggtatgtatgtcgcttttgttattatatgagacataatatgaatttatggcaaaattaatacttttctttatttttcaatgcaaattctaatttttgaagcataaataataatttttgtaattttatttaaataatttattttctgaaaaggatatttctgtaattttgaaaataatatatataaataattattaaaaataataaactcaaaaaaatataaaaaaaaat

SEQ ID NO: 326723 - DNA, 1638 bp, Cannabis indica
tttgtttgtttgttaaagctgaccaaatggatcgactcaatacttacatcttgggaacatgataatacaattgagtatgagcgctaattatagatatggattctattagcttctataatgacatagaagtagaatgatgatttcctttgagctaggcttaacaaagataaattgaagagcttttatttcaataataatattagtttactgaaatatcatttatagaaagctaagtgttttaaggataaaatacattgaatggtgaaaatgtaagttttgtccctactcggtgtaaatcatctatagatgatctttgattattttgattataataatggataattaatagcgtatttatatttgaaacatatagagcgttctatgtaatcaggagtgcaatttcgaatctatagtggagtcaagaggaattaataagttaaaaaatttacttgataaatttcaaatctacttattgggagcttgattatataggctcatggtcctcgcactagttgagataatatttgtttgtagacttaattaactgataagaattctaaattagactatgtcttatttatgaactttcactaagtaagggcttaattcagaggaaagagaggattttagatttatttgttaattaagagactttgtaaggtccaattaataaataaattaaattaaattttatttgataattaattataattattaaataaataaatttgacatttatattgaaattaaaatatggcatttgtgaaagaaaaatataagttgttacataaatggcaaaattgaaacaagggggtccacttgtatgggcggccacttaagaggtttacttttacatttaatatatgtgggacaatgttctccaataccattggaccgtatcattgggctaccatcagacctttgtcttcaatctttactcactctaacaacagaaaggcatcagaccaccatcgaactaccatggggcctgaaaaaaaaaaactagttttttgcccaaaagtcatatctaaccattttcgatcctaaatctaatatctacctacagataacaaacattaatcatacaattcattcttttgtcaacattgccgatggtgaagccatagttgatggagaagtcattgggtctgcaatggtcattcggtccgtcggtccttgggtctgtgattggggtggtcgtggagaaaatggaccaaagttgtgggtggtgggttgtgagtcgagcccttggagtgagttcagaaagcgagagatataagggaggaagagagagggtcaagtgtttgaaatgggaggagtagaattgagttttataaattgttagcatattctaacaatacgtgtttaacttaagtttaaaaaaataattttaatctaataaatacataaaaaattaaattcctgtgtaaatttaataataccattttttagaattatatttaacaaataaatatatttctattaaagatattttgattttgatttagttatgaatcatgaaatattaataattataaatctttaatgtttatagtatcatcaatctttaacaactaaataagcactttttctattagttttgtcttttgacatagttttttagtcttgtcttttgac

SEQ ID NO: 326724 - DNA, 936 bp, Cannabis indica
gggcataaaacccaacaccctaggggtatcctccttgatgagttcacattatttgcttgcaaagtacaaaattagtttctaagacttattgtctggattcatcattgggaaacgatatagagatcggaccatcagtctaatttttcccattcctaatagattggatgagaaagttatcgacattgggctagtaaatgggcccggtatttgtaatgagcctctgcatgggatcatgtgtcatctatgcaaaatcacaaataacattttcccctaagtcgttgtggctcaggaataatggaggcttaccaccttcctccatattcgagatagtatccccaaccacgaactgaatcggacttttggtattctatttgatatattgtgggaaaaccttagaattttttatattctattggtgttctccacgtctcaggtaaccattagttgggggcacatgtcgcatagggaaccatacttatggctgattcatgccaacattctaaacgagacaaatgtcatcatttatgagagtttctttgattgtgataagtgcattaatgacacccttttatattctcagattattggatcggtaggatttgtattttctcatatttaatttgagcccttagatcagagatacactaattgtcaaaaattcactataaatatggcccaaagagatcactttgcagttttagccatttttcaaatttttgagttttgagagagagaagttcttaaacccacaaacttattttctagtgaatgttcgatccttttttttgaactctttgccaaccttttaaggattagtgagcagtttatattttgaagttggtccactttcagttgcttcggtgaaccctttgttgaatttttcaaggattccgatgagcttacaatgagactcattagtttttaggtaaaaatcac

SEQ ID NO: 326725 - DNA, 871 bp, Cannabis indica
tataatgctcctaatcttccttggcataggtgattttaatagttatttatttagtagtgataaatatgggggtcgagttagttctaattcttattcctcttcttttgctgagtttattaacaaattttctcttattccccttccttttgttggtaataaattcacctggtataattctagtgttaaagaaagattagattgggctgttgtctctgagtcttggtgtgacctttttcctaataattctttacatcatcttggtttttatggctcggatcatagagctcttaaactagttttagataataattcgtatactgtacctagttttgtcaataaaaggtttagatttgaaaatatttggttggaagaccctgatttttattctactgttaaagaggtatggtctgatcactctgttccaatgtctacctctgggttgcagtttttctttaataagcaacaacagtgtgttaatcatctcaagtcttggggtaaaaaacataattctctctttaagactagaatttctcaacttaacttagaaattgatcaacttcaaaataagatggcccttacctttgaggagtcccgtaggcttggttatttgaagtctgctctagactctctgctgtataaagaagagatctattggagacaacgtgcgagggttaaatggttgaatgctggggacaaaatcacaaaattttttcataaacatgcctcttttaggaagaaaatgaatacaatcaaatttcttaaaactgaggatggctctgttgtgaatactcatgaggggattgtaactcttatcactgactattttcaaaacctcttctctacccaaggcagtgatgtggatgctgcttct

SEQ ID NO: 326726 - DNA, 1695 bp, Cannabis indica
aaaatgtaaaaatgaaaaaaactcctaaaaaatattattaactaatatgatgtgtctaaaaagtgtaggacactataaatgattagtaaaaatatttagtgaaatttttaaaaaataaatatatacatgagtcaaacatttaaatttgtcggactgccatgtcggcatctttaagattatgattctccagtcaaatatgaatgcagttctccaatcatatttctccacgtgtcaactatcagttggatatatggtcaaccctaccctttgaccgcaaaaataataagatcagatcaaatctctctccatgtgaatcatctttggacacaatatttaacccatattggttttcgctttcactttttcaattattttatttttattatttattattatagcactaacacttaaccacaaatacattagttcaaattcgacacatataagaaaatagactgatccatttataaaaaatagactaatccaaataaagcatgatacgagttcacgaagcacggtactaaaatatgaatttacagaccgtgctgacttaccttttaaaatattaatacaatacgatttatatttttttatattattgcgagttttttaaaatatgaaccgagccgacacgcacatatactgtatttgcagctatggcaccacccaaaaataatgataataataaatttaaatagagtaaatatatattttgttttaaattgccaacgtgaaagtatagtgacagtactagcttaattaatatatgcagtattattattttgacccattctttacgtttctaagaaaatatattttaattttatttactaaatttggattatttctaaaagttgtgtattaacatatataacaacatgttcaaagtattattacacatattataagtgagtatgacgtgtcaaaatatgattagtcaaaagagtaattaataataaagaaaaattaaaaattattaccgcgattaattaacaatattttttcataataaatctaaaattaaaatatataacacttaatattttcaataaaatatataacaaaattattcttattaagcacaagtgatacttagctaaagtaacacacattgcaaatagttaacgatattacataataagcatattactatcacgctacatcactataagttgacttactgtgaatagttaaggatactttattgagtaatttgtaacataaatacttaagtttaatttttgattgcagataaatacttgaccatcaagtgttgtcattatccacgtgtcacatgataatatatttaaatttattttttaaaaaaatagtatatttaaattaatttttaaataaaaataaaaaattaaccacctagaccaattaagaattgctatgtgaacattgacttcacttaatggttaagtgccttcgaaagttctaaaaatataacttaagtattatgactgtcaaaaattaaacttatgtatttatctgtaactgaaagtatttatatcgcaaataattattctattttataataattattacattgaatgatatgaaactcaatacttaattaccaatatcacacctcataataatttaatttttccatttatgcatttctcaaaagcaaaagaatatatataatattttcacatccaaacagtactcatttatatatatatatat

SEQ ID NO: 326727 - DNA, 741 bp, Cannabis indica
ttatcacgaaaacgtagaaagttacatataggtttagatttatatgtcctaaccagaatataagttctttaataaattcgctatcacacgaaaagtagaatttgtgaattacattatagtaaaccatagaaagtaggttcaattgaatttaatcaccttaagccttgatcattattaattatattttaattatttgtcttctttttagtagaatttaaacattcttctttattgttattgtcaccaaataaaaattaggaatttaattttttggtaataaactgaagtctttgagggaacgatactttacttattatcatattacttgatttgactacatatacttgcatattagaattttcacaacacacaatacctaagcacgaataaattaacccaaaagcacaacacgttaaaaattcttataattttataataataaaataattataatacatatgtatgtactaataaatatttaaattttaatcattctaattaattttttatatgattatgagtaaactattgttgaacaattacataaaaataattgaaactataaaaaatacatataatttaatgattagtaaaaaaattagtaaaaaagtgaagcatgaattcaactcgtatgagaaaatgggttaacccatttatgaaaaacatgtcagcccgagcaaagcacgacccaaaaatgtgggttacgtaagggtattcatcgaatccaattcgcactatttt

SEQ ID NO: 326728 - DNA, 652 bp, Cannabis indica
attcatgtatatatataatttatgcataaagtgataataagaggaaggaaagaagaaatcaccttccttatattgtttattggaaacacagtagtttaattatacatgtgaaaccaaattattctacattaaaaaagtcaactatgcttaactatccattaattttttgtcatatattctaataatttaaatatttgtataagtacgtagtagttactcctacttaatttcttatatcgtttttaaaattagcctaccttgctacctagccattttattgaaaaagagtattgacagtctaaaaatgcacacgaggcgggaaattggcggagagtgttcctcccgtatccatccctgttaaaaattttaatcttcatccccgtttatatttcccatgagatatgacagagaatcccctaatggaggcggggtcgaggcaagaaatctcctaataaaaaaataaaatttataataaaaatctaaatatataaaaatatttaaatattgtacactaattattatccaataaatttattattattcaaaacacaacttaaaattcacaaaaagaatactaatatactaaaaaaaaaaatacaaacatacattataagttataaaatattattaaaaatataaaataaaatacaaa

SEQ ID NO: 326729 - DNA, 914 bp, Cannabis indica
ttaacgttctatttctttaattaactgtacaattaaaccgtttattttatttatttttacatgcgcgcgaatagaattttggtgaatgacatgatctagttgaagatcacctagattaattatgtgatcttgtaattaataataggattatatattaattattagggactcgttactgttttatttaatttgttgtaaaccttcaaaagttgaaagtttcatatgacgagctttcagagaaatttctatgcttttgaataactaaataaaattagactataagttttagtagaaacatttaattctttatccaagaagtttacggccacgaaacaattttttttttcattaattcaaagataatatagttttttaaaactgacttttgggcatgagaaactgcaactctatataaatgttcatacatgtaaatatagatacaaatctaaataagttataagaaattaaaagaagtcattatggcaaaatcaatctttgttatttctgttatggttgtattaattctacttgtaattccaacaaaatgttactatcctcagccattagaagatggaagtggcagcttgtttattttcggagattctttatatgatgctggaattaataactatattaatactatagttcgggccaattattatccatatggtgaaaccttctttaagtacccatctggtagattttgtgatggccgaattattcctgattttattggtaagttacaaagttataagaaaattattagatacggttataattttctgtttttctatagagatcttttctattttttagttgaaattataattcaattatttatcatataattatactatagcgagttgttggaaattatatgttctaaccaacacactttaagaagcaaaattaat

SEQ ID NO: 326730 - DNA, 1165 bp, Cannabis indica
tcacctgcaagttcactcttaggattttatattgaatgtaacaaggtactttacatttgaatatggttgtccaaaaataaacaccccataggtttaggaacaagcataggcgcctaccattatctttatgacaaggttggtctaaagcagcaaatgatgttcttgactacgaaattaaggagcttctttgatgtgatagtgggtaagggccctacttcgacccatttggtgaagtaatctaccaccactactgcatattgaactctgtctttccccttaggtagtgaacctatgaggtcgattccccagacaacaaatggcgagggagattgcatactcttgagttcatttggggaagccctaggtattttcgagaatctctggcacttgtcacacatttggacataatccatcaaatatttagtcattattggccaaaaattcccttgccttagtatcttctttgaaaggctatttcctccagtatggttgccacaaaagtcctgatgtacctcgatcatgagaagtttggcttcttctttcatgacacaccttagaagtggcattgaatagactcttttgtacattactccatccccgatgatgaattgagctgtttttctcatcattctcttagcttcgtttcggtcagttagaagaagacattgttctaaattatgtgcaatgggggtcatccatgatggactgttgtcgataataaggataggctctcagtctttgttaatgctccattttgctaggtattcaacaggagctacactgagagtgtcagaatcttttgtactagccagtttagctagtgagtatgtgttcgcattctgctcacgcaccactttttggacggagtcgtgcttgagttgggctaaataaatcttttaactttgcttaaatatgctatcatgtttgaccatcgggtttaatactccctaagaatatgattaacaacttagttgtgagtcactgtaaatctcaagtgacttggctttgattgctagtgctaattgtagtcctgctaggagtgcctcatacaacgcttcattgtttattacggtgaactcaaaccgcaatgcatcgcgagtttaaaatttctctagagttaccaagatgagtactacaccagagctatttgttgggttttatgccc

SEQ ID NO: 326731 - DNA, 1263 bp, Cannabis indica
atattgcaactagcgctgcaacttaaattacaacaaaaaatcggatagaaatacctattgcaactagcgctgcaatcactttagaaacccaaaccgtaaatttaaaaaaaaaaaaacagtatatacagcaattcccctaaatttattaattatatctttaaaattataaaataatagttgacttaaaaaaacacaaagagtaataagggaaaaaggaaaaaggctggctaaaataaaacttcacaataagtttttagagatttatttaaaataataaaatttaaattaaaaaaaaattaaaaattttacttttgagaaattaattttgaaaattttatttcttctcccaacaatgaaatgccataatatatgaaaaccaaattttatatcttcaaattgaaagtcaattttttttttttttgtgtggttgcaacttcatgtgctattaattaatatatatagtattttttttagcaacaattaattgaaaataattacattttttttggctgttacataattaataatgtaatttgtgtgtatgtttttttcttgaataaaatatagaaacctcaaaaaagaatgaaaaataaaaaaataaaaaaaaataataatagaatgcaacataaatttgatgaatcgcataaaaatccgtaatcccgctaccaagctcttgctatctttaaagagagagtcaatttggctgttacaaaaaaaaaaatcttaaaaatattaaccctcttacaaaatataaaatatcactcaagaatttgagggagtgcaatttaagaaaaaaccgacaataaaaattgattgattgatattgatattttcatttaccttattaaaagattctttaatatattgcaataaaatgcaattaataagaattagtctcactaaacagacaaaaaaaaagccctattttaactcaattgatatattgttggtaatattttgagagaaaatgaaggatctggaatctatatttatgctgtatatatttatttaatttaagaaattttttaaagcatgtataagtaacgtcataaagcaataaaacaccaaaaattttccttcaaagtaggaccagatcagatcaatgactccctttggaaagttcaaacaattaaaaaagaaaaataaaataataaagccttattttgatagtaccaaagtaaatttagagggagaatgagataaaaaaaacttgtatttcgagaaaaggaacaaaaaaaaaaaaaaaaaaaaccaataaatatt

SEQ ID NO: 326732 - DNA, 1666 bp, Cannabis indica
caattatttattttttagcgacataaatacagatttcgtttttgaattttattaaaataatatttataagtaattgatacacatgtttctgtctagacctaataattcagaatttgggtcttatatcatgtttaagataataacagagtttatacaggcaaaattaaaaaaaattacaaaaataaacatactaaatatttttttattataaaacaaatattattacattttattataaattaaataaaataatgaaatataaaaataaaaattattaacagtaatatatataaaattcatatataattttaaaaataatcttttatttaagtttttactgttattaacaattatgttatagatatgttttagtagaaaaaaattaaagaatataaaactaaaattatgataccataaaagtcatgataaaattataactagattagtcaatattagttacaataataacaaattgaattagtaataatattaattatatacaaatttattactatatattttgtatataaagttgagaatatatatttttaatagttaacaaattgtaaataaattttaattaataaaatgtatataactcgtaaatttttcaaaataaatggcctcagttgaacaatacacaaaattatgagataattgttataagagtaaatagcggcataagtattcaaagttttgagtttataagtgacataaatctaatgtttattttaagcggcataagtgtttgtaaaactgtaatttttttcctaatttgtaagtatagactttattattgtcttaaataggacacatatattgccaaaattctggatcattgggtctagacagaaacatgtaatatcaattatttccaaatatttttttaataaatttaaaacaaaatctgtactgacgaaattggagaaaaattagagttttttacaaatattaggtacttatgctgctaaaaataaacattaagtttataccacttacaaatttaaaaatttaagtatttatatcactatttatccttgttataattacaatagaaaaccatcatattaactaggtagttgtgtagttactcttactatattttaatatgtaagcatgtttatatatgaggtgactaataacaatcacattaatattttgtaaaaattactgattgaactatatgttttgttaaatgacaaaattgactttatatttctcaaaatgtataaataagacattgagctcaatttttgacaattttttttaatataaccaacttgaaatcaatttctagcacgaacagatgcaataaacgtaactagttttgtcataacacttctagattattaaattttattttgacaaaaaaactagttaagagtgttatttagtactattttagaaaatatatggtccaatttatcgatcatttatcaaaacagagagttcaatcaatattttttttttgtaaaatacagggcctagaatggtatttacttatgaatttctaatagtttgtttgacaaaaataattagtaattacacaagaaaataataatttttagtactgaatatttaaagtagaaaattttgagtaattacatatatggaagaggtttcaatggttacatttttattgtaatcatcatggttatattttttt

SEQ ID NO: 326733 - DNA, 1456 bp, Cannabis indica
aaaatctgcattaacagcttggtgctttcattgagagcgttcgtgaaaaaagctaaaaaaaaaaaccctactggtatatataaaaaaaactttctccaaggatgacaacggagagaacgttgacactcctcatgaagaaaccacccaccgtcctaaaaaaagagccaatgggctcctgcaggcctcccaactcacaatctaaatggacaactctttctaggaggacacaacctgattttggcccacgtacacggaccactcgttccaggaggacccaacctaagggtggcccaagtacacggaccacatgttcaaggaggacccaaaacctcagaacaaggtatgaagagcctaaaatgaacattggtagacctcatcccaggccaactggcgaggatggcacctacgatctaacaagatacgtgtacaatcgtcgaattggaatacgccaactggaggaggcaaactagcagaatgctgagttgaaacgtgaggcagtcatggtcagagtggcatagaagaataatacacaaaatcaacttgatcctggagtgagaagaccacaaggcagcctcgcggctcacgaaccaggaggcaggagacagctcaggagaaccctcagaatgcttaggaagaacaacttggggaaactgagggccccctgaaaatgaacaaccaaatggtcagccagaaccttctcatagaaatgagaatagaaggcgaccaggaagttcctcgtggaaatgagggaaatcttgggactcaacctggaccacgtgggtcaccaacgaggcaccgccaatgttcttcctaaaccaatagggaaggggcacgtacaaaccccagtgggggttatacaacaaacgagacctaagggagaagagcgggaagtgaagaggcaagtgttatctcggggcacataagaacccacagccgatcaacacgaggagaagaaagtactcgacataacaacgattgagaaagcacaggaacgagtaagactgcaagtaactcaaggacgaggtccatgtacaggttgaggtccataagtagtacacagtccgtgagtaaaacaaggtctgctagcatttataaccaaccagatctgcgagaacacttaaactagaaaaaatttgacctttgccaacaactcgatccaaagcaaggggatctaatccaattgcgaatagatgagttggaggataagttcagaaggtgtcaagtcggggagcaaggaaaacaatctggatatgactcagatgaggaactcgatgttgggattttatgccctaaataaaactcattacaatacaataagatttgttatcaatagaagattagaaatcatttatatttacatgtagttttcatgtctatggtttaatgtgtacaaaatttgttaagtccataacatatagtaattcacaattacagtgatgtcaacacagtggaaggt

SEQ ID NO: 326734 - DNA, 1724 bp, Cannabis indica
gtaccaaacccaataggaacacgatatatatatatatataatacatatatataaatatttatataatgtttataagtacctctacctcatatatattgtatgagacctacaagctgttatgctgttccacctactagtaggacttaattttatatatcatatatatatatatatatatcaaagatttaatggcaaagtctaaatagtttgactagttacaaattataaatatattataagactttttacattgtattctcaaatttataatttttttacttttttattatgggatagattttttttttaaaatactgtaaattaaagttttacactgcatattatgttaacttttcacggttgtttttaaattgttctattgttgtcttaattattctgctttgttgttttacgtttattttataaagagatagtagttttataaaagattctatataatagtaaaattataaatttttactccaaatctaatatttttataaaaagttgacacacatgttgtttttacttttcttttttctaacacatataattttaaaccaacaattaataaataaaggacactacttacatgatataactggttatactaatcggttgggttggcactaatatttaataatatattttggtaattttatatgtgttaggtagggatacacgtataatctgacatgcattaattttcatgcatacgtaaaatataaataatctgttgattggatttttggccaaccgacgcggagtagtaataaataagatttaaactgaaattgtaacaataaatgtaaataataatactgaaattcgtaataaatgtaaagaaatgtagcaaaatttaaagaggttcagccccaaatattggtaatagcctactctccttgtgttttattaatcatagttgcaaaagtcaagaacatatgctcttaaatgcagagaataataaagtgtttttctctaagtgctcaaaattgcggatccatttcccaagtcatgggtgaccccttatataagggaaaaatttggtgcttctcgcttcaggagtcgcgaccaatgcggagctatctcaaccgtcttcttagttttcagaggtgattgaagtctaatttttgtgataatatcctgctatttttgtgggtttgtaactgtctttgagcttcttgtgatatttgaatatttgaactagccactgacgatgagggtttctcaagagtgtaacacggtcattaaccaccttcaggaatagaagctaatacttgggggtgacacccccgagacccaacacgaggagggtgtgagatttcatctcggggtgaccccctgagacctcttagacgttgagggtagtcatggtgtcgtgaggatgtactcatctacctttcagaatgattatgtccatattggggttagtgtcatttaccccttagactaatttgacctatgagtatgtggtgattgtttatcccacttatgaaggtgttagtccattctttttacttcttggaggcacctacctagctcaaactaggggtaaaggtgaccgttaaacttccattccaatggttatgatcaccactactacaaaaacaccctttagaggcggtttttaagccctttcagcgtcagttttcgcgaaattcgctaccgacgctgatcaaggcgacgctaaagggtttatatgaaccgacgtcatatatacccct

SEQ ID NO: 326735 - DNA, 526 bp, Cannabis indica
agcaatatggtggtctttcatatattaaatcaagtatataaactacttaattaattaaaatcaatcaattctatataaatactttccaaaaataaacaaataaatttcacccaaatcaaaatttcaaatcagatcattttcaaatcaagcaaaggcccataacacttgggcaaattttaaaagggactttacatatctacactaagtggagtaaataattacaaatatacctaaaatatatttatttttataaattattttattaaatttataaaataatcaacttctcttaatttactctaaaatacaaaatgtttccttaataaaataaacaattaaatatatgataccaaattattaattatgatagtaaatagtataaattaggaaagtatgtgactactaaatatcaatattttaattcttatttttgatacatttttgttgtattaaattaaatgtatctcaatcaatatatcaaatcgtaccaaaaaaacaaaaagaataattacataatatatataaa

SEQ ID NO: 326736 - DNA, 1047 bp, Cannabis indica
ttaatggtcttgaacaaagaccaagccaaaaagtaagaagaagaagacaaatttgagtttgggtttgattcatttatggtttaatttttattctgctgtgtgtgttaagtttcaggttcaattttattatgtgtttttaatgtttaaattttagtattttactgaggttctactatttaagtttgtgtttatgagatctgatttttaatttatttatttttatagattttgagaacttgaaatttgatgttgtttctatattgattattgagattgagagtttgatttttaatacaaattaaagtttaccaatttttacaatatgatttttattcttcttttcatatacaaatgtatgtaatatatttgtatatcactttatttcttagagacaattcaatataatgacttgatgattattatacatattatgattattgcccggttttctctcaatatacgtggccatcccgttataagacacgtggcaaatcaggctctcctacctgaaaatgattaaagaagaacaattacttaggtcaatcccctctagagaagtcagtaactatttcgggagctaggtcccaatcatgggaagtcttgctcgccttcctttctgacgaccggatggcatttaacccctccggatttgcagtaccggagatgaattatcagttagcatttaatgcaatatagaggaagcgtctaggaacgtacttgagaggacgtgtcagacgccataaacctatctttcagcaactatgcgataatcaaggatataaatgacgactccatcatgaataatcacatcaatcaagaaaggataagggctaatcccacctaaaccctaggcaacctactacgtcgggtatgcatgccctattttgtaagtttgggaatttgtgcatgcccaaggctgacagttaggacaattgtgacctttcttctttttgacaactgccataaatacccctcgacaaaattaatgaggggatcagaaaaaagaacacagaacattctctgtaagaaacacccacctattaataa

SEQ ID NO: 326737 - DNA, 911 bp, Cannabis indica
aatatagcatggcatgcaggaggcaagattgttattgcctggaatccagaaaaaattcaatgttgacatcctcaaatgcactagtcaattaatgcatttgaagttgacaacaattgaaggtttcaatagtctgctgactgtggtttatgcttcaaacaatagaaatgaaaggaaagtattatggagagatctgtgtgagttgaaaacaaatgagaactggttgttgatgggagattttaatgatattcttgccaaagaagagagaattggccagagggtcaaaactcatcctaatactgagtttttgcaatgtgttaatgactgccaagtggaagatgtcaaagcaaggggaagtttttttacttggtcaaataaataacatggagctgatagaattttttcaaagattgaattatggccaatcagtcatggatcaataaatacaaacttgttgaagctgtgtttctcaatgaaggtatttttgatcacacacctggtatattgactctttaccctaatgtaattagtggaaaaaagccattcaaatactttaaggtgttgaagacacaccctaggtatgaatctaatttgaaggagatatggaggcaatctgatttgatttctatccatgcttaatcataatcatgcccaaaagagttttgaagtccatagaagctatttgtagagctttcctatagaaaggccaagctgtgttttatggtgcaggtgcagtggcttgggataatgtgtgtcagcctaaatctacagggggattaggtatcacaaagctagaaagctagaacaaggcagccatgtccaaatcatttgggcaattgcgaacaattaggagagcttatggctaagatgggtgaatagtgtatacatcaagggacagagttggtggagttaca

SEQ ID NO: 326738 - DNA, 633 bp, Cannabis indica
aaacaaaacaaaaaaaaaatacatgtatatatctacatgtttaaaaagttgtttaatatcatatagctttgatggcaaaaggagataatcagcacatagaaataaaagcaacaaacgtaattcagcatagataattctaatgcccagatcgttgtcatatacctttatatacataggaagaaaaaacctaaaagagtaaatataataatcagtaaaccacaaataatggttgtgtagtctctgtatctgaccttgtgaacgagagagaaattgagttagtgagtagcgagagagaggaagcaactaaggagggttggcacttgcggtgtgagtgtgagaggaagaccgtcacaagggtcgagtcgactgtgagtgtgagaagggagcggcagcttaagctgaaatgagaaagagagggaacgagagagacaggaatgtagcgctacttcagttttttagggtttggatttgttgggcttggccttcgtcttgggtttaggccctgtatgtaacaattaaaaggaataaagattattggggtaagttgaaaaatgcctcttttattcatcaattaattaaatttacctctaattttatatttatttgaaacatacctctttttatatgtattgt

SEQ ID NO: 326739 - DNA, 1363 bp, Cannabis indica
gtaagtgtagttggagtggtgtgtgggactgataatggaaagcactggcaagaggcatgtgctttggttctgacgggtgcatgctgctgcgctgcgctttgcctagctgcctccctgcctttgcagccttcatgtggatagtacgacataatactccacaatttctgatgcaatactatactactctcttttttcctttattggattattttccttctctctctctctacgttttagctcattggcttaatttgctttgtcttctctctttaagccacttccccaccctttgacgacctattctattcctttgactcgacttttcatgtgcccatgtgagttgaaaatctcaaccgcaacatgggcttatcacttttttccttgttgtaataattttattttttaatttactttggtttgtggctaaaaaacaagagaaaacataaaggattgagaattgagatttgagatacaactagttctcgtgcttcacgaatcattactatgcaattgaatttggtttttttggatattacgtacttgtactgtaatctatttttatttttaaaaaacatattatcggtacttactattttttatattattgttgtaatttaatattgagttttatataatttaagaaaaataatactaaccaattaaaaaacgtctcttacagaaagtattagtaatacttaataaatacttaataataattaatgttgttttttaaatatatataataaaataccttcaaataagagaaaaaccaaatgagcatataatggatgttgtgtgctgaatcatggatcgtacacaccttatagtagttttcattccctctgtgcgttatatatttattattctatatatatctatctattctatataaagtgtttatggataactttttttttaaaataattttctattcaaaaataatatatttttttattaagatgtattttaatattaatttttaaataaattaatattacttttaaattttaatcgggtttatgaaaaatttatgggtaataattttctattcaaaaataatatatttttttattaagatgtattttaatattaatttttaaataaattaatattacttttaaattttaatcgggtttatgagaaatttatgggtaacttttttttaaaataattttctattcaaaaataataattttttttatgaagatgtattttaatattaatttttaaatacattaatattacttttaaattttaatcgtataaacctaaccggaaacacaatctctgaaaattctcaataaataactaaccccaaaaggatgagcaaccaatcgtgattatttaggataatcatttataa

SEQ ID NO: 326740 - DNA, 750 bp, Cannabis indica
tttttttatttttataaatagtatagtgacgtgacactgttgttataataatgggtctctctcttaaattctcaatttaataaaaataattaattaaaaaaccgtttattatgtgtaatttatttactattaatccaaataataatagaatagaatagggcgcagcagatccaaagcacagagaactaggccaaccccaccaatcgcacgtgcaactctcctcaattctatattcattttcttttatcttctttcaaaattattattattattattattagttttaaattattctttttctttttttgaactggagttattaaattattcaaagaatacattaatttgtttgttaaaattatgaattatccactccgtttaagcaaagaaaaagaaaaaaaaacgactctcactgaactttatttcttttaaaccttctactgcacatgctttctgtttctttttattgttattaataaattctttcttattgctatcttaaattctctctctctatatatttctttttgaaatgtcaaagtctttctttagatatttcaaattacatgataaaaacaacccatcaaaataaatattactaattagaaagggaaatttgaattaatatgcttaaattatctaataatttttcccctaaatgtaaagttaataaaattggtcatatatgaccactttaccaattttcttaaactacccctctcatttgaaaccctctctcttcctctctct

SEQ ID NO: 326741 - DNA, 512 bp, Cannabis indica
ggatccgattcgatctaaaaaattaagtctaaatatcggctaaatttgaaccaatctgataaatatacaagaaatacatataatggataaaaccgatctaatccaacatcaagtgaatgttgaatcgatcggataactgaaattaattagatcggatcagataataaaatctaaaatccaatatataattggatcagatctgaataggcttaaaaatattaaatgtgatccaataaatacccttagatccgatattgaaatataccaatagcagtgtatcacgtcttgtggtgcttggcaccttaaggtacccttaagtatttcttttattttatgagcattgctatttggcactttaaggtgcctaatactatactgatgtgacaccctataattggttaacagtttatcatattatttatcaaattaacatgtgtaaaacttgatattaaaatacaccaataacgatataatatatcaggtgtgcttggtactttaggtggtccttaacc

SEQ ID NO: 326742 - DNA, 1039 bp, Cannabis indica
aaaaaaaaaatcatttttaaataatgcattgaaaccctacacaatctttattaaatctaatcaatgcctttaaaatttttaaaacaaccaaaatgtgaaagaaccaagaatcgaacccagtacctagcaaccaacatacattccctctaccaattgtgctgtaagaccttttataagaatgtttggaccaaaatttatatatatacatatattatatttttatttttatgtatataatattaattttaatttttcggggcctccaaatttgtggggcctagggcctaggccccggctgccccaccctctggccggccatgatgctaagtcacttgagtaattgtacacatttgttctttaaaaaaaatatattgtacacattatgagaaattataaataataaagtgctatttcaaatttataatgtgtaatattgaacattaatatatgatgtgttattgcaataattgttttcttttttaaaacaaagtgatccatacaacaataataataatttaaggacaaaaaaacataatatacaatgtgttattgttgtcaaatataaaatgttaaaaggtcgaactaagatttttctcataattgagaatttatattttataatgagaagttatgtaataaaatggatatttttttaataaaaaataataacatgatattttgggccttggagtccatgtacctctaaaattaagtattttacctctattaatatgaatagggtaattgaacaaaaatagattttgagttgtttttgtagatactttttcaacaaaaacaaaagaaaaagttgattttaggactaatattattttcaactgtgtattttataaaagttactgattgaactatttatttgtttaaataacgaaaaaaatcttgtattttttaaaatagtataaataatgctctgagttcaattttcgacaatttttttttaatataaccaacttgaagataatttttagtatgagcaaatatagaaaaaataatcaattttgtcataacacctatatatcga

SEQ ID NO: 326743 - DNA, 1539 bp, Cannabis indica
caaagattgcacaataattgaaaaagcaccgtagcgtgccttagcattagggcgttacacataaccccagcttgtacacatcatttgcaacatcacatgcctcaaaagctagccaaatggttttaaaggtctccctttttgcattgtcgaaatggtcctacagtatccgatcaaaatcgcattgtgtattcaattcttcagtcgaggggccaacactcatctttaggtctataatcaaatcgaacttaaactgcccaaatttggcttcagttttactcacgtaaaatcacacttcatcatttttcacctcactgactttcttttccttaataatagttaatgcacaatcaccccagagaatttcgaatcactggtattccaaaaaattctaaagggagttttcttgaccttgtcagtcaacttaaagactttgaacttagcatttattgaagtaaagtatatgttccctctgaaagtgatacacatggaaaatgctcagacaatgaaagaatgagttctagagccatctgtatttacaaataaaagatgagtattacttggaatataaattgcacaaactcgcaaaataacatgtataaatcgcaaaacaacacatataaatcgcacacacgtcagttaaaattgcttaagcactgtttaaagtttatgcataaaaattgcaaataatatcaaatgtacatcgcacaaaaccgcacaaatgtctccaaagtatcgctcaataataccaccacaaaatctatactaattactcgcataaaatcgcacaatgtcgcccaaaaattgccaaaaatatgaacacaaaaactactgtaacttggcatgattactcacacaaactcacatataaatcgcctaatgtcgcaaaaacatacaaaaccccaaaaaagctatatccctaaacccaaattctttcccaaacacaaaaaaatagaaatcaaaagtttaatcatcaacaatttagtttaatcacagattgcgtatttaatggagaaattaaagaaaaataaaaaaaaacaaaaaaaacaaacctgggtccgagtaggtcttgtgaacggtgggggggacggtgatcagagactggttcgagtgattttcgtgggtcgttagggttcgagtgggtctcgtgggttgttggggtcaagtgggtcgagagggtcaaaagggtcgttgggttcgagtgggttggggggttcgagtacgtcctagttcgaatggagggggtgggttcggtgcagtggtgttaatgttggaaccgagagcatgggagaggaaaagagaagagagaaggaagttagagagaatgggttgagttgaaaagagaagagtaattttagaaagaaattgaaagattagaatatctttcctatgtgtaatatttggatttaattaaaaattatagctaattttttaacatggtttatcaaattactcttttattattatatgattattctcataaaaaattatattctttttacccacctacaataaattattatatataaatataataaattt

SEQ ID NO: 326744 - DNA, 763 bp, Cannabis indica
tatcctctctatctcttctactctctatcctctctgagctctttatcctcttaccaacataaccttaataatgatctatgttatttatgcatgttgatattcagctcagctatagttgttgtttttgtttagcaaatgtatgtatgatacttggagctaaccctcccttgaaggattcattaagagacattgggggcatctaggcatagttcagatcaagattgtcgaggggtttggtaatggttaagttcaatgatgaggctacaaggaatgaagttctggaggcaggggtcgttcaatttgatcgaaaaccagtcattgttcgcccttggacaacagatatgaattcgatcaaacttgttcggtcggtaccactatggattcgtctctttgatttgggattgcaatattggggtaataaaagcctaagtgctattgttagtactgttgggaagcctgtgatggtagaccaacatactaaagataggactcgggttcaatttgctcgtgttttggttgaaatggatatcacggaggaccccccgagaacgctgcaatatattaatgagtttggtcaattaatggaacaaaaaattgagtacgaatggctccctgtcaagtgctccaaatgttcaggattcggtcacatggtggctgactgtcgtagggaagaactaatgaagaagaaggctggttcagtaaaagaaaaaagctcagtgcaaccagccacggttgttgcaaaaaaggctgatgaggagaagca

SEQ ID NO: 326745 - DNA, 893 bp, Cannabis indica
aagaccatagctttggttaaggtactctggagaaacagtaaggtggagggcaacctaggagttggagttcaacatgagggctcaataaccagagttgttcaggttagatttttgaggacgaaatccttttaatggggggataattgtaaggaccgcttaacttttagtatggaaattaacagataattagggcttaattatgaaattagatttctaaatatgatttatgaatttatggagatttatttgaattctaggtgtgttatttatgatgtatatgaaaattcatgtttttcatgttttatgcctggaaacattggaacgcagagtttgaacaatataatcatattttagtattttagtaatagcgagacaatataattagacattagcaagtttactttttagcttaggcaagggcaaaatggtctttttgtcctttttatctcttttgtctattagtaagattaattaagttgtgtgtgtgctgattattccattatttttgttagataataccaaaaataaatcattaatccaaaattgaaaagaataagagaaaacacataaccaccttcttttctctctcttgagctctctagcagcaagttgaagttagggttttcttcaacacaatttagagcatttctagcataattgttgagtatccaattcaaggtaaaattcctagcactgtcatctttattttccttaagttttaagttaacttttttgcatgattttagagttagggttctaggattttaagtggtgattggtttggttttctgaagttgaattgaagttagttaagttgatttgagtggagtttgtggctggttgtgaggtttgttcaaggtttgagcttaagagctcaaactttgctctcacat

SEQ ID NO: 326746 - DNA, 1217 bp, Cannabis indica
aatcccccgggtgcttctgaccaggtgcctgtaatcctagtcacaaattccatgattttcacaaatagggttattccatgattccacattcataaaatatatccatggtatttaaaatttagataatcacatagagctcagaatgatctttcctacgatatatagaactctcaaaacggagttcagatcacaaagatatgcattttcaaagttacactcaaatctgcccagaaactcgagggcgggccgcggcatgcaaaagccatgccgcagcacctgggaccaattcccaggtctcaacaacaggggcgggccgcggcatgctaaaggccatgccgcggcacctgggttccaaacccagaaaccagcaagcttacatcgaatttcagcagccaaaacacaaccatttcaccctaaaacttaatcaaactctcaattcacaaattaaagttgctacaaacattagagagttaaagcacatacttcatgcatcaaaatccaacattaaactccatatttcagattgtacaacaagcataaaatcaagctctaaaccaacaaaattcatgctcaagaacttgagctccaaatcaatacaaccctattattttccagcactataacaccaaacaagacatgaattttaaccagaaaatatccaaaaatctctttcaaaaactcagcaatataaccataacaagatcatgaaattaatactcaaatctatcaagattcaacaccaattcctcttacatgaaattcaagagcaagacaacccataacatgcttttaccataataaaattcagcaagaatttcaaataaaatcagtagaaagaactacctcaattccaagcttaaagttcctcaaacaaagctccaatcaatcctcaagtaccaagccttttttcaccaaataaatttgaaattcaaagagagtttgagagagagagggttcgggtatgaggagctaaaaaccagaaattccattatcttattcctcaaaatattatcttttatcaaatatcaattgaaggtcaaaagaccaagttgccccccaagggccataataaagtttatgcataaactgaggggaaaaatgtcatttaacttcacacaacacttatataatttttcatatttaatttttcaaaatattcacatataattgaaatgccaaatatttcaatccaaattgcatttcggacccgaatccag

SEQ ID NO: 326747 - DNA, 1656 bp, Cannabis indica
acgttcttgggggcaccaaaaaaaagagaaaaagggatattttttcaatttgagaaggactagctacccttggtcgatgagagaaatgctcctacttctcccatcaaaagttacttagccgcaagaggtcttgaaagacactcatggcataacgctgaaatgagagggatgcctctcaggagtaagcaaacatttttcaatcaagagggtagcacgatcaagtgctataaatccccctcccatccaagcaaaaggatggatttacaataagagggagaccgctcaaagagccaaaaatcccccaagtatatgcttgtctaccactgcgaaaaatggcttagccagagagtgacccccagagttgctcaaccaatgtcggttacaaagatggcttggccaaagaatgacccctagagttgctcagccaacgctggttacgaagatggcttagccagagagtgacctagggtcactcagccaacaccggttacaaagatggcttggccaaagagtgaccctggaatcgctcggccaacgccagttacaaagatggcttggctagagagtgactccaattcgctcggccaatgccaattacaaagggttcggccaaagaatggtccccaaagtcacttagccaacaccagttatgaaagttattgggccaaagagttaccctcagagtcgttcagccaaggctaagtaaaattgttgctcgacatattggtgcgaagtaaagtgcaaccaagggaagccacccatacaaagggagcactatctcaaaaaaattaagagggtcccacgcctcggcaaggtagatccctcaacttattcagtctacaagaatacttaaaagaattcttgtagactagggggtaagtgttaacccaaaaatcgacaaaatttatttttgagattagtcaacaatcagccacattagtcaagagacatcgactacaagagtcggtcaaagaatgactgtgtaacgccctaactattaggcatgctacccaagacacttaagaaaccctaatcccctaagacgaattactaataaaattagcgcggaaattaaactttatttacaaatggaagaaaagaaacttgtaataaatttaaactttataaacttaaagtttcatgtgtcgggatcccaaaaatattttcaaaatattattacaagttcgttttcactagctgacctaggcggcaaaatagagtcacaaaaattacatcactgatagaccccaacccgcttggtctagtggtgcccgaacatgtacatgcaccgtccagctcccatactcatggctgatcagaaacaactttaccctttcctgcacagtagaccacccgtgagccaagcccagcaagacagtataatatattaataacatatttatcacactatataaatattaatgccattctcatatgcttgtatgacacagacctgcatgttacgctcacatgcctatttatgtctatgtaacgtagacctacgtgttgcgctcacaagtctaaatacaataaggccttagaacagttcatctcggttctagttaccgagtccaacctggttatgccttgaacacataaccctaaatctcaatatactcatatactcagcatggcatacatttacacaacatatat

SEQ ID NO: 326748 - DNA, 1495 bp, Cannabis indica
taataacataaaatattacattatttattaataaaaaagaaattaaaagaaaaagacatactagtacatattatttaagtaaaaaaaaatatgagaaattaataaaatagtacaaaaaaaaaaacaagtaaatgagataatacattttaattattaataaaaagtaaaaagggtataattgtaactatacttaaatatactttaaaaagttacacatgtcactcaattaggaagagagtgtaaaagagagtttccctagcactcatcttattatttaatacaatacgatcccaatacagcgtaccaaacgagctctaaaataacaatatgtaataataagtagaaaaaaaaattaaaaaaaaaaaacaaataatgtttacgtagttattatttcagtggtgttatcatatataataaaataaaatactataaagagaggcccttgccgacttaaaatccagtttatataatccttacactacactagtacactagtgggacagctcaaaacctcatacgccaacaagacatctcctttgtataaaataaagtagggtttttattattattattaaaaaaagacacacatgcttaatataaaactactacgttagctcaaaagttatgaaagagtccaacaacgaataaacaagacatttataagaaaatggatttggcaccattcatctaacagcactacgttaatatcttatagaattatttaaaaattatgagaaattcatacaaatataaattatattaaaaaaattcttactaaaaaaaattatataaaaaataataaattagtaaataatataatcatttataaagggaaagaaattgataatacaatctcgatatctctttattttaaattaccagtattgtattattgaatgtatatgtacgtaagcacctttaatattagaatacgtatgtttaaattcacatgtatgtatgcgcgaatgtttgttcacaattaattacagataatacatattaataagaatttttttttattgaatatattaataggaattaaatttacccatttgttgtcgtatatataactaggcaaagcgcggttttgtaattttttttgtaaaataatttaagtttttagtaataaaaatttaaatgtatagctaactaaatattttatttcttttaatgcacataaccaaataataaattttatatttatctatatatattgttaatatttttttttggacagaattattatcattatattcctagtctaaaaattgttaataatttttttactaccatttaaaaaatataatttttgttatgtttaggtatttatgaaataaatactataatttatgctaaattgaaaggtatgagctgcatgtacctcaataaaaacatgtagtataatgtgtaaaagacttttaatataaaatagtaatatatatatatatatatatatatatgtaaagaaagccatataattttttttaagtaaata

SEQ ID NO: 326749 - DNA, 585 bp, Cannabis indica
tttttatttttattttttttttcgcaaggtacatatgattttttctcttaatatttaaataattggctataaaacatatgcttacaatatgatacatatatatgtataattatatatataaaaaattggttagccatatagtattatgtttttataattgttttcaggcttgcttgacagctactgtatgcagtgcataatgcatttgaggcatggaaaataatatatattttttttttatatataatcatatattattaatagattttccaattaatattttagaattataaaatcagccgacactattacatcaaaagctgtgggctccatatatatatttgactcttaagaattagataatgcgaaaagaaaaataaatcaacatagagaaaaaaaaatattttgaaaagaaaacaagaagaaaatgaattaattaatcactcattttagaaaaaaaaaaagaaacaaaagaaaacaaagaaagaaaaggaccaatatggtatcaagagttttccttttcctttttatattagttttggtttaactatatatataaatatataggggaattactttatatat

SEQ ID NO: 326750 - DNA, 1374 bp, Cannabis indica
tcagaagagggagcttaatatcctcatttgcaaccaacaattttcccatttgaaaaattaaagctcaaaataatcaaaaacaagacataaaaaattaggtagaaaagaagataaaaagaatggagattataaaagaaatcgctcagttcagcgggattatcgacacgcaaagtcctctataaagagaagcctgcattccggtctgttgagcttgaatattatggagtcatcaccgcgatttcaaaatttaaagaaagcaacaaaaataagacaaatttgacagaacccaaaccttgaagacgacgaattgagaattgagggttcatctcaactcaatcgttagccgaaaactcattagggtttcttcacaggggaaaaaggcaagacattgaaaaggcctcagaaaaatcaggtgattgcattttatcagaatagataatcaaacaatgtaggcaatacatgaatgatataacatcaccggcctgaaatgaaacataaataggttaacagggtagaaagaacctctggctaagagaaggctggtgctgttgagccgcataggtttttgatgaattgcttaagcgatggtgttgtatataaagggagctagggtttggaaaggtccgaaaataagcgccatttgcgaaaatgagttttaaccttaagcgaccgatgtgggattttttctcttttattttcacgagttgcgctactgaataaattagataaaaggtatatttgatatgtattatcgataattatttaggtgccgttaggtaatacttttttaattagttttttgtttataaaattacaaaagtaaaataaaaataaatattacagaacacacttttgtttatagtttttaaaattaaaaaacaaaagtggttacagaacgcatttttgtttttcaaaaacaaaatttttaaaaacaaaaattttactttcattttgtgattaaaaaattagaaaacaaaagtgttaccaaacggaatgtgtgttgttttttttaatagaattgtaattttattaactcaaattattcaaatgaatattacataaactacttgaaattataaaatttgaataggtacaaccattacttaatcacgaaattctagtcaaatgatgaacaattcgattagtaaattgtttgataaaaattttaaaaaacattattcaaactagaatgaattcgtctacactctaaaatgcaaaatccaaaaacagaaatcatatctaacaaacttcaaataacttagatcgtgaccaaactgttcgactctaccaccatatcttgtcgtcgtgtttctttcaaccaattcaacatttctttaaccacgataacttcagcaagaacaagatcaaccaccc

SEQ ID NO: 326751 - DNA, 519 bp, Cannabis indica
tttttttttgataaatttaatcaactcaaaaaaagtatttatccaattaccaaatctctagaattaaaacttggtaacttagctgctgagtatagattatattaaaagagatataaaaataattgaaattataattatatatatataataactaataatcattttgcttagtggtcaacttctaatgtatcctgatatatatttgttttatttaatcaatgtgtaagttttatgtctttcttaaaaatttgttattaatttatttttatttatgtaagttataattattcttttaatgcgattttataactacaaacttaaaagttttattgtataatttcttagagcatctttgcatgtcttttttaggataggaaaatagaatcggtggatgccaattattgatatgggagggctggtcagcttgagtcttcgcacaagatctcttaaacttttcttcttctttatttctttatttttttttatatattaaaaaaaatttagaacgtatcttataaa

SEQ ID NO: 326752 - DNA, 609 bp, Cannabis indica
ggttgttaatcaacatacttgtaagtagatctaagatcctggtgaaattaattccaacagtcacgccctctcctcctactcgaggctagacaacgttctcattttcttctcttacttgcttcgaaatgaccaactggttgttgtcaagctggatctccacatcttgaaggtggcgagagcgtctaggcattttgcattaattgcatataaagaaatgacttggcttagtcttgtcattcccctagacggtgccaaactgttgacggtgagaactcgttaactaagttagtggtcagaaaatgcaaggtttcccagaaatttgataaagatgaaggtgaaaagatgtctaaatattcctctctatattgaattcaatatctgagttactccaaatgattttccaaccccttttcacatctgagataaggggtttttataggctgtaatggcctgatgcacaaagtagtcccatggggacaagacatcgctttcccgctgaatgctacaggtgctagaggtggcctggcacccagtatccttgtctagtgtcaaatggtcatcagttgcaggctacaagaggatggtctctaggtacatgcgcgtggtccc

SEQ ID NO: 326753 - DNA, 1708 bp, Cannabis indica
aaggagggtgtggtcgactcccccaggcaagcgacgatctctttggaacgacacataattgctaaggatattgttatagtgagaatttctcacctagaaactcgagatcagactcttataaaaatgacacgtagactcactctccttgaggagagctgagatgtcagtgccacctgagtgcaaaccttgcctaaaccgaattcagcgggatgatgtgaccctgaaagtgtctagtcctattagaatagctcgcatggagcaggaccgaagatccagttgagacttgcatataccaagatatatgcgaggactataaaggtcttcctttgaagaggtaaagatcgctcctatactcagtgagctggtccggatgacccaacaagctcgataacccgataaggactcgcatgtcttaagttatcgacttactgcaagatgtctgtataagtgacttgaatatgacacatatcctaaactcgattagccttgtgcgcatgttaagcctacgagcttatgcgagaatatgaacagacaacttgtactatagaagtcgcatacgttgatgtgtataatgaattaggccaaaacggttcttcatttattgtatttacattttttactgatttaaatgttatattcaatgtacaaacggattgaaaatgaaatcaatctttgtgtaatcaatgaacacttgctttgtgtataaaggagtgattcaacatgaaatggacaagacagtaaacccttgcaacagtggaccaagcacaccgtgatatgactgaaccactatatttccttgtgttctttatatttccaatacgtgtgtgtgttcatagcttgaatactcgccattctaggctgagtactcgcacattttctgtttatatttttattatattatttattttggtgttttctaaattcctcaacaacatttggcgccgtttgtgggaacagaatattctattgatttcggaggaaaagtatcatggccgaaaaccaggtgaatggagataacaacactggatcaatcaatgttggaacaatgaatgttccactcccaggtaatggaacgacacctgtccacaccatcaacggaggagtgggacggacaaccattactcctctcaatttattccctgaaactgtcgctcatgttggagaaacatcgacaccggtgaccactatgggggcagttcctgcctatcactcctattgtggtgtctgaaggtatcatccaattgaccacatccaagtatatgaccttacacgatcaaatgcacgctttgcaggctgaaatcaatggaagggtcaggacccgacgtcctccacgagtaccaaccacacgttcagataacccctaggtaaaaaatactaggcgacgaagtaatagcactcgcagagaacgcaagactggagaagaagaactcgacttgaaccaacaaacatagagggatcaagtcacacaaaactccaaccgtgaagtgccacaagagggggacctagagtgatgcaaccctcgcagtagggctcaaccgcgtaatgaggtaaacgatgtagaatgtcattcttcgtcctctcaaactcatactcctagtgtctataccacgtttagctctgtggaaacaccgcgaggaggaaggtaccaagtgttggaaattattttaccacgatctagatttactaccatgtatgtttcattaacatc

SEQ ID NO: 326754 - DNA, 678 bp, Cannabis indica
atctactaataatcattattgtgatacgaagaactctttcatgataaataatcaaattatacaaattatatttattaaatatttatccacatatgtgatttgaatcaaattacatgtcactaaagtagtgcttagtaaatcatatttggtaattctatattaaagaatattttaatacactattgactttttttattcatatagtatgatcttaattctcttgtacttccttacaagattataacttttctatatgaatatgaattttttttatatttattaattatatttctataattaacatattcatttataatacaattgtattttatatattctttaatatattatatattaaatacatacttttaggacataaatcgtgacacataattgtaaaagttgagtcaaatataattctgatttatttttaagccaaaattagcataattttagggttattagcgacgaaactcccctatgtattaagtttatacacgtaacccttaatccacttctatttataaattcgaggcgtcagttaaatccagtcgtcaaatgctaactagattgccactatgtacacatgtgattgccacaaaaaaaataccaggaggttaagtgtataaaaattaatgagttttctgtgactaaaccctctcaactattattctattt

SEQ ID NO: 326755 - DNA, 656 bp, Cannabis indica
ttgtcgggttgtgagatgataattcgccccaccacgtcccaatattatctaccaccttctctcaactaattatggcccaacttaattgttcacataaaaagttatatggttattatcccacaaaacaaaaggagaagatcacttggattttgatacatatattacatttgtgtgaagtaaatacatattattcacacaattagaccattgcaaatggaaagttgtggatcatttttgaatttgacgagttaggagtattgctaacttgtgataccagcggtattcaacactatgaatttgaggaattagaagtactattaacggactactattcaacactatgagttgtcatatgttttttattttcactttgttttaatttaacaaacaaattgctaatactattcaacacttgttatataatattgtgttattttttaagtttaaggtgttaattaaataagattagaaatgttaaaagatactagtggtacttagttaattagatgatatcacctttaaatggtgttaaacactactgatgtgtaatagcaatgctcactaaataattaaaaacgctaaacagctaaccgcaagatgtgacatgacgttattggtgtaatttaatatcaagttttactacatttcgatttatt

SEQ ID NO: 326756 - DNA, 639 bp, Cannabis indica
tttttttttgtaactataaagattattagatttaaagactttgtctaattttaataaaaaaaaaaatctaaacatagatgaaaattcaaggaacatgatttggtacaaagttcgaggggcatgattaggtagatatcaaagtctaagaagcatagtttagtacataaacaataactgaattaataaaattgaatgcaattggacaaaaaattcttaaaattcaacaatttcaatagttcaactgagaattttagttgtaaaaaaaaattcaaaaaagcatgatttggtccatattaaaatttagcgggtgaaaatcttaattagccttataataaatgtcatcacaaaacaaaaataaaattaaatgttccattattagagataatatgtatccgtatatattaatttaattagagaataatggagattttcattaatataagtaaatcggacaaaatttattatatgatgaaatcgttcaaagaataatataatcaacaataataggcaaactatgccatttaaaataataataaagaaaatcctaacaacttcaactaaaagatcaataagccgctagcagtaatgcatttaagaaaggctaattaggatttttttccccttgaattttgacatgta

SEQ ID NO: 326757 - DNA, 937 bp, Cannabis indica
tgtatcaaaggatttggggattggcacgtcaggcttcttcggagtggggtcatcgtcgaggaggacgatggtggggttggggtctcggtgccattttttcaagagcttacgtttgcgctttctggagacactttggttctgaggtttcaccttcagtttccgactagatggatctccatgaatcgctctcttcctctctgcaatttgagctctcttcttcttctggatcacattaaactttgccatctctctctgttactaaaccctaaaaccaactctcacacccctaatttctgattccttttacttttgttttctgctgctcgcgaggcaaagaacgggagggtttggggctcgtcggcgatgaacaacgatctaaaaccgtggtttggggcgaagaacgagagggtttaggacaaatgagagggtttggggcgtgagagagagagagagagagtaatcgtgatctgaagtgttgaatttgggcatgagttttattataaatggccttccccaacggttttgaatcgtcggtcaaagaatgcgccactgttttaaatcgtggccaatactttacccgacggttctaaaccgttagtatttagtttattttttaaattttttctctacatttattaatcgtcgcctaatttatatgactgtttaaaattgtggcttatagtgtactataggcgacgattttcaacacttacatatttttttttagcaacggacccaaaaaaaagcgtgtttggaaccgtcgcgaattatgctttttgtagtagtggtactacaggtacgcggctactattattcaattccacacatgatacatagatttcatgcactttgattgtgcgtgtgatatctcatcttttggttgtttccactttcttctgcaaatatttgagtggaaaataatgtcatcgattattta

SEQ ID NO: 326758 - DNA, 1105 bp, Cannabis indica
cacttgaccttctccaggcgatgtgggattgcacagtttacccggtatttccccttacggatcacgggactactggctgtcacatgcatactccctagcgcgcgaatgtgggggttttggctgagaaaaaggctccacgcagcctccatgtgcgtggaaactcgatcagcggtgggtgaacttcgggcatgcccttgtctgaagggattttgtccaagcaaggcacctcatgacccctccatgtgcgcgcgttggctagtaaccctagcctaaatattttccaactttaaaaaaatcataactaattcaatttaaattccaaattgagttccataaaggcttaaattaattaacttttcatctactttccagacaaaatacttccagcacgaaaataaaattaatttttatcgaaagttcatagctaacaaacattcatcagttgagcacataaaccaacacgaacacatccaaatcaacaaaatcattgttttaaatccatatttcatgaaagtaaatcattatcatggctctgataccagttgttggaaattgttttaccaggatctagatttactaacatgtatgttgattataatctataatttaacaccctaaatatgaatttcctaatacgatgaaataaacacataagagattaagaaatccttacattaatggcagtggaataataatgtctccttccgttcagatctctagcctttgattcctttctgtagcaaattattatcaagatctaaacctggatcttctctccttcagtttggttaaccatagtcttccacattatgattgagtacttgacttgctatgagtgggatggtactctatcactaaaggctcgaaattgatgaagaacaaggagaggaattcgaaatactaaggaaggagactctcattaactaggtgtttgacaaagaataaaaactagtgtcagataggtggataagaatgagagccatcttactctatttatagtatttcaactagggtttaggatttaattatatagattaaaaaaagacaatataataggcccaaaaaaaaaaaacactaagtgaccgaccatagtagtgggcctcac

SEQ ID NO: 326759 - DNA, 944 bp, Cannabis indica
ggcttaagtccctccgtccctgtgcccgacaccacagagttgaattccagtctaagaccgttgagtaattgaagaataaaatcttgatcagggattgaggatccaacaatggcaagggagtccgtaattgattgcagggagtctgtataatcagcaatggagaggccaccttttttgactatagagaactggcttttgagttgaagaagcttggcctttgattgactggcgaacctttgttcaagcgcacgccaaaccgagtgtgacgatgtaaaattggctacggaagcgaggacttcttcagtaatggaggagcgaatccaagagagcaggagctgatcttgacgtttccattgagtaaaagcaggattaggagcaccggtgatcaatgtaacagggggaggaatccctgtgagcaagatatcatcaagataatgccctataacagtggggagaacctgaggtttccaagagagaaaattagaacgatcaagtttgattgttaatgttgaagaaagagagtgagaaaaagaattccaggaggaattattcgaattgctttgggcgccggttgcctgagtaaggactggagaagccatgggagcttgaacaggatgagtggacatggactccattgaagacgtaggtcaaggcgactaataccatgtagtacaacagaaaagcagagaaacaaaagtgcagaggaaagaaaagagaatcaaagaattccttactttatttcatagctaaagagctgtatttatacaaagaagattgactaaagagagtcaaaatagaaaacaaactaacagaaaagttagttggaaagagcctcaattaactgattacaactgacaaaacagaacaattagttatttgttacagttaaaaataaaatacccatacatgggtaatactcattaagaacatacatatatatatat

SEQ ID NO: 326760 - DNA, 703 bp, Cannabis indica
tctaacaatctttatagttcagatggcatttttcacgaccttaaaatttcagggaacataatttggtacatgtcaaaattcatggagcaaaaatcttaattaacatatatacataatgttaatatatacatgtattaaattcaaggagcgaaaatcttctataagtagtgattcagtattagttattaatattctctaaaaaaaatattttttaataattctcttaaaatatatataatggaaattatgatacgaaaccgttagcatgctattaatactgaatttgacatagtgttgttacacatcagattataattatttgacagagatataataaatttaaaaaaaaaatgtacaaaaataattaattaaaatttgtgattattattatttttttaaaataaataaaaaaaaaagagagagtggtggggataagtgaaaagacaagtcaaatgtcaaatcgagggtctttgaaatcataagacagtcagtgggttgtgctgtcaatccaaaggatttgatttattttcttatttatttatttttaatattatttttgggggcaaaacaacagcttcttttaattttctatctctctctctcaattttaacgaaaccatacaaaaaaaaaaagaaagaaaaggaaagaaacaaacagtttttgtatctttattgttgttgatattctagatgttacaatagt

SEQ ID NO: 326761 - DNA, 1564 bp, Cannabis indica
ggcataaaacccaacacctttttccatttagattcgagctatggggatattatgaattctaggtggaagtactagttgcagtagttggttgttgattcttcttttgtcctacggtatccacacaccttactacatcctcgagcttaatgaatccatctgcccgatccagaaacttagccatcgagcccacatttagtctcttgatatctttcaataattctcccagaggcaaaatgcccccaatagtgctgttaatctttcctcctcagtcagccctttaacttttattttttagtcataccttctaatgtaggccctaagaggttctcctggcatttgcttaacttctactaggtcttctaggtgtgagagaagctaacgggaggaagagaattgtgcgtggaatttggaggagaaagaaatctacgaattaaactttccaggaggcaatttaaaataccattgcttggtggcctcaatgagtgtggccaaaaaaattctacattgagcattgcatctaaccccttactgctccatctacatttaaaagtaattctaatgggataaagggtcttcttttcctgtgtacattttccaaattggcattttgaactttaggggtaggtcaaaagcctcaatctcagttgagaagggtaatccctgtggccaatcgagtatgagatctatgagttttaggctagtcaggccttgtaccatgtttttaagttcatctatttgtgcttgcacaagtggatgaacttggctagcgtggtgaccgacatgtgtcacattgggatctgtttgaacgggatcttgggcttggttatctggctgggcagtaggtggaatattttgtctatttagtccccttctacaatttggatcatttctgtggtcatgcacggtgcctagccgatcgaacaccaagcaccaagttgtcttggtgtttgacttgcttggctaagaggtaggcctaatacctctttataagtaaagttgttcacatgtgtacctcctcccaaggggtagtctggcaaaatttggtcgtctaccgtttggcccactgtttggacttgtggcctttgtttggatggctgaccactacgagtctatgcagtatgaccgatacatacccttctcacccactcagggggatgctagatctagttgctaattgtgtactcgtaacttggtacgcccattctgatcagcgcggtggcctgcttggaacgatcatcaatggctgcttgttgagccctcatgacttccatctttcgatccctccattctatgaattaatgtctttgctcatgaaaggcaaggttaatagctgctccactactagaaaaatccccttttaagtctattaatattggacaagataaatttttcgagtcccttttgtgttggacataatagcctggaacataaaaggggtgtttttctagtgcaacattcttggactagaaaatcatttctagtccaataattttggactagaaaaatattgttggactagaaatatttttctagtccaacaatattggacttaaaaagcagtccc

SEQ ID NO: 326762 - DNA, 1178 bp, Cannabis indica
agtgcttctgctcatcttttatcatcttcttctttaatttagcaaaggttttatagatttatgatttagggctttttatattaaagcacttttaagaatatatttaaatatatgatatatatatgggtgcactcttaatgggtattactcataaatgggtaaaattagaaaaaaaaaattgagtttttatgcttaatttttcattattcgttattagatcaaaatttgatggttggatattttcaaaattaatatttatagttaaatttatttagtaaccatatatataaatatatatttaattttatgagaagtcttgatatttgaattgtaccaatagatatagaaatattaagaggtattttatggttccaactgtaaaacacaataaaagttaatatatttttatggttgtaaattaacattgaattctataaattcaaattaataataaaaaactgttaatgaattatactgaccacatcaaaatagtaatcacatagatattgtgttatataaatatatagatatatatatatataaaaatttggtcattaaatgagggagagactgtacagttgaagaataggccatgaatgcatccgcctagctacacacaataataactccaacttccacaattgattacaccatatatcaaaagaagaaagaaacttattaaagcactcaacacacacccctctcgaaaccataattaccacatccatctaattaccagagctgtgaaaattatatgatcatataattaatatgtataatatatgtatatttatatatacctctctatatatatctgtatatacgtacgtgcttttattgctctcaacacccccctccggccattaattattactactagcaaaactcatgccccccaacactctatatatatatatataatatgtatattattagggccttcttgtaggtctggtcaagaccttcatcttataaaatatgaaattacactgacacagtaatactatacgcacactaagttcttatatatgtcacgacttgactgaaaatgtttacgcatgacgtataatatgtaccatacatcatagaaattataaacaataaaacagacattaatttttaatatttgacttagacaattccttgttgtttaagtaacaaaacgacgttagtcgacg

SEQ ID NO: 326763 - DNA, 896 bp, Cannabis indica
tacatgacaatagatactttcccctataagtatcaataaacagtgacatatatatgaatcaatacaaatatacatttatgttattaaaaaaaatacaaaatatatatttatagtttatatatatgaagcaatgtatatcgattacttacgtactcacccacctctcaacagttggcaggggcctataaagattaagattaaaaataagagattatttcataattacccaaaaacaacaaaaaattaaagtttttacttttttttttttgtaaagagctgcaatatatgtttatatattctcaagtgacagaaattacaaatggactgttctactacttcacaaaaatggataatggccttctatttttctcatgctcgaactatatcaaatagataggtagttatgtacatgtttgtcccaaattattatcgccatcacaaggaagagatcgaaatatttaaatatttatctataaatacaatgaaaataggatttttagtgcccaacacatggttaacatgaagtattcgagtatgaaaatagaggaaattacaaattttatgggattaaattatctgtgtaaaaatatggtttttttttttaaagttatttttcccagctgcgtttgaagatgttttggacaagaaagaatccaataattgggccaactctgtgacagcccacccccaaaacttgtttagacaaacatataatattcgagccgagcctatccagcttaggcccattacattcacaaccattcaagaagcccactctctttgaaaaacgaccaaaatgcaaatgttttatgaggaaattacactctatacccttttgatattgtcctcttttatttttaccttcttttttaaaatctatcatttttacctctttt

SEQ ID NO: 326764 - DNA, 1003 bp, Cannabis indica
gtgaaacttttattaaaaaataaaatatatatatatatgtacataatttaaaatatattatgaaaataaaatttaaataaatattaaaattaatacaaaataatatgataaaaaaaattgaaaaaatattaagacttgattttttaaaaattattttaagcttaatttttttaaaattttagaaattgcattaatcagtttgtaggatggaaataaaatttttcatttatatatatagatggataattattaaaaatagtcattatcccaccaacagttttctcattctatatgtaggaccatcctcattactttcatttttttaaggtttatatgagtttgtacatgttgatagttctataatctattaactcaaagctagctagcttttattttgttattattatttatttatttggtgatgagatgacatagcaaaacttataatctattgtcattgttaaaaatgtgaatattatcaatttaactaaatttataattgagtataattacctggtttttgaaattaaatgcaaacactcccctaattatatctttcaatttataagcaaaaaatgtaaccctacaccattagttagtcaaaactaaatttaataaaatataagagcaaaaatactataagtacccttctacctaattataaatttaaaatagtgtcaattttgtagatttattgatatttaactactacaaaaaaaacttagtttttagtaaattttttatataaattgttactaaaagtcaaaaatgttgtaactaaaatttttagtcacaaatttttttaagctaaaaatttaaattccaataaataaaaattattaataattacaagtaatttttgtgactataatagatattaagatgtcactcttcattggccactaaaaataatcacttaagttaattatattagaatattttatttatggaaattattttctaattaaggaaatgattttctatttaaggaaataaataaata

SEQ ID NO: 326765 - DNA, 1512 bp, Cannabis indica
tgatctgttaatatagtgactcataattttgtaaaggctgttatattatacttagttgtcgtttcagtttataacatgttccaactgatttgctaccttattagtagataaaattgtgattataaagttgattattccatttaaaataaacaccacaagcaaataaaatacacaaatcaaacataaaagtgagacactaaaattttacgtagaaacccaatgtaaaaaaaaaaaactacagagaccgtagtctgatcaaatcttcaactatcaccaatgttcaataatggaattaaaatgtgcttctctagtataactagaggctcacaatagtatcaaaattaaataatcttggatcattaatacaatcatcatcatcatctcaaaagatagatacacaaataaaaaaaaattatgtctcgccaagtaagtattctagaagagtactttagcgaggacaatcaccaaatcggaactggtagattggtagagcgtcttgcaaggattcatttgagctaacatagatgagaatcaaccacttgatcttcaatgtaaagtggcaaaacccactttagctttcttatcttctttcccctttctttttctttcttgctctcttggctgctagtttttcacgacaccaccattagcttctacatcttcttcttctttatgtgtttcttttatgtttcatttaatttgggctttaagcccttattttagtccaagcccactaatgtggtggacccaccaaatctccccctttacctcaattaatgggctcaactacccgctcttcgcctacaagcttttaagcttcccttaggcaaagtctttgtcaacatattagaaccattctcactggtatgcacattttctaagtgcaactctttcatctcaagcacatcacgaatctaatgatatctaacattaatatgcttggatcttgaatggaatgttgaattcttggagaggtgaatggcactctgactgtcacagtagacaatgtatcgttcttgctgcaagcccaattcttgtaaaaactttttcatccatagagcttccttacaagcttcaactatatctatgtattcaacttctgtagtagacaaagcaacataattttgtaaccttgattaccatgaaatagttccccctacaaatgtcatcaagaatcttaaagtggatttcctgaaattaaaatcaccaactatgtttgcgagcaatatctggccttgtacagactatagcatgcattaaactacctattacagacgagtacggtattgaagccatttcttgtttatcattctcatttgtaggacactaattggaacttagcttgaaatgggttgcaagtggagaacaaactgctttagctttgctcatgttaaatctttcaagaactttttcaacataagcttcttgagatagccaaagttttccattcttcctgtcatgagaaatcttcattccaagtatttgtttcactgatcctaagtccttcatagc

SEQ ID NO: 326766 - DNA, 909 bp, Cannabis indica
aaccaataatactgggaaaaaaagtaataaaaaacaaaatcagacagatctgcatgatcaaattcttgctctagtggtttggaatataatattataattagaattgaatcaagactataaaattaagtggttatatatatatatagaaaatatatataagagatatacgaattttacatgacatacattcatatatgctatattctataatgattccaaaaatgaaaacatgaatttagaaaagaaaaaaaatcgttatatgatgagtaaagactaccaagtgatactatccactaagaaaataagaaaaaaaaaaaaagaaattaggcaagaaataacatagaagatgaactagataaggagaaacacaattcaatttactattcagtcataataagagaagatgctaattgtataatacatatttaacaaaagagtcaccatgtaattatgattgtgggacactttgacaaactactcttcttatattttacactttcagaaattaggaaattaaagagggaaagtcgcgcgttgtaggacaaaagttggtcactataagctattgcgatgatatgtcgtcactacaatgttgttgcagtaagccttgtcgttgttgggcaaacatcaaaaatattttgttgttataaggtattaaattagaatcataagttatcgtaaattttaacgcttattataccctaaaagagaaatagataattacaagcactatattttttgtaaaatttttacattcaaatctttttctttttttttttactaattttacggagttctataataacaacacgaaaacaacaagaaaactacataaaagtaataggaaaataatatccaaataacaacaaaaataatatacaagtaaccaccaaaaaaaaaaagaacaaa

SEQ ID NO: 326767 - DNA, 553 bp, Cannabis indica
ggttcattttcttcaataggagatcggttattatcaaaccgtggaatcctaatgatactttcagcaaagaagatgtgaccagagttccaatatggattcaattagaagggttagagctaaaatactggggagagaaatctttgtttaagattgttggacaaatggggaaaccgattattgttgatgcaatcactaaagagagggagcgtttgagttatcctagaattctaattgaagtgagtatggataaaaaactccccgagatgctggaattcgaagatgaacaaggttggaattcatctatatgtgtgaagtatgaatggaaaccttccatttgtactcattgttcggggctggggcatatagcagatgactgcaggaaaggaaaagttgggaaagcagagtggattgttaaagctgatcatagaaaagaaattcaggtggatgaggagggttttaccaaggtagtgtcgggttttatgccctaaataaaactcatttcaatataatcagatttactcattaatatagatcagaaataacatttaatgtt

SEQ ID NO: 326768 - DNA, 1736 bp, Cannabis indica
attttaccctaatcctcctccacttctcacttttttttggatgttaccatcatattactaattatttaatatttaaatgcaattttattattttattttttaataattaagtttgagaatgtgcacatttccctcacatgataaatatatttttttgctaagaatattatttatttgttcaattcataaaataatggtaatttaataaaataaatataatttttgaagagtaaagggtaatttagtcaaaataataaaagttctattccattccatacaataccaaacatgataattcttattccgttgttgattccataggctttaccaaacaaaagaataaaaattccattcctttccattcttattcctattcctattcccattcccattccattttcacttagtaaccaaacgccaccatagtgtaattactaaactatgtaattaccctacctagtaattacacagttacttccaaacacaccttaaattttatctttcttttttgaacaagtattttgatgaattaaatctcattgtaaaattcatgaatgcacccatacccacgttgaagcgaggtgggacagatgcctctcaagaaatagaaaaataatgtatatatattttagttagttaagatatatattttctattaaaaataataatattaaactttggtatggtagttgaatcatacatagtggaggttgttcaaatctcaacaaaagtatatttactttttagtattttaattttttttaacctctttaataagattcgtatttagtattttaattattgaagtaaaatttttattgttatttttttttttacttatatttaatactataaaaatacaaatttttaacatgttatattacttagaaaaaaatagtatgtccccccacttttaagaaaaaaagtatgtcctcctcgacttaaattctgaatctgccaccggatgcacacttcttgaaaatattagagataattctaatttttgcatctcgaattttcaaggtcattgaaaattcttcccaaactattaagatggttgaattcaaggactttcgttcaatcgactaatacatgtttgacgttgatgaaattttaaagggtatattaatacatatcaaacttcgggaaacacaatttaatacatattaaagtttgggagcacaatttgaacagctaaacagaattagacaaaagttacaatttggtacatattaaagttctgaggcatgattggaaatatggacaataaattttacagaatgtaacaaaagtcattcctttcaatcaaacgctaccttactttcttcatagacaagttctaagacaaaattattgtatagtagacaatttcttccctctttggttcattcttagacaacaatgtcttatcttaaagaacttttgctactttcttcactaccataattcctttgagtctatgtctccaaagtgagaatcatctatagcatcgaatttattaatctcttttctttttgattatgtaattggtcagttgaatacaaaagctctaggatcttgaactttctccaatttgatcattgaaccaagctctgttttataggaaataaagctctagtttcctagtttaagaaccttagggctcgtttggaacgccgtattaagtggtattgtattgtattgtattatattgaattgtattttatgtaatatttttatgtaaaactatatgtggt

SEQ ID NO: 326769 - DNA, 634 bp, Cannabis indica
attaaacctataattgtattagtccattataataattctaacagatgacttattattatgctagtttttgtctgaaaaatgctaaatgtcatggtgtgtagcaccacaataaagtttataattaccctacaatttaatattatattttatttattttattttaataattactataaaaaattactaggaatctgatttttattagtgttagacaccttggtaaataacaatgttctttttctaaaactattaacgctagctaactataagaggtaaggaatactaatgctgtaaatacgggtcagacattttgacacggcacgatcttgggagcatgacccgacacaaaaaaaaatgtaggctttggacatgacacaacacaaagctacaaatttgtacaacacgacacgaaaagataagcttaagcgcgcacgacacgatactacaaatccaaaaatacgatacgtaagaacgaatagactatagcccaaaatatacataataataataataataataataataataataataataataataataataataataaccccactcaaaatcttgaatttgtaaccaaaccagagttgttgcgatttctaaatgaaattaaatttcaatatttccc

SEQ ID NO: 326770 - DNA, 427 bp, Cannabis indica
aacttgccaaaaaatgactttacattttaaatatttttttgagatgataaaccacactgtgtgactagttttcttagttgttatggttcggttagatctcttattatgattttgattttatgatgaaatgaaaagtttagtttcatccagtatatatctcatctgattctatcttgtttaattgttgacatgattatgatttatgtattttcttttttgttttatgtgattaaaattaagtattatttatattgtgaaatttattactcttgagcaaaattattgaacaatcaatcatcatgtagatcaacttaggtggtgagatcgagagacaagcatttacttaggtagccaaaataattataaataaggctgttcatccgatccaatccgcacttttttgaaaaaacaacatccaatcagcact

SEQ ID NO: 326771 - DNA, 633 bp, Cannabis indica
tagagaccaaaagagtgctactaaaagcccaaaattaccaattcataagcattaccaagcatgatacacactctaacacaaaattgctcagaatttcacaagcttgaaactcaaggattctaaccttcaaagaaattcccagaaatttaattgcttacccaaaaattaaacatcacaattcaaccctataatctcccaaaacaacaaggatgcatctagcatgaacctaatagcaacaacacacccccaaacaccacaaatcacactatatattctcaacaacatgcaaccataagctaaagaacatcaagaacaccataaatcatctcataactccagaaattcaacaagaaaagatatcaaaataattatctcaagtttctcaaacacaccaaatccaagcttttccccaacaattaactgaaatcacaaatggagagggtgagagagagagggggttggttgagggagaagcaacccagaaaaatgtttataatttccaaaaatatgattttgttgaaatttaattatgtggtcaaatgaccaaattgccctcaaagcccacaaataagcataaatacataaaagggtatatttgtagttccacacacacaaacatcatatatatatata

SEQ ID NO: 326772 - DNA, 1139 bp, Cannabis indica
aatcatgtgaaccatgcaacattcaatattatttctgatctatattaataagtaaatctgattatattgaaatgagttttatttagggcataaaacccaacaggaaccaatgctccttgaggatttgtttctggataatgaatcaggtggggacctcttccaagcaattatgggggagaatttccccttgcgctgaatatcttagttagtctgggtaactaacttcttggaaccttcctttcaacttccataatatctagaagagctcggaggggagttatgaaaaccgatgacgaagttgaagcggtggagcaaactcttgccctaaaattattggtaaatttgtctccatgggaaatggaccagcacaaatataagttccagacttatgacaacctttgaaaatacaagtcataaagaggacttgaatgtgttccaggattgttctggaaccgattgtctatattaggagaaaaactgagccagtgctctgaaggaggttttggtgcttagagctggggttatgtggcgatgggagcccaccttcctttgagatgctactttgcaaagttatgctcggtagacagaggggctccgtacaagtttatttcccaagtgtactgtttgcttgctaggtggtacgtctcgtgcttccagaagaaaaaaggtactcttactccaaaagagatcttgtatttttacgtggtcaaagcacaaaatatgagaaactattgagacaaagttggcttttataggttggagaagtattccaaggactcgatgtgtccagttagtaccgtgaagtacacataccgttagggtttatgccctgaaaatcctataaagacatttttgattatgcataaagagttgatatatgcatgaatgttaaattattaatatctattattgaataatttatataaatatcgaaaatttccttattcatgtatgagattatgatttgtagctgtatagagaactaagatcacttagctatgaataaaccagtcagcaacatattaaagttatagaatctttaatcaatagttcctagtacgattcattgatgcccgttcttctatgcaagtaatctcagttcagattatgatgtagtatgacatctaagtgaaggtgtt

SEQ ID NO: 326773 - DNA, 1077 bp, Cannabis indica
atttgaaaagaaaaagttaaaaacatagtatttgaagtaattcccctttataatattattatatatatttaaaaataaaaattgtataaatattttataaggaaaatacaaattttgtagaatatatattttatataaggaaaatttaatttaaatttaaaatacttaaaatattgtagatatttttaattaattttttaattttgttgttttaattgtgaattaaaataggagacaattccgcttaatcgggcacacaacgttttatcacaatatctcacttagattttatacgtatatatataatcacatttaaaaggcataccaatatagccacaatagctaaaaaaaaatcttcaaatattaaaatctcaaacctcatttattgtatttaacattagctaattaaactattattttctttaaaactaattataagttacatataacatcaatctaatatatcttatctataatataaatgcttatgaaatagaaattgttgtgacttcacaaaatttgttgcgacttaataaattatttttaaaaattctgttaaaaactaatagaagttgtttataaggtatgtgactttttacaaaggtgcaaataaaataactattgcattcttgatacttcacgtttatataaatatatgcactaactcatttttctttaatataattacacgtttatctttcgtcataaaatatatacattttttgttgcaaaaacactatttttctacactaaacaaggttttcataagttagcatattaacttaagtggcgtttagtaacacttttatttttaaattttttaatcgcaaaaataaatgtaaaatttttgtttttaaaatttttgaattttgaaaaacaaaaatgtattctataaacacttttatttttcaattttaaaaacaaaaaataaaaatgtattctgtaaatttcattttatttttttattttgtttcatttttatttaagtcgggtttcagagttgggtctgaggtggcccaagtcggggttggggtcgggattcggtttctaaggtctaagttggggttggagtccaaa

SEQ ID NO: 326774 - DNA, 837 bp, Cannabis indica
aaatattccgacatgtgttttcgagcgtagaaattgactaaaaggttgtaacaagaaattgatggtactcctcatataactataatttgtattatatttttattttattattaaaatgcatataattttgtcaatatatatatataataactatataactataattatattgaaaacccaaaagaagaaattataagaaataaataaaatcaagtagcgcggtccatcactcactactggaatattaattattttcgaaattgtatataaaaaaacttcaactttaattaattgcaattaagtccataatcaatttaagccattctctgaccttttttttttttttgaaattatagcgcttctttgacttgagtagctagtaactagtatcgatatgaatatcatttctatattaaaacatgtaattaataattagtccatattctaatgaaatatatataacatgaatttcaacaatgttaattaatatattgattctataaggtgggacagtactaacgtaatggaaaagttatattatatatatataataaataaactcatattgcatgaaatatagggttgaattagtaatatgtaggatttgaaatttgaatttttaaaatgctaggtagataaccaaccacatgtgatgtaaccaaacaaatctcttgtcttttatttttactagcttgtggttatatctagggtttatatactgttttttttttatataaatttttcttttaaatttacggttttgatttctaaagtggtttctatgtaggttaccactataaaaaaatttacttttaatcacaacaaaatttgtgacta

SEQ ID NO: 326775 - DNA, 757 bp, Cannabis indica
cggcaaataccactttcaataacaacaatctcgtcagtaattttttttcttgaaaaacaactataggagtgggcgagaattttcactaaaaaaatcattgacggataagtcgtcattgatggattgccatgtcgtcattgaacagaccatcaatgaggactatgtcattattgatgttggggcataatgaattttaaagcccaatcaccttcataattttatccatttcagtttttttcttttcatcttttctctgtaagaatcgatcccttcaccatttcgtccatttcatttcatatcatttttttttcaattccaatccgacgattactcaataatattgcatgcaaaatcgaactaatggatcttgaagatcttgacatgggaaaccaaaaatagggttcctttggcccgttaacgatcgaagaagggaaacctcggctacggcaagagtcaaaccgagaaatagagaaagacacacacacacacacacagagattgagcaagagagggatgaaacccttgggtttgggtttccaattgctacgagcaccttggtgtggtacgattggaccactttcactcgggaaatagccgtcgtcgcctgactatcagattcgagagaaggagacaaatgttagggctctgggttctcggggttggaaaacggacacgaggtctgactgggcgtggtggtggagcacgttgctcctggtccgttgctagtgccgcataagcagagagagagagagagaga

SEQ ID NO: 326776 - DNA, 519 bp, Cannabis indica
actaggacccaaacccaaacatggactcagaatagggacctaggacccggacctagatgattgacctggacccgagcctcggaacctagacccgaatcgaaactcgagacttagacttgaaccttgacctggactcgaacccggtactcgaacagagatctagacatggaccgtgatcggaaacccaaacccgaagtcagactcagacttaaaccataaccgggttctagactcggaccgggacctaggacccagacttggatgggggactatgacccgggacctgggcttcgaaattggcatcgagacccagcacctaaccctagacccagaccatgaactaagacccagactaggaactgggatacgaagtggaactagactgggacccaaggctaggatgaagatctggccccacgggttggacctgacccatagtcgatgttttgatctgggacccatacctggactcaaaccgacacccagacttagagccacacccgaaccaagacccagacc

SEQ ID NO: 326777 - DNA, 1093 bp, Cannabis indica
atttttgttgctcaactagtatataaaaaaaaaaaaaaaaaactaaatatgcaactgaaatgcaactaaggatttgtaaatgggaatcttgaagaaacttttttctatttttattctatttaccaacaatcaattgtacagtaatagcaatatatggagaaacaactctaagatatctataaaccaacttaaatatcaaccaatttaatattttcatataactaaccatgttatagaagtttctcaaaagagatttgtcttgtactgacaatattaaacacctacaaatttgataaacaccattattatgttatcagtttgtaataattgatatgtcaagtttcagagcattagcgaaacccttattcaactgtgatgcaaattttctaaaacataaaaaattagaatagtattttcaagtacgtgactctatctatatgtgaattcacaattctattcgtgatttaatatgaacaaatttaccattggaaatctacaaaacaacgtcaatgcaatgggataaacattagctatagtattgattgtttttttttttatgttttttgaattatacctgatttggattgattgagagctccaaatctatttgttagagatttacattttatgaatctcaaaattaattaatattaggaggatcagctccttgctaattaaattgaaattcaaggttgaattttagtttcgaaccagttttttctgctctttctttcatcaatacgaaactatatttttttggattgattccagtcttcttctcaggtgaattagccggaattaatggtggtatttcgcatggtttagtttcgtttaggttgtcttgctgaattgatcgatcgaagcttgtgttggtgaggtttttggtttgtgcggctgaagatttagaaaaaaaaaaatgtaattataatatttgattgggaaacttacaaaaatccttaaatttgggttaatttttacaaaaatactatcacacggaatttttttttcaaaaatactgtaattttataaaacaatagtggaacacaaaacaaaacaattaaaaataatcgtagaacaacattaaaaacttaat

SEQ ID NO: 326778 - DNA, 668 bp, Cannabis indica
taatattgaggatttaatacaaaaggagacatagttttcaataacccaattagactccttctcattgagagcattgatcacttgtctcgagtcactccctacaattacaaatctaacacctaaatccaacgccgcagtgatagccaaacaacaagctgctgcttctccacaaaccacatcaacaaaatccaaccgaaccgtaagagcatgttaatgttaaggtgtaaatcatgataaatgctaaaaggcatatggtgtttggtaattaaattttaagtcatatataaaataatttttaaaaaatatcattaattaattgtaagattataaatataaaaaaatgttagatatcactagtgcccactcgtaatacttgtaaaatattgtatattattattacaggtttcatataattaaatttaatttatgatatgaaaaattaataacaaactataaaagattatataattagatgtttaattagatatccaattaaaaaactgatgagaaaaaaatattaaaatagatcggatacccaacctactcatatcagataaggtctccctccaaatcctaaaaatctaatccatttaagtaaaaactaaattaaaagaagttttatttgcatccaaaaatttataaattcatcttattttaataatttttat

SEQ ID NO: 326779 - DNA, 1380 bp, Cannabis indica
aggaggttgaaagcttggaaactgccgccttggaagttttctatgagttctggaaggcgaacccagagggaaactttgattactcggagataccaaagaggcatatcttagttaccgtacgggtcaggtagccaaagaaagcctcaaggcagctaattcaacagccccgaccgaccagaacactgagaccccagactctaacgaccataacaatgagcctctagcccctactaaccaagctgacccatatagggagcccgagaatcccgtagtttaaacattttcttttttgctgttcggcccatgggcctttattaaagataatatgaccgaccaagtggtctttaaacttggtaatatttcattttattttgagacgactagctgaccgggcagcctttaatcccaagtttataccacgcttttgtcatcttttaaatgaatattttcccttgttttagtaattgtacatgaaaactagtctgttgttttttgagcttgttatttatcttgttatttactaatgctttgtacgggtatagtttccccccaagtgaccgggcagacttatgactcttggtcacttacatttgacaagtatgatttttgtttgttcggctatttgggacgagcagaccttttgtacacaatggtaattcataacttgctaacataattgacaaaattggaatgataattaatatctttattcatttattggtccgaacagttttgttaccgtggtaacttacatttatgacaacaataaatttaaacataaatacttaaggaaaaagttgtacttttgaaagtggtcattcgacttaaatacttggttatttcattgaaacctttgagcggggttcgcccagaaggccatctacttaaaagtaaatgttcttgaattgtgtacttaaagtggtcatccgaccttgtacacttactgggagtacttcctcaaatgttttcctttctaataccttggtactagaatgagctccatattttcatcatactgcccaagcttatatgcccctaattttgtaacttcaccacctgatatggtccttcccaatgaggtccgcgcacactagccgtgctgtcttttgtattcaggaatactcttttgaggaccatatctcccacaaagaatttcctcgccctcacttgcttattgaactatcaagccaccttttgttggtgtactgctaacttaggtttgctgaggctcatttttcttcaatttcatcaagtgattctgctaggagagcatgattagcttcttgatcgtaggtcaatcttctatgggacggaggttctaattctacaggcaacatagcttcataaccatatgccatagcaaacagtgtttgtccaatt

SEQ ID NO: 326780 - DNA, 706 bp, Cannabis indica
atttattaagtatttaatcaagaagtctacttctttttctgttattagtaatagtaatgattattaatgttacctgttagaaacatgattaagatcaatatagatatgcttctattgttaatgagagcattagctttgaaattggttgagtagcgcataatcatgaaggaactgtaattaattaaaaatgattcaaagttaactgtttatggtggaagctctgagagttaaataggttcacagtcaaatatcagaatctttctcatattgttattgaaaatgattgtcaagtagttgttcgacaattggtcatattctctatttggtttgcgtatttctaattgtaaacgtgtactttcttgttaaacaatgttactatattttttgttaaacgatttacaaataaggtggtcaatttttcagttcgtgctggcggttcttttttaggttgtcagtttagtgaaagttttgtccggactgatattttcatgctattttcttagtagatttacaaatttaatgataccgcaaatattttagcgagaaaaaaaatatatatttaatcatacaatgtttgcatataagagtacgtatgcgtttaatattaatatttttagaaggttttattattaataattgaaatgcatatcatataaaaggtaaatactattttggactccgtatttagcaaaagttatcaattgga

SEQ ID NO: 326781 - DNA, 815 bp, Cannabis indica
atttgtgtttaatgggataaaaacgttggacaagagagctggaaacatgctcaattaatttgtatacgtttatgaacgttttcaaaaatctggttccagatgttcgaaaacaaccataaaacaacatacaaacaactattaaacaactgtttcctgagaactcaaaatgtaactcctctccgagttaaatcatttcccaacgtcccaatacccatttaaatgatataattgagtattgtaacagtttctaacagctagaaacttatcccattaattccataactcccatatgtaacaactcacataattacatatttatcaatttttgatccttaggttacaatctatttcagatttgtaactcctcatttgttacaatttatgtgtattattatactataatgatataatataacctccaacacataatatatattaatctcatattaatatataatatgccacattttaatcttcattatatatttgttaaataacaaatatataacaccttcattttcaaatcttcttgtttatatttggttggtctaaggcacatatccaaatactttataggccatgcaccttcttttaaaggcacattacaactgatcccatgcttctcaatctcattaacccctgctaggtagatatttgatttgtcagtgtttacaattattccagagtagcttctaatacgtgtaaatgcttcagcaatgcatccaaccgtttcagccaaagccaccactgggattgtaatgcacctcaaatcttatctggctgcctcataatagaccacaaacttttcttgatct

SEQ ID NO: 326782 - DNA, 869 bp, Cannabis indica
ctttccagtatacattttccaagttgaaatcttgaacttggttggtaggggcaacacatttatgcacgtagagaaaagcgatccttgagccttgtcaagttccagctcagaaagctttgggctggacaggccttgtacaaggctcttgagttgatccacttgtggttgcattgtaggatcaactctggctgtcctttgtttggccaactcttctcttaggttgacaggatgttggctgtatgggttggcaagaattggcctatcctgcgcccttgattgatccttttagggcaggatgaatctatcttgattatttattcttcaatttaagttattacaaagatcttctcctactcgaggacccattctatcaaacacagaatccttgagcctcgagtcagaatgtgttcgagtgtttcggagaagaacgtcgttattgcacccggtgttattatgagttctccaattagtgcactcattaatagggtggctagttgattacggctcaaatttgtatattttaagttcttatttatgcacatataattaatataaattaaatattccttattttttaatagtaaaatttatttaagtggagatatttaatttattttaattttgtgatatttttcagatttgagtacattgttataagcgaaaataaattcttaagccccaagtgtacaaaagcccaacatgaaggaatgactttgtggccttttacttgaagacatacatatgtatatgcacatacatacctacacccattaattttcaatctaaagttgggtttcactttcttaagatattttatgggactacgtgagttgaagccaaatgttgaccgagtccaacacaccaatttt

SEQ ID NO: 326783 - DNA, 1131 bp, Cannabis indica
tgtattgtttttattccgtgcagaaatgtctcagaagataattcaggcttatcccctttggcaaataagtctaagggcggtgagactctgtccaaagagaaggcagcagctaaagaggtcattaatctctctgaggaacaacctgctgtggaccctcttgccttaaaagtcacaaagtccaaaagttcccgaggagggagtttagatggacctgagcaagctaaggctggctacgagctgttcaagagcgaatctgaacaaattagggcccctgccccacctttggtattgtgcacggagactaagacaggaagagacatgctcaaccattatgtgagccagaggtgaatgagtagctgactgaggcagacaatgacttgtcgttggagttggtcttcagaggagttcgaaaggaactttcatgggtatgtcctttctaactcttttcttttattcctctttgactttcgaattttaatgccttttttcagcatgaaattcctgagcgagttttaggttggcaataagggcttcatattctacttcattgttagatgccttaaatctaaatttgaatgcgtcgtgcaggtgctgccccctaggcgtgactagcgtgattcctacactggacagttgatccgtagccgacccgtctacatgcagcttccagcttggcttgtcttcactattgctcggctgaggtacatgtactggctctaggttgttttctggagtgctcttttctttacccgtacattcaaccacaaaatctgctaaggcttcacctttaatcgctgttcagggctaaaagataatttcatattggcccaactccactgcccatttgagcaaccgtcaagaggcatccgatttttgcaatacttgacgtaataattggtcaatgtatacccgaataggatgagcttgaaagtagggccttggctttcttgttcctaggattaggcaataggtgagattttctatcaatgggtaccggccttcagcttcaatgagttttttgctaatgtaatagagcaggtgttggatattgttcttctctctaatcagtacgacacttactgcatgttccgtgacaacgaagtatattcctaatgttggaaattattttac

SEQ ID NO: 326784 - DNA, 913 bp, Cannabis indica
aaacatatatatatatatacatacacatatagatatagatatagagatatataaacataagactatatagtatatggtactatttcacacaagaatgggaatagctatgataataatgaacattttgagtgatcacataataatttgcccatcaaaaagctagctaaggcccctagacaatgactcatcaataacacaaattgagacaccatacatacattcatttatggcacttaataaatgtaaatttacaagtgacaaaattgagaaaatatatttttttaaaaaaaaaaatgtaaaatttatatagaataaactaaatttataaacatgcatataatttttatttagaaacaaaaatcaaaaggggtcaactatctctacttatctcaatctaaatttggtcttaattaccaatactatcattgattcaaagaaaaagcaaaaaaatagaaagaaagaataataataataataagggatagaaaatagatccaattcaaataatttttaattatatgtaataaaataaaaatatacattagtagaaaaaatgattttaattcccgttcttatacataataaacttttaattacttcaatttcaaatttctctcctcaataaattattcaatatttcattattttcaatcatcttttctttctaaccaaacaaacagatatttttctttattttctatacttttctttccctcttttctttaattattcataataattttttttaaaagtaaattttttaaaaagtaaaattttaaatttcagttcttgcacataataattttcaattaaacaactttttagtactccaatatttgaatttcatgagatttgttgaactaacaatataaaatattaaaatttataaaataatctcacttaatttatttta

SEQ ID NO: 326785 - DNA, 742 bp, Cannabis indica
atactactaggcactacatttcgtatcatcctaacaaaactttaatagtaggaaaggaaaaaagtggcttgttggttcacaaatcacaatcgacttaaaagccttgtactccttattcttcccaaactatccacgcttcaagaattttaaatcgtagtttatatatatatatatatataaatatatatatatatactagaatgagtactcttttattcaactattttatgagattagccatattattgtgaaatttgaagagcataggaaaacaaccattctcctcaggatcggaaggattttgctataatttgaattaaatggtattatttggctctactttcacatgcaaataaagtgaaaaaaaatacctgctaggtttatgatgaaatatcattgcttttcgttttggtgcaaaatttgaagtcaattgatgttgaaagtgatggtaatagatttttctttttctaatttcttttcaaggaggcaataaaagagggtggcattgctgaggataaattaacgagtagcgaagtggacgactcgtgaaagggaaaaaaaaagtaataaaattaaaatgtggttttttctctttttgctcctaatgatgagtcggggtctaattttggatgcgggtatgggtttcaatattcatacttgagttaagttaatagatactcgctctatgatatatgtatatatttaagttttaaaatctaaactattataattaaaataattt

SEQ ID NO: 326786 - DNA, 1462 bp, Cannabis indica
aaaatgaaaatgctataaatctttttgctaagatttaagaaaagactataatcgtgaaaaaactagtaaatttggatatgacatcatacaagtttttttaagaatttttatattatattaggatgttaaaatcagtcttcttttttctttttttttttgcaaagaaatcatagtattgtttgaacttttatgtttattctcaacaaattaacagatatatggaacactttttaataggtattgcttattgacaattattgttgccgctgaaaagtggccaacaccagttcgctagatgggtgagatgaataatgtaggtaagtagagtaaatagagagacacacaaaatttatagtactttactccctatgtcgggatggtaattgagctacgtctacttcaagtttttatttcccacgagaattacaagaaaattggttaagtctgaaagctctaatttctagagagagataccctttttctggaggtcaaaaatgaactagagaaactctcttttacagggaagagggtcctattaaaataataataaaatattctaaaaaattttggaaaaatatatttgggttatttttggccattgatgataatcctacgatgaaaataactccggaagtcggtcgtcaatttgtagaacttgagttgcgtctgcgggacccacttcagataagttgcagcttaattttgtaaccctcttgaagataaaatttgaagttgataacttcagaattgcgattgtagtgtaagacatgacttcatagagcattgaaatagcttcgaagtgcaaattaaattacatcaatcgaataattattgagtgatttatggtcattttactaaaggctattctaggatcagtgcccaggttgacatatgatgtcaactaggacggttagtgagtgggaaaacgtgttaggggtgtgtattttttgatacctaagtgacattttgagataacataactatttttggtgttctagtgaagttattcaacaattcttggagatgtcgttgttttgcggaatcaagagaatcaaaattgctaaattatcgagtaagtctcttttctgaaaaagtgactgtatgaagttgtatttgacttgtttggcgtcatagctctcaattacaatgaaaaacaagacaaacatggaaagggaattagaatcagataagcagaacccaatgcactaggtcacctcaacctgcgcgctgcgtgctctctctggagcttctagaaagtcgtttcgatactttcaaggttcttgaaactgaagacgagatctcctaccccattcttgaccatgccgaagagaatgctaaaagcagaatttacatttggatgattgaaaccagtgcactgttggaaattattttaccaggatttagattactaacaagtatgtttgattaacaacctaatatgaattctaaaacaatgaaatta

SEQ ID NO: 326787 - DNA, 2319 bp, Cannabis indica
ctcatctacgagttgtcttagtacaaataaaaattacccaaaatagaggtacataggctttcatttttcagttttttaaagctgtgatgggagtttgaattttcaagttaagccgcaggagtatacaatcaaggtactgttgatgctactattttttcgtgatcgagctggggtttgggtatggcatagtcactcgagactcttaagggggaattagtgatggctaagtcaggcagttttgctagtatagacagcaattaggataaaagaaacgctaagctagattaaaactcaagtatgccagaaagtaaagctgaagtcagattgcttggtagtaattcaagctattcgaatatatttctttaataaataataattttatttttatgtataataacattagatatataagatttctatactcagtcaaacagtgtaatttaattaacaggaatataattacatattacactacatagccaaacacagtttacacatgtccctacaatcatattctcattttttgaatattctctataatcatattattttgaacatctcgtaccaaacacacccttaagacttgttttacgacatagtgtaatatatcacatgtataaattaatttataatagtaaatctaattaagactaattagattgtgatttaattaaaacatatttaaataaaacaattatttattaaaaaacttttattatacaaatttaagttcatgcggatccccatttaaaactaaacaattttagtttacaaacagactaaatatacatcataatattttgtttataataaatgataatattattggtatttaaatttatttattaatttaaaaatgctattcaaattaatataatggaaggtaatataattcaatcctacccatcttttttaaggtattaacattaccatcatcaaaggtacttatattaataggggaataacattttaaggctaaaactctcaaaacaaacaagataatatttcacattatcattcccttactagcattaacctattctaaaaatgttttaatcacaactttaataaattacaattttaattaaatttattattataaattaatgtataaaaacacattattgacatttctaattgattagggtaatacactatgacataaaataagtcccaagtgttacttttatattattattcggatataaaaattaactatatactataaacaaatatagcatagaaaaatatcaaaacccaaatgttaatacatacacagcaaaaatttaatgaaatttaattaacctaacctctagtggagaacccaatatgccatgcactaaaatatgtttattcatataaaataaaataaaattaatacaaggcaaattaggtcatgaataggacaatccaatcccaagggtctaaatttttaatcacaaatataaatatatatatatatattatggggaacattattaaagaataataaatgaaatcataggctaattcttctattgtggtgatttcatttcaatgggaacatcacttatcaattgaaaactatagacagctgcatgcattatttgaaaggctaatttagttatcataaagtctagtttgcactatgtctttcaaaaatattaaaataaataaaaggtttgtatcttttggactctgtattttgtattattttttatttgaactatatttataaaaaaataattttttagacctattttataaaaaagaaaaaaaaaatgtagaagaagaagaaaaaaaaagttaaactttgatctttaaaattgagtttgatcacataaatttttaatataactagattcaaaaaattcattagctaaaaaagccaattaattagctctaattttgataaaataatatagtaaaagttgagtttaaagacataatgttctcaatataaatgtgatttttgtgaggttaattaagatttttgtatttcgaactttaatatgtactaaaatgtattttttaaaatttttaggtcgttaaaaaatcttattgaacgattataattgttagattcaaggattttattcaaattttactaacagatgcccaatgtgaataaaagttcaggagacatgatttggtgtatgtcaaaatttgagagacacaatttaatacatattaaagtttaagaagcactatttggtacatctacaatcatcatgttagtaaaattgaacgaattgaacataaatccttgaatctaacaatctcaatagttttgagagaatttttaacaacctaaaaaatctgaagagcataattataaat

SEQ ID NO: 326788 - DNA, 1102 bp, Cannabis indica
ataccgtataacaaaaaatacatataccatacaccaaaacatatatacaaaaaataataataaaaaaaatatagattactaatatatatatatgtatactatactaaccaaattatataccacaattaaaatatatataccatgaccattgtatataataaaataaaaactaattaaatattatttaaaataaataatcatacaatcaaaaaatataaaaataataattaaatatatgtagcatggcaataaaattatatacatacattaaaatatttttattatgctaataaaattatataccactattatacatatcataataaaaaataaatatcatctaagaataataatataccatacaacaaaatagaaatataccgtacaacaaaatctatataccaacaacccaaaacaactcataaaaaattaaaaaaattgacataactttaaaataaaaaagattttaacaaaactaatatagatataccataatgtttaaataatttgcttctaattctaaaaaaaataaaaaaaaaattaataattttgaaataaggacatttactaacatagtcttatgatttagggtcatttgctatatttttttgaaatgaggacataaactaacatactcctatgatttggggccatttactataatttcccttatctaaacccaagaaacgacattgggtgccagcatggcgaagagtgagagctttagtaattttaggtttaaaaaaaccaatcatgtgccaaattgtcgaggtaaagacaaccccatgagcatcacgtataaccatgcccaagccacagaaaccacattccaagtttaatgtcgcatcaatattgaccttgaaacaacaaccataaggaggaacccaaacaagctcgatagggggaggtggagtaggcttggcttgtccaaccacccttagttgactattctctttgaaacccaaaggaggcctctaataatcacataagaaatcacgggcccaatttaccactaacacaagggacatcaaaaagttattgtgcacaattttatttctcatgtaccaaactctccacatgataacaagggctaactccactt

SEQ ID NO: 326789 - DNA, 1561 bp, Cannabis indica
caaccaaccatttatatatatatatacattattctaattaagtcttatttatattaaattctaaactactttcctttcgttttttttttcttactttataattgttagatggtaatcattataatcctactatcaaataattatttttacactaaaagtgtgtttcgatcaaagggagagcgtatagtgaaaggagaaagaaaatgaaaccaatattgtttgatatgaataacttaagggttcggtatggtatggctctttgtttgtgacgcggagaataatttatgttaaacttgctccctctaatgacgtgtatatatacaattgaaagtcctaataattcagaaaactaagtaattgagttaattgcatatcttgatgaattaaagtagaaagataaatcaatgaacactagatttataagcttaaattctcagcgttggaaacacattctaacccgcttaggttcccaagaaccggataaagtaacatttattataaaattattttaattgcattcactagttctgtttttacaaatcaaacaatataatctgaaatgactttacataagatttacctaactcttaaatacaatcaagacaactgatctaagcatacttagatccaagaagacaagctccacttgcttccaccaagttgaaattcctccagcagatcagtttgaactctgaagatctaatgaattacattatgcaaggtacaatcaaagaaacacagaaaaatattttgccctagtagagcaagaattactcgaagattctatcaaagatgagagttagttagaaaaaagcaatatcagctcactataaatcaaactttggaaaaaatgcctcagctaaataactcaacagctcaagccagttggcaccgacttaaactgaataaaaaacataaatgctaaaaagctaacatggcaaacaataagagataacagacaaagcagataagaccaacttagatgaacaattcaaaagaccgagacagcaactagaaaacaatatactgaactagtaaactaccatataattttccatacagaaaacattgcacttacaatctcgcccttggaaaattatgatcaacgaccaagcacaatattcaggaagagagacacaaaatatcaaaacgcgaaagcaattaccaataaaccaaaaaataataattacacagtttaccaactgacaaagttaagttcaacagacagaaacaaaaacaactagtcaaaaaactgttggactttgtgcctaaataaaactctatttcaatataattttttcttaaacaaatttaatttcattagttgtttaatgtgttatttggttcatgtgatcatttatttacttatttgatttataaatttatctaaatccttatcacactgatattcttgtttattgtgttgtcaacacagtggaaagtaatcaagattgtgtgattaaatgtattccttttatttatcagtgcacatggtttaactgataggataatctgcaacgtagtttacttgcacctaagataagtgctatatcctttccag

SEQ ID NO: 326790 - DNA, 528 bp, Cannabis indica
tatataataaaaactaaaaataattatattcactgctcaaaaaagattatattcaaatttgaattacaattaaaatgctatttgttgatatttcatattttagaatgatttggactatttgtgacttataggtattattttcttcgaattttataggtagcaatcactcattattttatatcttccattgaatttggccaaatatgagttcaatttttatttatctttatttggaaaatagaaatatatattgtcattgttgtgtttgagaaaatctgaattcacttaaaataataataaatacatgactacattaatttttcggttaattaatcgggtggaaaattcaaggtacagtaaatgaagtgattggactaactttttgattagaaatggtaccaaaatttcaaaaaataaatgaaattttttaaaagactattactgtatgtaagttaagctactagagagtcttaaaaattagagtgcctaatatatttattttttttttagtagtaatttagtcggcga

SEQ ID NO: 326791 - DNA, 1425 bp, Cannabis indica
aagccctcttcaactgtgtagtcccatacctacacagtctcagaatcatcaccatgacctttcctaggcgatgtgggattgtacgactctcggtctttccccttcggatcacggtgctttgactgtcacacaacctatattcgctaccaactaaaaccacacgttcttgcatcatatacagaaaaagatgatccattgacttttaaagaaccaatggaagtaccaaaacgactccaggagagtcctagaggaagcacccaggaaactattcgcaagttgggtaatcccaagtcacccgatttcccaaaagagcaaaacctccaagaatgggtgaacaacttcaccaaagcaaaaaaaaaaaaagctaagagatgcaatcatatcatttaaaagtcataaaatatgactacattacgattttccaaatatcagacgcccaggttgacatcggataacttttcaatcacaggattgtcaacctggtcgtagggtcctaaacaaccttcagtaaaataatcatacctcgctcaatactactccaattgaagcaattacaagtgcattagaaagctcttttcaatctctttctacgcatgtatcacactcatacatcaattctagagtttttaagtcaaaaaatagctcctaagtcgaagtgtgatttttactgcagataactcgaaaataatccaacagacacgatctgacgtctaaaaataaacgatcatcatccgaattcaaaatggagcatctcaactcattgaatctcaactcatggtcaaaatcactccagatagaatattcccaaaatattccatatttttgtaatatgggtaaatggcggcaaaactcccaaaattttcattttggtttcacttaaccctcaaaacctaaatttgggcggtaaaacccccaatactcgtgttctgttagcaatttaacacttccgtctaaatttagctgttaactgccaagttggattgtccacgtggacacaatatacacgtggcacaattttattggccgacataaataattatattaaaaaaattaaaaaattaaattaaattaatttaaaattaaaaaaatatataaaaattaaataatttttctttttttttctttcttttttcctttctttctttttctttttctttctttttttttcttttcttttcttttttctttttcgttctgaacatctctctcgctctctcgatctcctcggcaaccccactacaaccgtacactggatctctcagcctaaggtttgcttcatataccaaactattagtcgcatcagctctctggctttctgccaattcctacatatatatataattaattattacttaataagaccacaaaaaaactcattacgaaattaaattaattaccataagcatcttggagatgttgcttgca

SEQ ID NO: 326792 - DNA, 793 bp, Cannabis indica
attgaaatgggttttatttagtgcacaaaacccaacaagaacttcctcagaaaaaaccctcaacctagaataacactcacccttacacacttctccgaactagggaccttatttctttttctaaccttattgctagattttccaacaattgaggcgagtcataacgagaccatcaagcggcccatatgagattgaacaatcgcaagcaaccagcgattcttctataaaccatttgcaagtaagtattctttctatttagaccgctattttctacttttatcatgaaatgggtctcaagtttgttagaaatacacttttttgcacgcgtagggtttagatttaaatattagggttgttgtgtgtgaaatggttcgtacgaaccccgagggaatacctctgaagctatgtctctaccaaggttttttcttagggcctaggtcggtgtgagcatctgttgtttaagaaaagttttagttcagatgcttaggttaagtgtttcttagtttaggcaaatttctagtacaatccccttttctctttttgtttgcgaagggaaaatcaacactttctacttctgttgtattcttgggttctcgattcgtcaccataatagattgctccgtgagggtggccttttttgtgacaagtccgacagggaccactccaccagtttgggagaggccctcctgaataccctatttgtcatttggatatagggtattaactacttgggttttcttttgcttcccattttacagtgtttggtggaaacagttgttgggttttatgccct

SEQ ID NO: 326793 - DNA, 583 bp, Cannabis indica
attttgacaaaaaattagttaagagtcttacttgtacaaatttaaaaaatacagagtctattttgttatttaacaaaatagaatgtccaaataatgaattttacaaaatgtatctaaaataatatttactctaaaaaaaaataagtcaaatgatatgtcgtattcagtattcacaatacgcccctcccttttctcatagcattagatttttataatgggggagtattgaggagatcaagttatattgttctattatgaaaaaagaaaaaaaaagttatgttgtttgagaaatttgtcaataatataaattagtaaaatttacaaaatgatcacatttaatttcctttatgcaactataataatagcataatataaatttatagtcaaaaaattattatagtgatcatttcatagtcgcacaatgtaatttataatcgctcgtgcgaccatacataattattttacaaataaattttcttataaaattattttgctaataactttattataaaatctatttttacaaaatacttatggtgttctaactttgtgaaagaaaaaaaaaatgggattatttcacaaa

SEQ ID NO: 326794 - DNA, 649 bp, Cannabis indica
agagagagagagatccaggttcaaatcttgattatgcactgctacagataggaatcaaggactatagatctgaatggaaggagtcattatattcagctacacccaattgaaggtttcctaaactttatatgtgtttatttcattgttttagaattcatattaggatgttaatgaaacacacttggtagtaaatctagatcctggtaaaatatttccaacatgaattccccaggaccaacggaccttatgctacaaccctttctctgctcgatatcgcaagactttagtatggtgctgacataagccccgatagacctaaccttagattcgatgagttcggcctcgaagatgacattgggatcctgtggggtctttgatttacgaggattagaagacatgatatcaaattcaaggtcacctggggaaaaagaaataatgactttgggtaaaaatattggtttcgctagcagaattgaagataaaaatggaggttaaggccagactgtgtctcgcaaaaaaatgatttttaccctcaaatatctcttgtagatattgcctatggcgacaagcaacttcgtctgggttgcttttattgtatgtcccttaatctttgcatcatttacttcaagtaaggatcgaggtttctggg

SEQ ID NO: 326795 - DNA, 874 bp, Cannabis indica
aaaaaaataatatacaaataattctccttaattaattttgttactagctactctggtatagtagttagatattataagtacgtgtaataactagggtttggaacgattgtgttataattaatatatatatactttgaaaaaggttataattaatatatttatttatatagatcattttatcatagctagcttagctagccacaatgctatatttattattattatttaattaatgtttgtcgaggtattttgttaaagttaagtgccatgcaattattagtcaaacaaaggggctggaatttggaattggaaacataaatcaaaacttcttataaatatatatatatatataacgcaagggcattggcacttggcgccaccaattatatggtttagattaggacctaatttggtaattaattaaacactattttatagagtatctccaatgaaaatgtaaataagtgatgaaaaataaatataattcattttaaaaaaatatgttctattggtattccaaaaagtagtataaatttggcacatagtaaattttgtgctaaatttgaaacaatatttactataatgtaaaatttaaccacaataaatgcactaatttttcatttacatttatatcatttctattaatttattaatatatttaactatcacattaaattataaaatatttatatcatttttttattgtcttacatattaaaataataatagaattaatataagttattagattttatttttttataataaaatatcaattattagatatcaaattttacattaaataatatacctagaatttaaatatatcaccataacttcataaatcataattaaaattataattctaaattaa

SEQ ID NO: 326796 - DNA, 947 bp, Cannabis indica
aagcaggcttggtgcatctttaccaaccctgattccttggttgcttctcttttaagagaaagatatttgaaacacaatgacttttttcaagcttctactggtcataacccttccttttgttggagaagtctcctttggggtagaaaccttctttccaaaggtctggtctggaaaattggagatggtaagtcagtcgacatcactaactcgaattggttaccagatagtagggaattatcttttaaaaatggctgaaatccacctgaaaatactgttgcatttttttttatcaaggaggatagacaatgtgatacgaataagcttaaccatttcttggatgatagctttattcaatccgttcttaatgtccccattgatcctttcaacagggactttctcatttggagacatgacccctctagtagcataaccgtcaactccgcttatcaccttacaaatttttacaacccttaccctagtgtctcaaactcgatttcctttaagccttggtggaaggctgtttggtcatctaatatcccccctaaaatcaaacactttatctagaaagctttccatcatcttctcccctccaaactaaacctcttcaacaagaaaatcctcgataacccatactgctccatttgtcttaaccacatcgactccaacacccactccctattgcattattctagggcaagtaagttgtggaagcagtctaagttccaaccctttttctctaaaaataaattctatgacattaaagaagttttgttaagaggtttcaaagcttttgccaaagatgacttaactgttttcttcggtcttctgtggtcaattcggaatcagcataagaaagttatttttgaacataacaaggctatgaagctagatatggagtcctctgttatttcttttttgcatgaatacaaaaatgcaaaaaaaaaaaa

SEQ ID NO: 326797 - DNA, 920 bp, Cannabis indica
atttggtttaccgttgttatttttcaataaagaattgaggaatcattttttctggtacaaggattgtcctggaattgtaatattctttttttgttttttttacatgtgagagaagaaatattatcatcctgaaaagggtaaagtttttttttcttttgaagaaaacatataaagattatttaatgaaacaaaaagtgtggtgtacatattttgcactgtctattgtacaaattaatcacagtttattatttgtcagattatttctctcctcaatgtttgcagactggatttttctttggttttacttattttctaatttcttcaaaggtacattctaaatgataagacaccactttttgcagattgtcaataaactccactggtatgtacaagatgatgatatggtgaggttttactcattattatattggtatttattttgtatgtgatgctataaatcattgttccaatatattttgaacaaataaattcttttggagaggtacacgttaattataatttgatatgttagtaaaaattgctaggttagacatgtttgtttaaccaagtaattatattgtaataatctaattagagattattgaggagtctcatttacactatccaattccagattgacatgagaaaaggtgtaattatattgtgtaattatcttgagacttgctaaagtttattctatctaaattagagtaattattaacttattgccaaccatgacaatgagattcaaatgtagttactactttatatccaaacacaccatatattttaaaaacaatgtaattactaacatagtaattacataataacttccaaacatgtccttaatttagtaatattagatgagaattttgtaattcccctgcaataattatatttttttttctaatttattttct

SEQ ID NO: 326798 - DNA, 530 bp, Cannabis indica
aatatataacaatagtaagaactaacataaccgaatagttattaagttagttgactcaagataattaattacagaaaactcactttctgttgtgattaatttgaatgagttacaccacagctttcaaagtaatggtaaagtttttcttttctttttttcttgctaattatatatctaaaatgccattttaatatagaccataattaataaacattcaaacttaaattttcattcaattctaatggcactaggcagacataataattttttataaatgttatatatataaacaaacttgtgttataggttaattagaatttttgtcacccaaactttaatatataacaaatcatgtcttataaattttttatcgttaaaaattcctcacaaactattgatattattagattcaataacttctgtccaactttattgactgaagcctcatttggatgaaagtttaggagacaattgataattatcaaaatttgagggacacgatttaatacataaaatcaccacgttagtaa

SEQ ID NO: 326799 - DNA, 579 bp, Cannabis indica
gtgtcaacaacaatcgaagcaaaaagaaagacatcctcagctcagatacccctatttttaagattccaaatgaatttaaccctctttcaaaaaaaaaaaatgaatttaatccagtcccaaacacagataccattgtcacagacaggataaatgccccatggtgaagagcgccacaggtgcagtgccatatcgcacgaaagaaataagtgttctatagattcctccctcaatccgcataagggacatctcatatcctctatctgaaatcttcttccaatatctgatctaacagggagcgccttagataggatacaccactaaagaatcttatgcctctctaggattttactattccataaacttgttccaaagcgacggagccacctcacagtgaccagctctttctgaagcctgagcaagatatgtcgatttacacgagaatcgcccattggactccaaagtccacatccatctatcctctccctgtcctaaggggtttcctccttttaagattgccgaaacagttttctaatcaaagatactgtttaatttatatctttaattatactattttttttt

SEQ ID NO: 326800 - DNA, 826 bp, Cannabis indica
aaggttggaaaaataaaaactcttggcgtgatcaccatatcaaagagggggcattctaaacttatgaagctgatcatcaaattccacctgcttacaagtaaagtaatcctgaacagaaggaacgtgatgaacaatcagtggggacttaccagctccggaggtactagcatcaggagctccagtgttaggaacttggaatgaaacttgggccaggaggtcgcctgttcttttccagcctctatctgaagaaccctccttgaagcagcttcggctttgatgtaggctaactcttgttccctcttgaataggtacttcttgtacctgtcccccgcgaaggcaatgatatcttcccagagtgtcttctcggactcagggttgcgaatgttggggtagagaaccttggataaattgaagtcatctactgaatgaccctctaaaattaacttagccctcctgcaatttgcagtcgtgaccaagtcccctacattcaacctgtctttatcgtaggtggagaaactttgatgtgttggagaaagagttgagtaggggtggtgcgatgcataggagagactctaacccactcagtgagtagctccaggcgctcaatggcttagacatcggaggagaagaaaaatcgatgacgatactccttcatgatctttagaaaattataaggtatcgagccctcgttagaaggatggccgtgaagtttgaaaaaaccgtccttgagtttgtcccctttcttagggacgaataaaagttcgtaaaaataaagaattttagctagactgcgcggggcccagctcttggcaacataaaaaatgta

SEQ ID NO: 326801 - DNA, 988 bp, Cannabis indica
atatatatatatatatgatactgatagggtattcaatcatgtacacgtacacatagatagaggtgacactcactttctaatcgctcaggaccatcaatattacacatttttgaattgaaattatgtggtccagtattatattgattaagtctaactaacagttttattatatttattggtacaattaatatctatacgtacatatatcattatataaattatggaccattttacagtacgtcttttaaattcgatggcaagaagttggtgtttgatatatgtatttatacatataatatatttatattataataaataagagacatttaaactacacagtacacataacatacattattaataatgtatagttaacttcaataacacaattaataaactagtaaatatgtcgagcatttaatataatataatatatataagtgtgataagtgttccattattacttatattgatatggttggaccaagtattttattttattttattttattgtattgtatattatacaatattatacagtgggaagaagaggcatgtcatataggtctgacactccaaaaaagaaatcaatgattggttcatatgctattaacggtataatcattagatgggaatgtctcttgtcaccaaaatattttcatttttatcatgcatgttcatcttaagtcttaaatattttaggtatatatgcacaagaatttaacatttcatatatataccatatggttacattttttattgacctgcaatagcaggttaacaataggtaaaaattccatttttagaattaattaattataattaactattttttaagtaattaaataaatatttaacaaagacctattttagcaattaaaatttttaaataatttttttatttatatataaatcccttgatttaattattttaaccaattaacctatttaattataatatttacatttttttttcaaaaattttaat

SEQ ID NO: 326802 - DNA, 999 bp, Cannabis indica
aaattttaaaataagataaatataactgagtaaaaatgaaataattgaataaaataataaaaaaataataatattgtatagattttaaactttaacttcaatatctaaatacaataaaaattataaagtctagattttaaggtaaacactaaaatatccaaattttaaatacaaaatagtttgactagtaaatataatttatgtaatatattatacacttttataattaagaaatatattaatcgatttaatttggtttattcgagttaattaggcggtttagaataatttgtaaaccacccaatatattcattgggcggtttgaatttttattgtattattttaggttgtattttttgtcagtttatttagtttggtttggacagtttattcgggttgagcggtttgtaaattttattgaacaccccaaggttctactgtaaatttctgtagctgagaaaatggagctaatgggccaagttgtcttacagttgagctaagccactgataaatgaaagggcccatatcattcatttgattacagatttatattcgaaacagcccaccagaagaggaacgtacgaatgaaaatcattcatttcatttttcttctttagtgaaacaaaaatataataaagtaagattgaaaaaaatttaataaattaacgtataatccatgacttctctaagttatttacaagattaagcatgcaatcaatattatattttagaaggtctcttaattatactataaaattaattttaatttaatagttgtttgattaatattcatatatctatttctattctatataaaaatgtcgctatataataaaattcttagtttataaaaaaattattaggtgattttttttttaatataaaaaaaaatgttgcacgtaaagggtcagcatccatgtttaatccacgtaaagtgttcaattataataaatttgttcatattgtttatttttttttatttaaaaattatttttcaaa

SEQ ID NO: 326803 - DNA, 1035 bp, Cannabis indica
gtagcagatatgtatattattaatgactcattaatgatgcttattcctaaagtccaacaacctgaattgattagtgagttcagatcgattagtttatgtaatgtgttatataaaataatctctaaagtttaaataaatagactcaaaaacctgctatcactactaataagtgagaaccaaagtgcttttgtcccaggaagactcataacagacagtgttcttattgcctatgagtgccttcataatttaaaagcaagaaaagttagaaggcgacactatgtagaaatgaagttagatatgagaaaagcctatgatagagtggaatgaaagtttattgagaagatgatgttgaaaatgggtttcaagtctaaatggttcaatataatattgaaatgtatttcatctgttcgttattcttttcaaattaatgattctattcatggtgaagtcatctcaaccagaggattaagacaaggggatccactttctccctatcttttcttaatatgtgtagaaggcctctcattgctaattaaatatgcagaatcaaaaaaataaatttttgggctaaaagttgcaagagaagctcccagtacaagtcatctattttttgttgatgatagtctacttttcttagacgcaaacgagggtttgttgcacacaattcaacaaatcttttcattatattggcgttgttcaggacaggtcatgtcatgtttggtttagtaatttataagttctttataccaaaatatttgatatgtttatttaataaataatctagaccttatgggatgtctaattttatcatattacctcgacttatgtgttctttattttgattcaggttataaattttaacaaatctattctgtgtttcttgtctaatactcctgagaaaatgcaaaaactttttgcagaagccttgaatatgaaaataacacaggctatataaaagtatttgggccttcccgtgataggaggaaaaaacaaaagtacaatattcaaaccaatcaaggataaaatatggaaaaa

SEQ ID NO: 326804 - DNA, 550 bp, Cannabis indica
gtagcgtgccttagcattagggcgttacaatttcgttctccctcccgatctcgctcgtccgctctctctcccagccacgatccaccaccacgcgctcccgaccacgatccactgccaccaccaccacctccacctcctctgctctctctcgctctccctctcctttgttttctctcgctccttccctctcctccgatctctcgatctcctccgtcccttctccctctctctcttctctgatctctctcctccattctatcctccacgagccaccgttcccaccaccgttcgaaccgagctccaccattgtttcctcaccaagccgatccaccaccaccaccacctctgccacccaccgctacccaccacctccgatatatatttatatatatttatttcagatttatttatacatttagaatttgagttacattaatttttttaaggtattaattttagatttaggtaatagaaaaaatatttggaaaaatattttagaatagaattttttttagaaaggtttaggtaataaaaaaaatctttttttttt

SEQ ID NO: 326805 - DNA, 882 bp, Cannabis indica
ttttttattattattacggtgcacaggtcacatccttacaggtgtctacaattccagagtggggtcaggacccgtatataaatattttggcattaaactgatcatttctttctctttttttttcatttattaaaagaaaaagcaaaagtgtgcataggtttgaaatggatgtgtaactacattaattcgttggtttcgtttccaaagtaggagaacttattataaatccaaaaaagaataagaaaagtgttgtttgtgagggatgggtgggagagtgaaggtgagccacgaaagggtaaagagtgatgtagcgatggagcgtaaggattgaagccacgtagtagaagaagaaggaaggaagaaatatttggtggtgtgtggtgtgggacttgaccaagacccgggtgggaaggggcatcgtatgttcaaaagtagttgagagatgagatgagaaaaaagggattatgggaatcttataaagattgtatgaaatcacgtgggccttagccccaccaccaccacccacccatgccatactccctccctccctgcccctactctcctctgcccgtacggaattttccccatctaatactgtaattttctctccttgtggggacgctcgctctcacattttcttgtctaatcttaactgttgattacttatctacgtgttcatgtaatctctaatatctccaaactctaactaatttgcaccaaattattcgaggcctaatcaaataaatttggtgtgaatgatttagtcaattctgaccgtttaaaatatttttgattcggttttgattttagaaaacttagtagtagttcaaactaaaccaatctttataattattttatatatacttaatatatatatatttt

SEQ ID NO: 326806 - DNA, 1265 bp, Cannabis indica
caattgcacaacttgcacagggttaaggagtaagagtcaaaggaaacgtgatataatcccaattcaagtaccccgaggattcatagcacctcgtacccagatcacgttatttggagaagatttgtagtatgtggtgttgtgtgacttcatcggcaaccaatgaatactttttgaaatgatgcatactcttctttagtctaatatatatcaaattctagtgaaatttttataaaacactaatatttaataatttaatttgagaagaatcttcaagttttacgatagcttctcaatgaatggtatcaacgatgaagagcacaatgagtctttttagaatgcatcaaaatgattggctctttagttatcatcgacaaataacaaccacactaaatgttatttattccctgaaatatcgagtaaacactatttaattttttagtgctaattgttttctttattataacttgaaattatttttatactatcttacttacaccccaatataattttttagtgtgtattggatgctagagatcgttgcgtcgggaaaaattattcatttagaccctatacgtggccacaaagttctcccataaattactgcaatgttggaaagataataatttaattattttttatgtaaaaatttttttaattagctaatgaattgaaatgttaatataatttttaaaacagagcataccaaattataagggcatcaaatgcgtatcttgggccgtggctaggaattttactagcaaattatccaagagaacttaaaaatcaagaatgaggtttttatgttttgaaatacatgactaacatcgtcgcacgtacaaatcccaatcattatacaccctcccgaaagattgccctaactcaaagaattatttaagtaaaatataagggggaataacgtctgggagggtgactaagaccaagataagtgtttggtgagaaaggacagcgcggctgatgagggcatgaaacgtacatgagttgcatatacatgcctggggaaaagatgcatgttagaaaaagggtgtagagaaaaatctctaaaatttatttaattttgtgaactcgttttggtgcttgtacataatgaacaatatctataagaaaaaatatgcacggtaaaggttgggataccacatgcgtgagggaaatttgaataaccctccacactaaggaagcaattctttgccaatacatttagggttgtatataaatgtttgtaaattgtccaacaacctgcccaaatc

SEQ ID NO: 326807 - DNA, 1001 bp, Cannabis indica
atcaccaaacaacttgtgggtaataatacaatcatacaattattttcatctaaaatttaacaccaaaattaaaaactactgtgttagtttctaatgttgaaattttagacctaaaaaaaaaaaagaaatcacaaattttccgagtacagtcacaagagtgaagaataccaatttagagagagaaagagtatggagattgataaaaccaatcattctagttctacacataaaataggattatctttattatgcataattcatgagtcttgcaattcaaaatgataaaataatatttagtcgtaaatttaaatataaacaaaaattaattttgatcatttatgattaaaaataaaaaaaaattataactaaatataaattatcatttttgatattgttatgactaaaaaatccgtaacaaaaagtattagtcagaaaaatataatttgttgtgactaaatgtatttttagtctcaatacttgttgtgactaaactaaattagtaataacttgtgactaaactaaactaaattctatattctagtcacaagtaattttttattttgactaaaaattacatttagttacaaaaaatgaatgtttattgccaaataagactgagttatttcttccataccacaaccaccaaatggttgtcatcattaattcaaaaacattacgagataatctgtcaaaaaggaatagaagaatttcctgcattggctcatatacgtacacagcgacggagcaccgactacaaccccaactgataccacactggaatcaaactagaacagaaaaatagagcatgctcaggaatttcaacttcttctccgcataatgaacatcaaagtcgtacctaactttccaagagatgagttgtaacaagcatatctccttaaaacaagtatactaacatatctccttaaaaacatattgcaatctagttgtaacttcgaacgtgttgtgttggcttggtctatatttatttgtatttttttttt

SEQ ID NO: 326808 - DNA, 749 bp, Cannabis indica
tgtcaatcaacatctaatccgcaagtacggatatccgcacttatgtggattatactatattgaattggatcatgcaaattatattggatcaactatttcatgaatacctctagtcgttgattatttaaaataaattttaggtataacattgaaaaaacccatatatgattgttaaaaagacaattgttggcgtttgataacacttttatttttttaaaattttctaatcacaagaaagaaagtagaatttttatttttgaaaaatgaaaatgtgttttataatcacttttgtcttttaattttaaaaacaaaaaacaaaagtgtgttatgtaaagttcatttttatttttattttttgattttaagtcagatccgggtcgagtctggggccgagccgaggtctgggatcgggaccaggttcggggctaaagttcaggtcggagctctaggtttggattcggggtctaggttagggtctctgtccgtggccggggtcgaggttgaggtcggggatagggtctggggctggggacgaggatggggtctaaggctggagtttgggtctagactgggggttgtacccgagttcgtgtctcggtctcagtctgggtttggatctaggtgtgatccgagtagttcaaaatattaattaaaaaaaatattcaaagtgactcttttttgtttgaaaattttgattcttaattagaaaaaatttaaaaaattgaaattaaatttaaagaatatatttt

SEQ ID NO: 326809 - DNA, 712 bp, Cannabis indica
ttatttagtgatagtctaaactgtaaaaactgcataaatcgcactgcaccgcacaattttttgcggtgcggtttttgcgattttttagtttcgcggtgcgggtgcagtttgagaaataagaaaaccgcatgtgcggagaaatttaaaaaaaaaatagtcaaaaattgcaccacccgcactgcaaacacccctataatttattggaggtttttgtttttttttccttattattattattaaaacaagttaggtatgtgtttaaattttgagatgtacatatctctatctttaagaaatatgataataaattgctatgggaaactgagatttagctatgaattacatttactttcttgaaatgtggaatcttcaaagctatatattttaatgcatatcaaactactccattattttaattttggtatgcattatataaaaaaataatcagtacacacaaatgaagagaaagctaaaggacctcaatattaaaaaaagtacataaacaaaataatttttaaataattataataataatataatcaaatttaaacacttcatagcagcagactctactgttattcactacaagaaaaaaaaaatacgataaaactcaaaaagtataattatatgtattttaataacactttagcaaatgttaagacaatctatatataattaaaagtatagacatttaattacattttttacatgt

SEQ ID NO: 326810 - DNA, 1181 bp, Cannabis indica
atacatggtaccaaataaacattattaaaaatacagggtaccaaacttgtatttagataaaacacagggtaccaaatgtgtagacacccttttatgtataacttatgtatatgcataatgcacatatagttacttataatttacaatattattagagtaatttgcgacatatatacctaagttaatttaactctcagttgcaaataataatataagtttaattattttgacagtaataatacataagttatttttgaaacttgtagatatatatttgactattaagtgtaattaagtaaattgtcacgtgacaatcactaattggtctaggtcattaaatttttattttaaaaataatttaaatatactaataagaaaatgactacataaataatgacttacacttaacagtcaagtacctacgaaagttttaaaaatataacttaagtattattaccgttaaaaattaaacttaaatatttattagtaaccgaaatttaaatctaagtatttagactgtaaattatttatattattattaaatacttagttgtgttcaactatttgtgatttttcaattttgcaagagtaggtgatcttgttgagtgagtgataaataactaacaatcagacctaattaacgatttgatgaaatcaataatgtttatggatttaatttattttgacgaaaagttatttacataatctattgtagaaagtttagtgtgactttccaacttatagtatcaaagttaaaacgtaaacgttaacgtttgaataatcctcccaaaacttcatttattacatggaatggtatatgagaaataaattaaaaatgatatatgcatgcttctcggtagagaaattctaaacaataattatattgttattggtcaaatttaatattctacttgttttattttgataaatattattaaaaattgttatatcaattataaaataacaggtgaaactgaccactctaactaaaattattaagaccgatcttaaggtatttggaataattttttttggactttaatttatgtacaaatactatttggtctagtaatattaaataaggttatttggtatattagtaaagatcatttaaaatttaaggagattgttaggctatttttagcctatgttttggatctaatttatgtgcgtttttagct

SEQ ID NO: 326811 - DNA, 931 bp, Cannabis indica
aattaaagtttaacatagtattatataaaaatatgatatataagacaatacaatacaatacgacctaatacgacgttccaaacgagcccattgatcttctaagtatttaacattttaagataccttatagcaaatcgtatatggggagtggagttggtgccttttgaggcttttgcactagagcaaatatttttatagatgatatcatcattataccatttaagttaatgtaattatatgctagacttaagtagatggtacattttaataaaatatcatatgagagtattttttattaatagatacaaaaaaaaaaaaaattactcaacttaactttttgcactatgcttggtggctttgatagtttttaaacttaacaagtagtgtcaagatttatggcttgactccaggactaggccttggctaagacgggttaagcctgtgcttagggctcacccaatctagacacccaaaaaattatttgatatttaaaattatacatatatttttagtagtttaataccatgtatttttaaataaaagggtccaattaattttttctcttaaggcccacccaatctcaaggctggacttgtttgactcttcgattttttttttaagataagttttgttttttaattatttatttatttcaatcttataataaattgtaatttagttttattcatactaatatattttaatttttatcaataaattgtttgttaatagagatttattttttgtaggcttaataaagcgcttttgattacaaagacttcacaaataagtttaattttcaataaatttttaggacaatgtttcttataaatattacgatttttgtgatcttttagtagttttaatattaattttttaaggtatttttttttttttgtaaaagaagtgttatttattaagaagagctatc

SEQ ID NO: 326812 - DNA, 626 bp, Cannabis indica
tctcaatagttcagggaaaatttataacgaccaaaaaaatttaaagggcatgatttgatacatgtcaaagttcagggggaaatatacatatacgtacactctatataaaaagaaattaaaaataaatcccttttaaaatcccatagggtatttaagggtgtgcataaattgattcaatctaacgacaactgaccgatccaattacaaccgatcgctaaatgttgaatatctaattgtaatcagatccaattagatgttacttttaaatatccaattgaatcgaatcagattggatgttatatttttttactatgtacagttacgttggagtaactcttatacagacacatcgcgattacgcaattgtaatatgagttactctaaggaccgacaaaatctcatattactgtgttctttcttagtagaaaattaaggtgagttttcatgaaatctaataattaatatatataaatagatgctacatgtatcatgcatgttcttattcttgagaagatagttttgaatataaatatatatctttatatattaaaagtgcctatctaacgacatttcttggtttaacattcttagtttaacaaaatatacttaaaaataaaagaatattc

SEQ ID NO: 326813 - DNA, 1242 bp, Cannabis indica
aaaaaaaaaatacttaataattacctaatatagaggttatgataaaattatttacgtttactacatctatttgtgttataaattgtatttaagttgattataaataaaaaaaatgtcgaaaattaagttcataatcttattaatactatattgaaaaatataaaaattctattagaattcgatcagtaacttatgtaaaaacacaacaaatttttgcaaacgttttaggacagtgtattgaatatactggacactatagtacagtaccatatatacctgaggagttaatttatagtatataaatattgatttgtgtaattgcattgcaggagttggttgtgtgcattcaaagttacgtgaacaagatgagtgtaagtgtagcagtggatgaaagcaccattcctgatccacatcagctatgcgatgacattgctcaatcacttacacttattaaggatattgtcaaacaaaattaaacccacttatctaattaattatatttatatataaactcttcttataaatttattattctagtccttcaaatccttgttataattaaatattaaccatctgaatgaagactcttattaattttcatgattattattatttcttattaaacttaataaataaagaagaagattcgtcttgcatcttaatttcaactatatattagattgcaagtattaccttaaaagtgtgaataatttgaactcatatataatttatttacctttcacacgtatattacaccatccattagaatgagaccttttgagaaggtacccaaaaataaattcgttaaggttaatttcggctcagtagacaatattataccaatagaggaatagatggtggcgacggtccttacaagtggtgaagcttgttgctagagccgtcggaggttcaaaatttggttcgaaggagggatttcgaatctagatggtgaagggattcatctagcttactcaaggggttcttgaatgttggaatcaagagattcatgtttattagatctgtaactgcctaaggggaggcaagatggtcatttgttagaggagagaattgttgagtgtacaactaaataagttttacattgactagaaatagaaaggatggatcttgggtatataaggatatacattatctctattggaatgagacattttgagaaagtgcccaaaaataaatttgtgagggcttaggccgaaagcggataattgttaggttatttttagt

SEQ ID NO: 326814 - DNA, 558 bp, Cannabis indica
caaaagagccaacctattcaaaaaccctaattaacccaaaaaaaaaaataaatatacaaaatggagcaagaggaatccgaatctcacctagaaaatcctccattaacatccaattactagaaacgaaaagcctagaaaagaaaaataagaagaggtagaaaattttgataattgaacgggaagaggagagtggattgagatattgttttgttacctagagtgtggagacgaattggaatccgattacgatgttgaagattatggttgaagcgagcaatagtgactgagggattccattttcagattccattcttcgtcacttcttcgactcagagtctcaaataggaaatttggcttatattatttttaaaataatatatattatatatattttttgatatattaaaatagatgaggtcaaatccaatccgaaaaaaattatgcagggcagaacaaatctaatccgagatccaataagtatccaaatgtttcaaatcaaagatgatccgtcgggtcagagctgtaacaccctaactaacataggcgtattacgtgatt

SEQ ID NO: 326815 - DNA, 1255 bp, Cannabis indica
catttactataatttaccctaaaaaaaaacagacgaacaccattattgaagtgtcgaaatcaaagaggtctaaccatggaagcctactcaaccaatacccggatgagtacttgaagggctaatgcggatgtcgactagtgttgcggatgtttaccttttatagacgccagatcaccaaataacggttatgttttttctgacaaagatcaaatcttgtccccacatctaagcatgatagtgcgcacacatccaccacctttttgttaggcgggtattacgaacccctgcttgtaaagaagaaagctttaggtgatacgtggcttctactttcaaaggttgaacctttagatgacacgtgtccatatggtacaaaatagtcttcattatctagctgtagcacacaggggaataatattttctcacaggactcaacagttagctctaatttactccaatagtgggatttgagcagaaaccttaggtgggtcatgtgtctgtctatacttgccatttagcctataagtatccatcaattctcgtacgtatggggcatcacaacctacatagctaaaactttgtcaatattactcttggtcttcttctttttcaagagaaacttagggtaaagagttagggtttcctgcgaaaataccgtaaacacatcaaaaatactctaagaggctaatagactaactcacagactaaggttaactaatacccaaaccacgtaaaaaatcttcatctctttatttttgcaccttattatttctttagttctcaaatatttagtttccaaaaatctcggtaaacattttagtgatttcattgagagctgaaagacataaattactgttgttgtcatggttttaacacgaaagacggttcctaagaagactctacaaggtggcctcgagatggtcatggaggaagtaaatcccctctcgccaaagcacccatagttgagtgatgtgagaggcagggatacgtccaacgtgaaggactgagaggacgacccaaacagctagcataaccacgtcagtggtgatagagatgctgagatgaacgaaaaggaggaagacaataaagattacgtcaaataagggtactataaagatgtaccccattatgagcaatacccccaaagtagtttgagtgtctaatgtgtaacgtccccgcttcaagcctccattgggcccttacatccacgaactaatggctcttatacacgagtaagtcactctggctgcttcatgga

SEQ ID NO: 326816 - DNA, 599 bp, Cannabis indica
attatttatataatagttatttaagataattccgatatatataactttgatgtgactaaaagcaataaaatatctctacaacagagcaaacatgatacagattaacaatcttcatgtataattattacatgaagatactgtctcatcatttcatgtgtgtacataataatttaatcttagcccttttataataaataaaaaaagaaaaaaaaagtcgcaattaatgattgatgacatatatgtggtgatatttttgtgtttaaaaacagttatggtagttgatgatatggggttgacaacaaatatatacataactagggtaatgagaccacgttcagagcatctctttatgttatttacaacttttgctgatcacattcaataatcatccatattaataataaaatttgttccttttatttacttaaattactttaattattatttaagcaaactcatgcaacattagtcataggcagacttacatagtgcttaaagagagtttaaacccattctcaaatttcacaacagattatacaaaattagacagaaacaatagataatcactacaaaattttactttagtcacataaaataaa

SEQ ID NO: 326817 - DNA, 753 bp, Cannabis indica
ataaataatattttttttacttatttgacatattgtttattagagtacaattgtaaataggtcaaatataacacaaacttatttttatgtcaaatttagtacaaattttagtcttgtggtctagcattgagttttcatttgagctaaatttattattaagtttatagttatgtgtatagttttgtcagttaaaaactggtgcaaacagtgtaaaatcagtttttataacgtttgcgtcacttctaagggacggagatttttgtattcaataattgtaaattgacacaaaataagatagtttttgcatctgcatgatacacgtcgattctaagaactcttactcatgcaaaaaatatatatgctagttagaaatcgacgataataaatttttttataatggtattttggttattaaataaatatttatttagtgtaattaaatttatcgaaatattttttttaaaaaatttagataataagcaaatgttagctgctaaacgccttctccccatttattagttttccttcaatctaatgaataagcagctgtctttgtgttcaagcattttttttccgttttatgtatatataaataaatggattttgttttaatacatttattatacattcgtgttttttttgttaactaaactattgtactaattcgaaaaaaaataaaaaataaataataaactattacacgttatattttaagtcccatttacaagtttgggattatttaaaaaaaaaaaa

SEQ ID NO: 326818 - DNA, 780 bp, Cannabis indica
gaagggagagaaacaattacaaacttggaaaaagaggtcagcaaactctcttaatgataacactttgttaatgttcttttgtattttctctgagtgatttgtcacaaatgaaatctaatgtaattactatttgataaaatttaattattggtatattaacctaattatttaatacatgtgttaaaaatgaaattgagtatagaagagtgtcgaggttggccaccaacaagcatcactaacatcagcgtgggccacattgatggactcattgtacctgttctgcttctgtgattatgcagaggtagaaactgttgaatccaacatgataatccacttgaattattccaccttcatcaagtactgaaaacaatatctaaacagcgataatgagcacaataaaactaaaaatccttggatattcgctaaaattttccaaatcatgaatataattacgtaagactcattaaaatattcaagaatgaaagaatattcttttctctgcactgtttgtgtgatgtagaatcatgaaattcaaatctaacttgcatgcttcacataatattatcattgaacaataaatctattaaaatacaagggagaagacaatcaaggaaaaatatatatgcataatatcaatttttttttaacaagccacagccatatatcgttgagaagtttagaacaggaagaaaatcacataagttgtgcactagaaagtgaaaataatgcaacatacaattcaaagttctcataaacttactttacaactcccgactttcc

SEQ ID NO: 326819 - DNA, 963 bp, Cannabis indica
actaactccaccactaccgctacaacgttaaccgtttaaagtaacgcgagacgagggtggggattacccggcgcgagaaggattcccatcgtgtagtacccatttcatatatatatatatatatatatatatttttttttaaaaaaaaaaatgatgtctcaaaagagaattaaaaaaaataatcataaaaaattcaataaaacaataaacttaagtagaatagtgtgtatagtaaaaaaaaataaggattataattaataaaaaacctaaaccatgaagttattttaattgtaatagtaatgattttaaaacttaaatttatacatatatcatatcggggcgggttcggagcgggtatctattctctcgtccccatcccgtttccgactcgagtatgaatatttaaacccatactcgcccccgcccccgaaagtcaaccatcattcccatcccattagggcgggtaccagcaagtacccgaactagtgggtataattgacattcctaatttgaatattaatttctatattgtaaattattttaaatttcctaaaattttatagaatttgtcttaaataactcctataaaaaattttgaactaaaaaattattagagatgccgaaatatttaggaattgaattaatgtacctattttattagggtacagaaccactcaaattattattaaatgagcaatagttaaaatatatgttataaagcatgtgaatatactctcaaaattcagaagtttaggggctgtttggcttacagtttaaaaattgttttctgttttttaaaactgaaaatagtttttaaaaattattaggagtcgtttggcaaaaatttttaaaagctgttttttttaaaaacttgagttttaaaaaactagaaaacagaaaacatcaaaatgtgtttttcaattttcaaaaacaagttttttttgtcttaacatattatatttt

SEQ ID NO: 326820 - DNA, 951 bp, Cannabis indica
aatttattattaaaaaataaccgatccaaaataaccgattcaatccgcactattgcggattggatttaaactcttatgcggatcggattgaatccaaaatatgaaatctgcacttagtgcggattggatgttgtttaaactaaaaaagtgcgaattggatcggatgaaattggatcggatgagcacccctattttaaattctttctaataaaaaaagtacgttttaaattgtagatgtatttgattttggatgcatttaaatttataaatataattttcattttctcgttctaataaagtaaatgttatacatataaatttgacaaataaacaaaatgaaaaataaaacgtcgcctgagagattcgaactctcgcggggaaaccccatgtacttagcaggcacacgccttaaccactcggccaaagcgacttgttgacaaaagtgcctttctttttatataaaaccaaaattaattgtcgaatgccactaatttgatttgtaggtttgcttgagaaatccattttcacttcctagacaaacgttaatagtgtatcaagaaaaaaaaaactcacctaataactctcttacaaaatttgaagaacttaaagcattccgccataagttttcatttttatcttctaaaatacatcctcaaaatttcacttcctctattttacattacacaataaatcaaattctctaattttttctaacattatttaaataataaaattttaacatatatatatatatatcatatagataaaatattataaatataaatatattattcaaataaatttaaatcatgaactattttttctctacatataaaacaaattgtatcagcatcatgttatatttatatatattaaagtgactatttaacgataatttttaatttaaccttttattttttgggtaaattgtagcataaatacttaatgttt

SEQ ID NO: 326821 - DNA, 1278 bp, Cannabis indica
aattctagcctcggcaccggacccaacttattaaataaaatcaccaaataaaaataaaatttatagaacatatttttttttattattatttttaaaattgaaaaacaaaagtgattatagaatatattttaattacttttcaataacaaatatttaaaagtaaaaaaattatttttataattaataaatttaaaacattataaaacactttgcagttgatcaataagttaacaaaagctgaatatagtatatatgtttatattgctatattataattaattaatatatgtagaacaaagatggtggatggggattacacatagagggacatagcaccatgttttgcacaactcttaattacatttgtatgagaatgcttggagaagggccagatggaggacaagacaatgcttgtgcaagagcaagacaatggattcttgaccatggtggtgtaacatatataccctcttggggaaagacttggctttcggtattatataaatatatatttatatgtatattctcaatattaaaatataaagtaatttatgacgtaaatatttaaatttaaatttttacatgaatagccatattaggatataattttttgaggtatcaaaaataaaaaatgctcagtacggtcaaaagtgatgtccctacctataaatatatgctttggttagggaattaaaccatataattttattattagagaatcacacattaattaataatgtgtgggaatataattctatatataagatacacggactactcattttatagtcaattaattttgatagaatctggtacatctcttaccatacattttcaattcattctatatcctactttccacattctaacatttatttctatttctttctttctctcatatttttgtatttgattatagatacttggtctttttgattgggttggatgcaatccaatgcctcctgaattttggattctccctccatttcttcatatacatccaggtttgatagtttttattaaattttatgcatgtatatatactagataaaaaattaagtgtacaatgcagaatactttacaaaattaacttatgagaattaaagacatttctaacatgttatacaataaatttactgtggtgaatcttcaccctcaaaacaggttgttacagcagtaataatgtgtaacgccccgatattttgccttattttacaaaaatactattttcatgtataatttgaaaagataaaaaaataatttaaatacaacagtggattt

SEQ ID NO: 326822 - DNA, 484 bp, Cannabis indica
tacaagaatttacaagcctaggatgacttattatataaccaaaatatatgttctcacaaaccatgacatgtaaaagtaagaaaataatatgggacaaaattactctctaaaatttaaataataaaattataatatcttcagagaatacattaaaaactacttgaaatatcacaaaattctcaagactctaccatttgattagtaaaaatcattgaaaaacttaaaaataagaagccaaatagtaccaacctaacccactaaaattcaataatcataccacataaacccataaaataagataattttttaaattattattaagtaaagtttccccaaaaaaatatagttaaaatttgattttttatccttagagaaaattttttccttaaacctaaaataccttatattggtaaaatatgacaatatttactttattcccacattaccccctcatttaaatctgactcaacacttgactatgaac

SEQ ID NO: 326823 - DNA, 1154 bp, Cannabis indica
ttttttttactaaaaccaataaaactataaaataaaatacatacatttttgactctaaatcatacaaaatacaataaaatgaaatggaaaacttacattcagtggcgcggtggtcgtggttcagaggaccgtggggtcgttgggttggtagttgtcggtgggttggtggtcttcggattggaggcgtggtggttggtagccatgggttgctagggtcttcgtgtgtgtgacaagaagagagcgagagaggcagagagaatagaggaagagagagaggaggggtgagttttgagaggggtatttttgggtttaataaaaaaagtggcctatctaactaattttggtatacttagcttaagtttactaacaaatgcatgaatattaattcaaatttccctaaacatattatatcaacaatattatcaccgattttttcataatgaatatacataatgtaatatttaattacagttttatttattcttttaagcatattttttaataactaaataaatatgagtattttatttttgaaattatttatgaatttttaataaacaaattatatattgattatattgaaatactactacaaaaagggcctttagaggtggtttttttggcccttagaggtagttttggtaaaatttgtaaccgttggcatttgattatatcgcaaaaaaattgattgtaactaaaaaatcatagatctaaacgtaacaatccaaaataacacttcttttcaaaaaaaaaatacaccacgaatcagagttagccacgagatcattacctgaaaataacaaaaataaaatggtaagagaaaacacaaaaagaaaaatatggcaggaaagaaaagagaagagatgggaccttcggtagtggttgggtcgtcagggtacggttcttcatggttgaggcgccatcggtgctatagagagagttttttgccaacgatggtgggttcttcgtggttaaggtgttgttgatgctagactcgacagtggctcaggtaagagacacataggaagagaggcagagaaaaagaagcgaaagaatataccttcatggcggccgatgtggtggttggtgagccaaacagtgagagagagagagagatagagagagagagagagagagagagagagagatgtggt

SEQ ID NO: 326824 - DNA, 873 bp, Cannabis indica
tataatacatgtatgaaattatatttactctaaaatatttctattatgatataatattaatgtttatttattgttactattgttacattgatattttttggttttttaatttttttttctaatgtaactctatttagttataacctcccaattagaatataatttacttgatcacaagtgtattcttagatagaggttctactgtatatataatctaatttaatataatacaatacaatacgacctaatatgatgttccaaacgagtccttcaagttttattttaactattatgtgattgcatacattaaattaaggacatatgttagctcttagaaatgtaaaaggtttcttcttacaaaagactgaatttttagctttttttttctaaaaataatttatctagtttgttcttcatctccaccaatataactcttctcttatgatgtggttcatatagggctacattttgttctctactcttctacttttttcatcttactacattctcaatctaatatgggagatttttctttactaagattattagatctataaaatgatttgtgctccagattaagagttggatttttctataactaaagaatatttttagttttacaagtattagtattatgattttgttatatagatttgactattttttctttggttgaaatttttaggtgtatacaactttgtaaatacagtagaacttctatccaagaatacacttgggatcaagtaaattatattctaattgggaggttataactaaataaagttacactagaaaaaaattaaaaaaccaaaaaatattaatgtaacaatagtaacaataaataaacattaatactatatcataatagaaata

SEQ ID NO: 326825 - DNA, 837 bp, Cannabis indica
tttaccaaagcactaatgccttctcctttttccaacattgtatccaagttgggtgtcatatatatttacactccaacttgaggggggctattagaaattagaattagtgttgtttattttctgttttatttttttattattatttttgttatgaagttggttaaggctgagctgacacaagttaattgttctaactaacttgatcacctcctcagccaatataaaccatcttagccactgtactcataattcaattcaattcagtggaaatatattcaagcttttctctctccctcattttctctcattatataatagtataattccttatcgcttatttatatttaatcactttaattaggattgttaatccataaactaatctcatgatattacaattatcccctccttataaaaatttcgtcctgaaatttacctgaacaactcagagtatttctgcctcatatcaaattctaactcccaagtcacctctttgaccttagtgttcctctataacacttttactaatactagtatctatgatcttggcatctcaatacaaatgcttccaaaaaagttaaagatctgatcttcttaaaaaaatttaaagatatgatgcacaactactacacggaggaagaatttgaagcaaaatggttagatgtcattgataggctttaactaacagataataaatggtgccaaataacatttgatacaaaaaacagtggacagaaacttattaaggggttcattcgtcgcatgaatgagaacgacaaaacgttgtgaattgatcaactccgctctaaaaaggtttttagagaagaattatttctt

SEQ ID NO: 326826 - DNA, 742 bp, Cannabis indica
tatatttagttaatgtgtaataaaaaatggtagtttttaacttatccctgcctaatctgctttagtttaaggctgaccctgtgaatttcatgtattttgtattgattggctgtttaaacgatgattacaatgaaagaaaaacaaatttatttattttttaggtgactataaaacctaaaagccgtgtggatcttcaaatatttgaagcatgctacgagaaatactaaatgatattagtgttgtctagtattacctaaatgtgatattattgttggtataatagtataattcaatatcaagtaattctcgtattttaatttaataattatgatgaaaatacacttatatagcctcgcttatttgtgatactaaaatactagtaattcttgtgataattattattcattcggaattattatctttaatctgattagattaagaatacattgagaaagattacaagtgattaagaaaaagaaggcctattgtgaagaatttgaattcataccattataacaaaaagtttgttagattctcttaggagtgaacatttgcacccgaaaacccacccaaccagcaaactcaaacccacgaaatctaagaaaattgggttttgaaaaatgctgaacgatttcgggctcaacccggtgctgtaacgagccgggttcaggttctaaaattgttacacccgaaaatccaaacccactcgaaaaaccctacaattttttatataaatatatca

SEQ ID NO: 326827 - DNA, 511 bp, Cannabis indica
ttcagattttttctctactacttgagttgttttaacaatcttgaatattatgtgtcagctataaaagttttataccttaatttattttaattgaatcatcggtaatcacttttaagggtagttataccagctaacctttaaagagctaagtctttttaatccctaagagtcgtagtaaatttgaaacccttgatcaagtaagaaataatgcaattcctactattacatcaaaccatttatatttatatatgtgttataagtattaagtggtagaagagtctcatgcttacgtgaggatgagggatttgagggtacttgtttttatgtaatatatatgatgatatttttcaagtcccacaatcatacatttgtatttattatcatataacatatataaatatataagaggagatttattctatatattctaataataatgttccacttactataaacactaagtgcatgttttggcatcataactaaaaaactgtcttttgtttttaaaaac

SEQ ID NO: 326828 - DNA, 673 bp, Cannabis indica
tagagaaaaatgaaattggtgcgtgtgtaacgtaccaactcgactcgatcgatctacagaggctttttgtcatgttatttgaaagaggagattagctatgaatatataaatatatattatgtaggtccatgtaaataatatctactcaatcctttcggcaaacttttgtgaataaatattaaaacaagaatgagtgtaattatttgcgatgattgtttgacattaaatttttatttttgaaagtaaacatatatacatgaattattgtgtgtacatgtataacatctttgtctcactcacattcaccatcgcctcaagggctctctctagatttgatattcgaatattatggttcctgggtttttatttcaaatcttgctatcatgagttgttcgtggtcagatctgaaagtttttttcatggattgtgtcattgcgaaatcgaagcaaataagtgaaaaataagatttttttttcgtgtgtcagtttaaaatcgacacaccgtattagagcattttcaatgaaaatgcaaatgcaaaatatagttgaatttattaaaactctactctaagagcatctctaatagagatgtaaataagtgatgccattacaaaaatttattttagtcacataaaacttatgactaaaagtgatttgtaattaattataaatta

SEQ ID NO: 326829 - DNA, 531 bp, Cannabis indica
agttgaagattaagaaacaatagtcttattttaagtttttttctataaaatattaaataattcatcaattaaaaaataatcgatccaaaataaccaatccaatctgtactattgcggattggattggatttaaactgttatgcggatcaaatttgatccaaaatataaaatttgcacttagtatagattgaatgttgtttgaccaaaaaagtataaattgaatcggacgaacactcttgtagatacaatgccgttatcaacatctttaatttctatgattgaactcaactccttaaggaaaacatatagatattaattttatttatttttttgtagcattttgttatagatttagttgtttttgcaattctgttatttctcttaaatttaaatgatttgttcaataaatgttttagggattctacaatgcacctctttaaaagggatgtattgataacccatgacttgtttcggcatccagaaaaaaaatttagtctaatttttttttcatattcatgtacgttataacta

SEQ ID NO: 326830 - DNA, 1615 bp, Cannabis indica
tcatttaaccccattctatagggctcttcattaggttactttgtacaattgatttcctaactcccatttgtcctcggtcactcttgatataggaaagtttctgtatgttgtgggaactcatgtatccattgatctgccccttctaatttttgaaaggattctcgaagcctcaaaaaccactggtactcaaaacaaacttccgtttccaagtctcatccaataagtgctcatggccgctcaacctcctttatcaacccatgattatcaagttccaaatcttgttctcagtaagagctttttatcagttgttcacagacaacccacttcaactactccttcagcctcaaagatgaacaaaggcaagtcccctatgttcagagggttatcagactcgagctggcaggtacaaatattttctaaatttaaatcatttgtcaaaaggtataagaaggatcaaaagcgtcagcttgcatttgaggcctctatatacaaaatggttcgaatcatcaagtccactgttctgcaaaatcactatggagaacctttaactccatccattgatatatctcttccatagtttcatagagattcgtttggtggatcctcatatggctctggtagtgccgcacatgctcagggggagccgtctatttcttccctagcctcaaatacagtgcctcggcatccttcaactgcaattgaaccgtatccagtatccactgctcctcacatggtttctttagcagcactatcccaggcggagtctgacaaagatgaggtgccatctgctcatgttcaatgaagggggagatatatgtcctcaagtttttttatgaggttatggattgttatatttctttttgcaaagacaatttatgtttctatagtttcattttgttggataacttttgggtctttgcctttattttgattagtaactattacaatttttgtgtgttcattgaacataatgtgtcaaggggaagattgtaagatccatgtttttgacatattatattaaaagtgattccagtcttatctgttatgttcgcctgccgtaactagatgagaatatgctgttagtgtccacgataatctgttaagtattaatagttgtcatgaaaatactgttaggtctagtcagaactatatgtctatatatagctagttctgttctgagattaaatgaacttgctaatcgtattcttggatagttcggtgttgcgtagtatcgagtgtggtgtattgtattgttctttgttttataggtctgattgaataacttggaggtggtcatccataatagagagatcagagcctgtttgagctgagttcagactaaagggagttcagtatcatcttcatcatcaaatctgaagggatttcagattggagaaaagtgttgaagagaaactttgcttgggcacaaggggatcttgtgtattcaaacaaggatcttggttggtgttggtaatattgcactagatgttgtaaagattgtattcaatacctaactgtgaactggtatttgtaatatgaatctttaaatatagtggatgttattaccctggttcagggaacccaagcactagtcggttgagatttgttctcagtg

SEQ ID NO: 326831 - DNA, 1376 bp, Cannabis indica
aaaaaaaaaaaaaaaaatacagtgtttattcttgacccgatttattcgtgtagttattaaatattattattctttaaaataataatgatatatttattaaatctttgactttaagtacattcttatttcatttagttactatatttttttttacaatgataaaaattacatatgattaataaagtagtaatttacagacagcagtacttccttaaattaagatgctttatttaactaaaagatatattttgtcaaattataaactgtataattcttattataagtcacatgaggtaaaactatccttaaaaatttagacaataaaactataacttccccaaacagcacatccaactcattattaaagaacattcttcctttgttgatagcttcaagagcgcatctaaaataaacaatcaattgggcgaaaaattatctacaaaataaataaatttataaagtagattagcacactatacaatgatattgtgaattttaaattaagaataaaatttaattattattttaacaagaaaaaatttatctttgaagtatttttctcttactatgtcaccattgtatcgtaactaaattgttatgtccaattaatagagctaagtctttcaagaaggaaatatactaattaattaaacttgcaccatacataaaatttgagagattaatcaaacttaactaatcaaatcccaattaaaattaactattttaccaaaaaaaaaaaaaactaacaaaactcaattaactaacaaataaatgataaaaacaatgatgtaaaataatagaaagaaaattcttctaaaattatttgaatataactaaaaaaaaaattaaacttatttgtgaaaattgatgatagcactctttgaagttgtgtatatgagcaaaccagtcaaaaatatactacaaactagctaaaatatagtacaccaagccaaataaaatggctcaaactaaccaaaaaagtgaaatactatatccaaaactagtagagatctaattttaaattaaaaataaaatagtaaaacttttaagaaccttaattaaaatactaaatatgatcttattaaaaaatatataccaaaagtatttctaactagttatagacaccttaaataatatttgaatttaaaagaaaaacaagtaagtatattattttctatattttgtagatgagaaatgttaaaaagtatcagtggtgcttagtacttttttatgtgtcaatattgctattggtcaaactaagtaacgagtttcttataatcagggccggcccaagcattttgggggccttatgcaaaatttaaaattaggctcttttaaaaaaaaaaaaatcgtgtacattaaaattacaattctat

SEQ ID NO: 326832 - DNA, 884 bp, Cannabis indica
tgcaacataaaatattatttctgatctttattaataagtaaatctgattattatattgaaatgagttttatttagggcacaaaacccaacactagcctgtgtgtcgagttgccaggagtttgttttagacttggctgtgtctgctgtattttgaattgttgttgtatatcgtcttttaggtaaatcttttataacagagatctccggaacatctttttactgccgttataatgttcgtttttagtattttactttagtcaagtttttattatcctcacagtttttaataatcaatttttattaaactagttttataaaatcacacacgtggcattcctatggattaggacggtacaactataattttcatcaattttaggttcgatcgattcccgtcttctttttcagtgaattcaccagaattaatggtggtcttctttttaatttggtttcattttggttgtgtcgccggtttgaacgatcgaagtttttgttggtgatcgttttgtttcgtgcgactgaaggtttaaaggaggtggtatttttgtaattttttgtttgtgggatgtataattgttaaaatgccggtccactgtattttagtaatttttttgcttttttttgtatttttttgttttttttcttttattttatgtactaaacaaatttattgggaatgatattaaaaattacaaataatgtgcagtgatgacatcaaatttgaatataattacgagtatagggaagataggatgataatagtggttttaaaatcatacgattagttttctataaatttatcaattcaaattaatttattcaaatcatatatatgagttaattattactaaacaaaatacataaaatctatatatttatataaa

SEQ ID NO: 326833 - DNA, 1180 bp, Cannabis indica
gagtaatttgtggtataaatatctaagtttatttttttgcgataataatacttaaattatatttctaaaatttctgtagatacttaaccgttaaatgtctagtcattattcacgtattattttcttattgttatatttaacttatttaaaaaaaaaaatcaatagcctaaactaattaaaaattcctatataacaatttacttaataattaataattataaaaaattataatttaaacattattactacaaaaagttaaacttaaacatttattaataactaaaaattaaaatgaaaaatttatgagttcacacagttgagtaggcaataatagtttagtattgttgtgagttcatgtgagtgagacgatataatagaatctataataataataataatatcgtatggcgatatattgaagaagaatgtgagacgataaattgtagtacgtaggtgtttgtttttggacatttcggtaaattacacttaaaacagctctgaaaccggagcagtatacatacaaacagacaaaccttaaccctttttcttagagtgagttaaaaaagctgacgtggttcttagggggccgacaatcattggtccgtgtctagcacgcgctatattaaggaagtgtggttgagaagcacggacggacggacggacggacaagtggaacacaacaacacagcattatgggccgctctgacatttaaggctttttcaagggttttattgttacatgttaaatacatcttttttaaccataaaattattaaagaataaatggtattcaaaaatggagattttttctcttctcccaaattactctaaaatatatatacacacatgatatcttttaagattcgtttggtatctcgtataagggtggtattatattaaataatgaataacactatatttagataaagcagtgtattatatcaattattacgaccaacttgtttaatacaatgtatgttgtattatttaatacataataaatggttcgtattaacttgtattataatatttacaaaagatttggggtcaacaccaatctccgacccggacccaggactcagactcggagccgagacccggacctaggacccggacccgaacctaaatcgagacccggacccagatcggaacccgggcctgggactcaaacctagaccgg

SEQ ID NO: 326834 - DNA, 716 bp, Cannabis indica
aaaaatagttattcatatcttagtattaaaatgacaaaacaaagtaaaattagttattttaattttttttttatgtaattcctaaaaattatttttttttaattttttatagtgaaatagttattaattggtgaatccttttcagagaatagttgcaacatatttagacgttgattttttttttctcacctattttatattatatttttttaaaaacatattattgtaaattcacacgaaatattctcatcatgcagtgttgaataataatcttacttttgtagtacaatctagaatgtactcattatataatactaacaaacttttttattttaattattaatgacaacttatatgttaaccatcaaaattttataaaaattaaccccaaaaatgaatgactaatagaatttaaatctatggtcgatttttttacattaatgaatgactaatagaatttagtacgtacttaattaaaaaagaaaatagaatttatgtatttatattataaatttttttgagagagttaaaaaatgagggtggatatttattcaaaaaataaaaaataaaggtgattatgagggaaaaaaaaaaaagagatgccactagctaaataaagtaatccaaatataagattttttttttctatttattttggagaagatccaaaactaattagttcatttcaccttttatgtttttcttgttaatataat

SEQ ID NO: 326835 - DNA, 879 bp, Cannabis indica
aaaaaaagtatagtacgaattcaagtctaaatataaaaatgggctgcctatttaagaaatacgggccggaacgagcaaagcacgacagggatctgagatgaaaatatcagacctactctttaaaaatgttgtcacgacacgacacatcctatattgttttttgcagtataacacgacacgacacattccatatttttttttgcggtacaacacgacacgatctaaaaaaaacacaaataagtaacaagtcaggccaacagcacgcacgaacttacagcactacaccaaactaacccattgagaaacgtgcacgtgagcataggaactaagtggtcaaaattggggatctaagggtggggagtgaaagtcgacaatataattaattggcccaagcgattccatcttgactatgccaccttctattacactataattttgatttttttggcatacctcaaattttagttgtagtaatcaagtttgacaaattaagttttaaggaaaatgtaattcctagttagaatgttttgtttttgtgtctatatatatcaatttttttgtgttttgtattagccaaattggtcattagactatttattattattattttttccctctaaaaataatggttttactaattttttaaagtctcatcaattgaattaccaccaacaaaaggaagacaaacaatttttgtaagtgacagtagtagaaaagaaggcaggcagctggcaagtgcatttgactcatttcgtcccacattgattaaatagagaaggcctatttgtatgtgtagctatttaatgggaagtctttaacttaccaattcatacctttctcggccttttggctaagatcaagtgtagtatctgttcttat

SEQ ID NO: 326836 - DNA, 837 bp, Cannabis indica
tttttgctctccaaagctcagatatttcctttttaacaatatatatatatataaattaagaaatagcaaaacagagtagaagtagagttttagtctgagtagagagtgtagtagtagtagtagtagtatagtaagactttttatgaggaaatattagatttagtgatatgaaatttataagagggtctctatggtattatattcaatttaatgacagtgaaatacttgttttatttattaattattgtatttttattttcatttttaaaaatgaagggtctaataaagacaggggtctacttttcttgagctctagtagctctctctctttctctctctctaaagatccactgctatatatgtccgtgttaatgacatcttaataaagctttaaaagaaaattaaagattgacactaaaaaagtgaggaaactattaagattgcccaacacaattgtttttattttctattttttaaaggttagattagtgccttccaccaacctcatcatatacataaataacaattacataattttttattattttttttctaactaaattacaattagatatttgtgataataaactaaggatggcccaccctttgagcaattcgatggtcttgatcagttgatgccccatcgctggttgggacagaaagcttaacacgtggcactcatgttgtgcaattatattatatatcacgactcattttcttttcttcaaaatattttgataattttatttgtgtttttaatcaatttaattacacaatacaatatttattttattttatattttttttttctaattttaatttgtatatattattatt

SEQ ID NO: 326837 - DNA, 1311 bp, Cannabis indica
aatgcttaatacgaacagatacaaaaatgtaaacagttttgtcatatagcacttttagatcggattataattaaacttattttagacaaaaatcaattcagagtcttatttatactattttagaaatacaggatccattttgtcatttaacaaaatacagggtccaattagtaacttttgtaaaacagagggtccaaaataatatttacccaaaaaaataatagatgatattatctgattttcaaatagatattattacatgaaggagcaatttcgcttttttgcaaaaagaaaaagtgaataaaaaagaaagaaataaccattaaagtaaaacgacatacagataaattaaaaaaaggaaaagaaaagaaatatattgcagcaaagaaactatttttgtccgaggttatttttcatcttattattattattattattgttatttttgtctgtatgcatgagagatgaccccccaagaagtctttcaattattgtaaaattactaataacttaaaattattcacgaacgacagtgataattaggacaggttacattacagctattattgtgtacgaaggtttaaaaggttggggggccctttgctgtcggttctttgggggaaatttactactaactacttagtcaatatacaagacaaaataataggatcatggaaaagtttctagtatatattagtgcagttttatatgtacaattattaattaattgttatatgtactcaatgaaaagcaaagatcttaaaataatattgagatatttattaagcgacgacgattttaatccgtctatacaagcagtgagaatagatagaacacgatcccctatactatacaacatggaaatcaaaagtttttgtctgcattagctttaattggagaaatattattcatacattctgatgcaagttattatatatataattgaaataaatatcaatatggtatccagtcattatgatcccaaacagaagagatggaggtggagccctagcagggtgtctttagttttgatgggactagggcaaaattttaaaaaaattatttgagaaataacatgaaatttaaataagtttttaaattgtttttctaataattttttttggccttatatagactaataataaaagaaatcttgaaagaaactgagaagtctcttgcgctgagggcccgaacctcctaccctaaagatatttttatgtctgggcactagtggtactcaacactttctataggtggtgttgtacgattgattaacaatacttaattttttttttaaattatataagattc

SEQ ID NO: 326838 - DNA, 595 bp, Cannabis indica
taaaaataaaaataaaaatagtggtggttatattaagaagaaggaacacataggagggggatgtgtccttcaagtagttgatgttttactatttatggaattaattcaaagggctataacataggaaacatcttcaaatctctttaatttttggttacagacggctacgcactaccaaacacttataattttgaagcattacgtgtttcttttgggtggcataattgatccttgcttttcatgacctattaaaatatgtttatgtatacttcactgaccatcgtgctcttaattattaaactaattaattctattttctatattaaaaagaagaccagatatgacatttatgaattttttaatgctttgtttattaaaaattcataaaagtacttaaaggttcacgattgctatgttacgttctagcttttgtgattgtgacccaataatgcggagatgggcgtagttaacaaatatggtctattgtagctatttttaggttctaccaccaatattatatcacataaaaataatagaaaaaaggaaataatattaataattaacatagagagaaggaagagtgcagagttggatc

SEQ ID NO: 326839 - DNA, 3709 bp, Cannabis indica
ctctaacaatgttttcgagttaattcatgttcttgttgtagattagatagctaatggcctcactaaagccatctccaacttgaggttcaatctaatttaaaaaaaaaccttaggcattaatgatagtaccaattctaagtttgtgggggcggtgtaaaggaaattaagttaaagttaattaaagggtagtttgttttgattcatgactaaatgtttcacgagcaccaataaaatataacaaaatgaactacatatatatctataccataaataaaattacactttaaattagaatacttcatttgtttttcacataaacatactaaaagagttaatgaaaaaaaaaaaaaacattgaaaagtacgaaatatcaaacaatgtaaatgtattcatagacacaactgcctattagtagatccattcgaatttctcaccccaaatatcaaactctatattcatatattagtacaattcaatatcttttctacatgaattactaacaataatttatagtataaatatttaaatttaactattagttacatataaatacttaaatttaattttataatagtaataatacttaagttatatttttgaaacttccgtaaatacttgaccgttaagtatcaatttaatatctacataccatttttttattggcatattttaatgaatttttaaataaaaattaaaaatttaattacttggactaatcaaggactaccatgtagtcattgacaatatttaatagtcaggtacttacgaaagttctaaaattataatttaaatattattaccgtaaaaaattaaaattatatatttattttcaaccgagagttaaaattaaatatttacgccacaaattaatcaaattattaatagctcactttgtgctaataagtaataaccatggtgccgtttggtaacacttgcgcattctaattttttaatcagaaaataaaagtaaaatttttatttattaaaaactttatttttgaaaaacaaaaatacgttatgtaaccatttttgtttttcaattttaaaaacagaaaacaaatgtattttgtaaaatttatttttatttttatttttttattttatttcagtcgggtctatgtctgatattggattcgggttcgggtcaaaggccgagttcagtgtccggaccgtaaggagattttggttcggatttagttggagtatcaaatatttattaagaaaaaaaaaacaatttaaaaaaatattaaaaatgattttttttatttttatttttaaaattttgattctcaatttaaaaattgaaaagtgaaaataatctttaaatatatttttttaaaaacaaaaaactaattgaaaaagtgttactaatcaccaccgatattattattttttgagtttcttattcacgcttaaaaacgcttaattgccgaattctgatggtggagtttcttaattgaagagtgaatcagctgacctatctcgtgatatgggcaataaaagaatcccactccaaacgacactctcctcctccaacgacagaccgtttcactgcaacaccaatttccacagctctcttcctaatctcatctccttcttccgaacccatcaaagccctaacacctctgctgatcatcgatgaagtaaccaactcctctctttgactccattccattacagccactcccaccttaagcaactcagtaatcaacaaaccattcatgggctgatccgaatgcattggccaagccaccataggcactcccatactcaagctctccatacaagaattccacccacaatgagacataaacccacctgtagatgagtgccccaaaatctccacttggggcacccactccctcaccaccattcccattcccttaactctttcctctaaacccatctggaagtttaggtctttttgtcccttcttcatagctagagctggaaatatcaatttcatcagcatctctcaatacccagatgaacttcacaccactctgttccaaaccaaaagcaagctcttcaatctcatcttcagaaaaactaacagtcgttccaaaagagacatacaacacagaattaagttcttgttgagctagccattccaatactaaactcttctcagctcgataatcagatattgttgtttggtgcaaaggcccaattgtccaaatcttctcctttcctccattaatttccttagataaaagctcaacgaaagaaccctcaattgatttggagctattgaaaagtagcccagatgaaaatttcaaagtcattgccaaatgaatctgtgaacccaagaaagctataacctcagaaggaaagcatgaaattgaagatggaagttctttattcggaacgatgtcgtttcttcccaagatttcacaaataaaagcgaaagcagaaaaagcagaggcgcaattgaaagagtaagcttctgcgttttgtatcgaaacgacatcttgaacgacataagtcgttacagcatcgtgaataacgacaagtcgttttgtggttggagatagcgatcggagtagttcggctactggttcacgaaggtgagttgaggcttcgaaacaggggagtaggtgtaaagggaatttcgatttaggatttggaaaagaagaagaacaagtaagaaatgggatttggaagccatggaaatggattttgttggttgggtcttgagagtttgaggatcgagatttgacttgggaaatgtggagaggtgagctgacgtagtggactggaatgtcgtatgatgatgaaacgacataagagagttgaagaagctggtttaggtgactttgagctgggaatggaaccattacaaccacaactgatgataatgatgaagctttgttttcagagtgagtagccatggctatatgctcaagcttttttctttctttaaatctgaatcttaccttacttatgaatgttagagctcttatataaatatataatgtacgtatagaatagaagattgaaacttatttaattcatgtgatagtagacaatattatatgtgtgttattattacaaataatagtgttaaattattgataatattgaccaaaatggcatataataatgttaagataaatgttgcaggtattatcttattcagtaaggatgacaaaaagatttatttattaagattgtcggagttttaatttcacttattatttctcatgcaaaatatttaaatacttattggatttcgaatcaaatccatccagcactgttcaatttcatttcagataagatttggttcgatggagtttcaaatacatatgataatattatcgttactatataaaattaatgaatgttgttattggtcactagtagtgtctaatactttctagatgtgttgtcttacagttggttagcgatactccataaaaattattatattaaattatataagaccggatacttaattccaccaataacaatattaatacataagaggattataagcaccaataatacttttagcatttctcatataataattgagcctatactgttagcaaatttaaagtgttatttatttttttacaattaactactaacattagctacttctgtgtatatttttgtacacaggctcggccctgggcataggcgggctaggcctgtgcctagggcccaccaagcccaggggcctaaaatttttttttcctcttttaaa

SEQ ID NO: 326840 - DNA, 991 bp, Cannabis indica
acttataaaatagaaaactaaattaaattgataaaatattacaaaatttaaccaaaactaatctaaaaatgttaaaattaatatttatttaaaactaaacaaaactaattaaaagtcactaaaataagctaaaaatatttgagaacaaagctactttaatgtccaaaaagatataaataactctatttttatagagttatcagaaccaaaaaacatcccaaattgaggaactttcccaacaactccagtcttccttagatcttagcaaaggctcaaggaggagagccaacaagagcaagacaaactcaatgcttctataatggttggaaaagcgcatcaagactataaagaagaacagaaatgtacatgaagttgacaaggtggaatgcatgttgtactctttctgggttactaatcctcatgtggatttcaatgttcttggctccactgcactctagatggttgaggagttcaaacaagatcgtgaagagcaacaggcagaacgtaaggctaagcaccgccagggtgctcgcaccagccatgaccagtagttttccttctttttttggggtctttaggatttgttagagtgacccttatgctttcttttcgtgtgattacaagtctctatttttattttctgcatcttcaatatttgtaactgttgttggccgagtgacactaagggttactctttagctagatgacttttcccgccgtgataagtaggtttttatttaagggagtaatgctttttgagcggtctcgtcctcttatttctttcttcatcctttatctaaattggagggagtttattatacttgacagtgctacaacctcttaaatgttcaatttcatccttttaattaaatgtaagggagcttattgtacttgactgtgctacaaccttttgatttgtaaatgtttttgtatgtctaagaagcgtccctcttagttaagtgtttggacatgagtttctttcaagatctct

SEQ ID NO: 326841 - DNA, 1277 bp, Cannabis indica
cttaggttttggccagttaacccgtcttttgtctatgtatttttattttcttcggttgttcccctcgctctgcctttttccacagatgaatctgcacaacttttggggtgctgacaactagattgacgatgacttacttagtctagacaactagtccttctgatacaactttgaacctgtcaactctagttattattctgaagacatttaaggactttgtgtttttttgtttttatgattttattacgcatactttatattttgttcttgtatggcctttaggccatttactttcgaacaaatgatatttttgctcttatatggccttaaggccttttacttttgaataatgtttgtgtatggccttagggccttttacttttgaacagatgatcgaccaggcaatctttaatcttgactttaccttctattgtcagacatgtggcagactgagcaacttttaataccggacttatgcttttttttgtctaatctgaagtatgccattgacacttacttagctttcaattttttcttataaaagctttaaattttacctaagtttagtgatacttgttcgaagctctatggtgtgggtgccccccaagtgatcgaggagacttatggtcttttggtcacttgcaattcactacatactatagacctttgcttgtatattttctttgagggatctattttgtccacttattagtcttacatatgtgttgttgttgaacaacatacattttttttgataataaaagcgtacaattataaagtcttctttcattcatcattttggctactcgtgtgcggcatacaaagcaaaggccaccactatatttagtggtggaaacttagctcttttatactaattcctttacggtgagttgtattggaaccactactgaagagtagtgtttttacaagttggtaacttgtagctttttcggagatgttgtccattccagtaccttggtaagaaaactaactccatgttcttattgtacctgcaaagcttgtacacacctttactagttatctctgtaacttggtacagaccttctaagtttggcctaaacactcctgtttcaggatcattcgtattcaagaatactcttcaaagcactaagtctcctacaaacaatttcctttccttgacttgttttattgaagtacctagaaatttttctggtaggcgtgaagctttaagttggcttggtctcttcttttttccacttcgtcatgagattttactagcaaggtgtggtttactt

SEQ ID NO: 326842 - DNA, 524 bp, Cannabis indica
tgtcgcattatttttattattaccatgtaaattaaggccttatattaactcgaagtctaagatgttttgtttacattatggctttcttattaccaagtagcgcgcttatataaattcatagccatattgatcaatttaataagctacatagtaattcctataacaatagagtattgttattgaatattagtggtgcctagtacttttttaacatgtcaatttacgattcgctaacgatattctctaaaagttattatcttattttaaactatatgagatccactaaattacaccaataaaaatattgacacgtatagaacttatttaggaattaggaccacatgccttttagcatttctgaaaaggtatagaaagagaatagagcctaacaaaatgtaattatatagacgatatataattaacaagttgcactatactccgtgtaccttgtgaagtgtctctgctgaaacactaaaaatatatatatatattttcttttgatcatttattttattgtttcttat

SEQ ID NO: 326843 - DNA, 633 bp, Cannabis indica
tttaaatattatttattttctgggatattacacatagtgtcctgaataacacattttccatgagaaaataagaatgtgcaattagatgttgctggcaaagaattcacagataatagattgcatttaaaactagggacataaagcacatttttcagaatcaaatcaggagtcaagttgattgatcctatgcaatctattttggtgtgaattccagtaggtagaagaacagtttttagcttaggattagcatggacatcatgaaaaagagacaaatcagtgcacacatgatgtgtagcacctgtatcaataatccaatcaaaagctcgagtcttagaattcataccaaaaaagtgagataacacaggttgttcattgacagcatcaaatgtagactgatcagcaaccttctaagctagcatggccatcaatttttgggattgagaactcgacaagctggagattaattccttttcaccaggagcatcttcacttttctgttgttcacctctagtaaaattagcagaagtagacttcattggaggtcccttagcatttctgtttgggaatttcccatgaaaattgttgacttctcttttagccaacgataaatgagtctattttacaagcgataaa

SEQ ID NO: 326844 - DNA, 935 bp, Cannabis indica
catgtaatgaaatgtaacctcactttggtttaaggaggaccaattgaaaataggcatattttgattttgctaatctccctagtaaaaaatgctatgatgctatcaacatgttcacataatttgtttaaatgacaataaaagctcttacaaagatgttaaaaagaaataatcaaactcttaagcaaactaacaaatcccaaaaattaataatattagaagaaaagatatgaaaaacttattttattcatgcactctaagtctttatcagagtgtatgtgaaaatcaacagtcttccaacaaagagcaaaatcaaacaaagacaataccaagaaccaaaaaaaaattatggttacaaaatactaataaaaaacttaacggtataccagaaataaacccaatatatttacataaactacacatttctaaaagaataacataaaaaaataaatataaaaaaaattaaatgatataaattaattttaataaggaaatttaatttcttaatgaaaaaaaaccgcctaataactgcatgataaaaaaagaaacatttatggcatgtttactaataagtaatgggaatgataatcatttacttacatttgtttacttgcattattaaaattagaaaatgaagaacttgattaaataagggataaaagaaagagaatacttctcccaccaattttataaggaatgtcattaagggtaatgaattttatttatttttattttattttttaatattaaatatataatgataattttatcttttaaaacatgttttataaaataactaccatatactatagtttaacttaaaagggtaatttagtcaatttatagccttccgattaaattttctaataaagtaaacaagataaatcactattattctattttcaaaaaaatttagtaaataacatattacaaatatt

SEQ ID NO: 326845 - DNA, 517 bp, Cannabis indica
attcataaattagttagaataaaatcatattgtgatcatgtggtgttttgtacctgactagttaattgatatttttaattgtttcagttatggactacctgagtttacatatctcttgataataattttgaataacgtttgttttaagagtaatacatcttatgtagaagttaatctccatgagtttcaacatttgttttgtttgttgatcgatcaaacattcaacaacaacctattattaaaaaatcttttaaataccagtccaactcatttcatttttaatgtaaaaaacacagtgcttgtacaatctagaaaaagaatctacagaaagaagctcatgattagtactgaaagttgaaattgaaaatttgggtgtacttactgaatgagatctagagagatccttttccttgagagaagtaattcctgactgtaatacttgtaaatatgctatggattcaaaggagtaggttcattttatttatccgaactagtatataagtgcatatttgacatc

SEQ ID NO: 326846 - DNA, 467 bp, Cannabis indica
aaataatacttttaaaaaaaaattaataattattggatttaataaatatttagtattaaaatatttttattatattaataaaataataaaataataaagagtataaaatttagtagaaattttaatattatgattagaattgaaaaaaacaaatcgtgctaaaataataattttttagtgttaatttaacactaactttaaattttactattggaagtcactttctatcactaatattatttgtctaaaaaataaaataaaatacatatttgcctagtctaagcatagttggcaaccatgttttcattcttgaacaacatactctttctaattggtgattatctctttcttaattctagtggacaatatttttcctcacattgctatgtcagaagaaaaagaggtataacattacccatattttctcagattcttcctccatccaaccaaacataataataataata

SEQ ID NO: 326847 - DNA, 1193 bp, Cannabis indica
tttatgcactgtttgtttttctgggtttctctggagttacagagttgtattctgtaactacggaaaaactgttttcagtaccagtttcattattccgcatttaataaatcacttaattaaataattaaactgggaatattaaatacgaaatttcaaattgtattgctctaacatctgaatcaagagtggcaagttgataattctaagactcattccaaacttgcaaaatctggtatttaactgcactaaccacaactaaataaaacctcttctagattgattgcttctattgaacaaaataattaaataactaaattatagaaaaatgtgagtgtatataacaaaaccaaaaatcatgaatatttatttatgtttataacttggtagattattggtattggatgattcaaaataactaatggcacatatatgtatatatatttttgaaattttttttatcgatttgtatgcagccaaaccgatagagagagtaaatgagtgagttgtttaccatagatctaattcgccgatgcaaagtgagtggtccaattacccccattgatcatgtggagaactaagatgagtattgaattgtgagctaatagtgagactccgaacttattgttcttagtaagaccgacagacagaggaactcagagagaggttcaacaacggttttcagagaatggaggcaagaacagattcctgcagaaatgggatgatacctaactaaaattagaaatatattattattattattattattattattattattattataagtaaaaataaaggaaacatcttattttaattttatttttaaagtagaatcatagtccaacccaaatatttagcataaatgtatttaaatattcctaatcaaaatatgtaatcaaaaaaaagtatcaaaccaaaaaattaaacatcaatttttatgctagcatcaaatcccaagataaaattcacatacacaaatatattcataactcttaatttaggactttgaatgatgaaatggctcaattagacataccctaaaatagaacgaaggctttgaatatcttcataaggcgaaataatcccagtctaaccagaggcaaagtcttccttacatctttggaatagctactaaacttaggggtgtacatcaaaccgctcaaactgcttgcaccgcaaaagaaatgcggttt

SEQ ID NO: 326848 - DNA, 1516 bp, Cannabis indica
agagagagagtagatagaggggggtatttttggggttttgaaaaaagtgtcatattttttgtagtgtataatgtattggtttaaaaaaaattaagttttttaagtatagaaaatcaaatttcactattgtaattactatattattaactacatgacttaataaacatgatcacaaacttgtttaaataataatgaatactctatttatgaagttcataaaaattgttggggcatttttttttaatgaaagctatatattagaaaaaaaaagtagtctgacctcatggtcattacaaaagataacattcaaaatagtagaaacttctaccataccggaagcattgttaacaaaagctcatttggctacattataggctgcaaaattacagtttctagtaataaaataaaaattacagctagtcataaaagtagagagatgcttgcattgtcttgtatagttctcaatcccctaaaaagattggacaccttttgggttcttgttggggcattggtgagtctaaaaaagataaccaaaaattcataatagtcatatctattaatacaagttaataccaaatataatgttgtattaaataatactaatacaatataatatgacataccaaacaagccgtcattgtgagatttaatacatgtgtcacgcagctaaacccatatatttattatttgaaatatatgtataacaattgtcccctaagaagtgtttttaaatttgaaaagaatttttactcattaccttggagaatgtatcgttctttacgggctcgtttggtacgccgtataaggtctgtattgtattaaataataaattacactatgtttggataaaacaatgtattgtattaattattacgatcaaaatttttaatacaatataatttgtattatttaatacataataaatggttcgtattagtttgtactataatatttataaaggatttggggtcaacctcaatctccgacccggactcgaaccatacccacgacctggacccaaacccgggaccggagcctagacctaaacctaaattcggacctggactaaacacggacccgacatagactgaaccgaatccgaactcataacccaaactcggaccaggactcgggacccttactctgaagcggactcagactggacccacaacctggacctagacccagacctgggaccgaacccgaacccaaatttggactcggactagacatggaccagacatagactgaaccagatccgaactcagaacccagactcgaaccaggaatcgggacccttactctgacccgtactctaactcggacccaaacctggacccagacccgacccatagttggtgttgcgatcaaatttattgaaaatatattataactttgcacaatctattaatacaagccaatatcaaatataatattgtattaaataatactaatacaatataggctaattagtaatgttcccccctgaactttgacatgtaccaaattgtgcccc

SEQ ID NO: 326849 - DNA, 779 bp, Cannabis indica
gtatttttcaacttaccaaaaaataaaacaaaaatacggtctgtacggttttcaatttttttttacggttttttagattttatttacttaaaatatagtcgtttgatgtatttttatattgtacttttattattttgttactactttttattatttgtatattatttttatgttatttttttatgtttttataatactataaaaatatgtataaaaaaaattgaacgtataaaatgttaacctttttaaaatttatattttatgtaattatactattaatttttacattttacatcctatttttgatccaattattaaaaataacttggctaagttttactaacctcttttaatgttttttatttttttattgtttggtatgtttcaatggcttaagaaactatttagttactaatatagtaattagttactgatatataattttttaaatgttagttaagatttgttggggttagtttatagttgtgattttatatgtaatatttattacttttgttgttgtaaataatcaaacatcgctattctctcactttctctcaactcccgttagagtttttctctttttattttgggaaataatagtaaatgtccttaaattataggactatgttagtaggtgtcttcattgcaaaatttgtagcaaaatgatcctttaaaattatttattatttatattgtcttttgccatataaaaaaaataatattttcttttagaattaaaagcaaattacttaaagattatggtatatctatattag

SEQ ID NO: 326850 - DNA, 748 bp, Cannabis indica
ttccacaacaaaaactaaaaataaataacacacaataactcaaaaattgattctaattgaaaaaaaagggagtaaaacagttatgaaaacattgatacataagttaaaccagaaacggttccacaacaaaattagtaaaaacaaataacacacaataactcagaaataagttactaatttaaaaaaaagagagataaataatttcaaaaataccgatacataaattaaaacaaaaccggttccacaacaaaatgagtaaaaataaataacacacaataactcaaaaatctgttctaattaaaaaaaagagggaatcaattcgaacaatactttgtcaaattaaatagaaccggttccacaacaaaatgactaaaaataactaacacacaataaatcaaaaccggttctaattaaaaaaataatataatatatattatgttggttaaactatgcacacaaattgaaaaagacacattcatcacaattttgtcactccaataacactctaagaattattactcaattacacaacatgagccactaaaggaatgaatgatataaatgtattattttttttcatcatgattagttgagcacgaaaagtacactaagcaaactactttcctttcctcacgagagaccaaaataaattataaacaactttaaatagctacaacatatacaatcatgaaacacaaaaataaattaaaaggtttttttgaatgctgaactagatatggatatttgg

SEQ ID NO: 326851 - DNA, 1125 bp, Cannabis indica
ttaaggtcgttaaaaatgtcccttgaactattgagattgttagatttaaggacttttttctaattttagtaaaaaagtctaacatggatgaaagttcaggggccataatttagtacatatcaaagttcaaggggtatgatttgggagatattaaaatctagggagcatgatttagtacataagcaatcactgaaatagtaaaattgaatgaaattagacaagagtccttaaatttaacaatctcaatagtttagggagcattttcaataaccttaaaagttcaggaggcataatttggtacatgtcaaagtttagtaggcaaaaatcttaattagcaaatcaataataacaactatgtattagaatgtgtcagaattaatttgtacaatttataaatattttaatatttattttaattccgtataaacttatttttcttaaagaagcctaaaggacccacatggcatattaatatataataatatacttgtgggtgactggttagaaaataaataataagtgactacatccatagcctattaagatacatgtaaatatatatatttatatatgataattttttttttttaatttaaaaacttatgtcgcccctaaaatcaaaagtacttttctgacaaggctttctaagggcaatttcgagacaacattgtcactcctacaaataaaattcagaatttcatagattacttttaggagtgacattggcgcccctaattataaacaatttttttattgcccctaataatatttttaggtacgaattattagatataattttttaggagcgtcttgtcgcctctaatagtcattagaggcaattttctatggttttgggtgtcgcccctaatacatatatttgttgtagtgagaaaaattaagagtacgtttagaaagtcacggtgtaattaaatttgtgtgtaattggaggtaattacacaatttaatatatttgtctaatcacgtaataacactgtatttgtgtaattggagacaatttaggggtttcaattgcactctctaattctcatgggcccatgagagtgtaattacacgatacaattactaaaaactttctatttaaatattaactactaaaaaatatta

SEQ ID NO: 326852 - DNA, 650 bp, Cannabis indica
atcagcaaaaaataggtgagagacccgcggaccagagcgagagcacctaaaacccatcaaatcaccatttatctcagcctgttgaaggagcattgaaagtgccttagcacagaatagaaacaaataaggtgaaagaggacacccctgtctcaaacctctcgaagggaccacactaccgcgaggcctcccatttaccaaaaaagcatactcagccgaagacacacagtccataatcaagtccagtcaccgattcggaaatccaaacctggacatgatggcacgcaagaagcaccactcaactctatcataggccttactcatatccaatttcaacgccataaacccacaaactccattattcttcttgaacaaagaatgtagcaactcaaaccccaccataacactatcatgaatagccctaccaggtacaaaagcactctgaagcgatgagatcaacggagacaatgtacctttcaatcgtaatgccactgccttaggcacaattttatacatgacactacaaagactaataggccggtattccttcacaaacccaggcttactaactttcagaatcaagacaacatgtgacttattgaacttcttgaccgattgctccccattgagaatggcaaggcacacaggggata

SEQ ID NO: 326853 - DNA, 2120 bp, Cannabis indica
tcacaatataaattttttgtgacgaacaaaaaattaatataatatttagataaaaaattattattaatttaattttagtcacaataaacatattgtgattaaaaattatttaaaatatatttaattacgaacattttagttacaacataagaataataatttaaaattattaatcacacgcaatctccagtacttttgatacttaaactagcaacaagtagttggaaaaagcattaagttgattaagttgatatgtaataatgataagtctattagttctgagtcacctcataaatatataccacacaaattaataccccaagttttaccgttgaaaattctaagtcaatcaaagaaaaacaaactaataaaatcttggcttaatcattcaaaaaaattaatatatacatattaataaataaataaaagtcttggcttagaaaattctaagtttcatacttcatatatgatgaaacgaaagcttatttggaaaaaaaaaaaacattgctattatttacttgaaggttgtctaataattgaccttaacaattttaatttcaaccacatgtatacattatattgtatatcaacttcttcatatatttttttttttatattatttaaatattatatctttacatatattttattacttaaaacaaatataagacaaaagaaagtagagaaaataaaaatattaattaaaataatatacaatgacaaaaataaagtttaaaataattttgttgcacctataattatttattcttaatgcatgataacggtttaaaccttaattcttgatactataaactattcaaaattatttaaaagtatacatgttatcttaaatattgtcaatatgtacatgatcatgaagaaaagaaaaatcaaactaaaacactcttctaaaaatcgaaacagataccataatacccttatagaggagtgtgttagggtatcaatccaaagtcccacatcgaaagaatagacaagaattatcttgaacataagtgttccatgtcaaaaaataaaaacagtgaggacctaggcctaaagtagacaataccatactaatgtgaaagttaacatgattaggtgtggtagtccaacaaggtggaagaatggggccaacaagtggtatcgctaggtttaggagttgagtagtgggctgcatgtgcgatgcgtgggagaagtcatcaatgtgatgacatcgcgattgaagatttggatggtgcatgtatcgaaagtcacttgatattgtgctagtcaggtagtgaaggttagcagtacaagatgatttcgctggaggggagatcatgagtacatagtccttaatttgaggggagggagtcccatattagaaaaatagacaagagtttcctagaatataagtgttttaccaactccattggtataagacattttagacccaaaacagcaatatgatactaatgcagcccataacaagtgtaccatatacttaaaaaatgctcctaacagccgcatccacaaaaaccaagatagatccaaggaacaaacctccctctctccacctttaccaataatttttacataaaggattttagtttcccctttttttttttgataaaagatgatttagcttttgatatcagatatgatcaaatttggcatttgttatcatcacttgaaattatttatttcgtttgaaaaaaaatataccaattttagagatatcaaattaatcaaatttcaaacaatttccaaaaaaaaaaaaatctcataatcttggcaagagttttaagttttattttggttgaaattaataaagtgagctcttttgtaataataagtctcgtttagtcttaacaaaaataaaaatatgactaaaatgtgatatttggagtccagttattaatataattttattgacaatttattatctatatttatgcatttttgtatttaaaaacacatttatttttcaataaattttaattattattgtcgatatatacacaacgttttaaatagttaataattctgtagcatatgtttttttcaatttcatttttcttctctaagttacaatgtttttttttttttgatgaaatttcaacttcattaaatcaactttc

SEQ ID NO: 326854 - DNA, 961 bp, Cannabis indica
ttattactatttaaagcataaatgattgtctaaatttatacattgatatggactagtaagtgacaagtgtgagggtccaaataaatttaacctatattgagagaggttgataggtatttttggcaaagcataaggtaccatcacaaattatcttattcatatatatatatatatatgcattttcatgttatgctttcacaacttgttgtctaaattttgctaaggaatgtggcccatttcctataatcaccaaatgctatgtctctatttagtttaacaaccaatttatgatttagtactagtgacatattcatatttggcaactaaaatctaactccaaaatatctcaattttttatgaaggataataataatgttaacctaaaaataccatgtgttgaatgatttatttttaacataaataattaaatgatgatataaataaaaaaaaatatttaattaagaatttgaaatgtgcacattaatgatttggttgattcctatataaatataaatatatgcttgaacccacatctcaatcaaaactcaatcacaataattagccttaaaaagttgttattttgtcaatattattcttaggtaaataagaataattttattacaataaaaatatttatcaaatttatttcacatggactaaatgtaaaatattgagttattataagtgtataggttgttactccactcatcatgaccaaaaatcatttagaaatgaaactcgataattcttgttacttatacacctagaataataaattgtaaagcccgcttagttaatttggaaattatcagttggttatgtttaattaagaaattatttatagctatttaaataatttattactgttatttatggaattcagaaatgcatgattatatcatcagtagcttgcatattttgcatttccggtgtccggtcttttggaactcggcgtttggct

SEQ ID NO: 326855 - DNA, 699 bp, Cannabis indica
atttgaaatttttttatgtaaattttctgtaatacttaatatgacattactactatttataaaaagttatatggagttttactttcttttttttttgttttgtaagatttactaaatattttaagtaaaacttaatatgaggtattttatgtaaattttccgtaatacttaatatgtgatgccactactattaataaaaaatttatatgtaattttattttattgtttttgtaagattaatttaaaataaaatattttttatttttaataaaattacgctaaagtaaccaaaacataatattaattgaattaccaaaattttattataagaaagtccatttgaatttgaatcccttctgccaagtaaagaaaataaaaaaataaaaaagccttttatggatttaagggttgtgagtaattataaaatatatgttttttgaacatacattttaaataaaatatataaaacctcgtacattggtgcttattattcattttcttttctataataaagaatgaaagaaatgaagagacggatttaccaaataaattgactcccagttacattggatagatttctcgtggggatgcggcgtctctctcattcagcttgccacttgattgtggatatatactaaatccggcccacaaattggtgggcctagtctttttgtgggggcctgtatttttaaatcctct

SEQ ID NO: 326856 - DNA, 615 bp, Cannabis indica
aattagtaagaaaaaattatgcacaataacaaatatttgctataagctgtccagacattcgattaatttcaacaatgaaatttacatcccaggtgaaaaagaaatatttatgaaatttacaattgatgacgaaacataaagcggtctccataaacttagttactttcacaaaatttcaactatgaaatttacatttgtattgatttcaaaaagaaaattacatttgcatttttaaggtttgcttataaattaagttttctttttcacatatataagtcactagatagccactagatattattaatttttttctaatgtctttagccatattatataaaagttccatttttttttagaaaaaaatagacattaaaatcaagatacatccgtacccaacccactgcacgtgaatgataggaagcaagcttttcaaatttgaagtgtattatgcagtactattttgtataatctcatccaaaacactactatattttaatcaaatatattcatagtcatatattacaaataatcaaataattaagaagcaaagccactaaaattaggttgataataattttatttttaatttttaatcacaaaataaaataaaaaaaa

SEQ ID NO: 326857 - DNA, 624 bp, Cannabis indica
attagttataattttttttttttaattttagtcataaattttcaaattttcttaatagtgggtatatatatatctatagttatatatgtatatcaagtattgaagaaaaaaatggaaaaaaatataatggaaaaagagaagaaagaaattactagctatatatctggtatacatattcttgtccctataataggatgagaataatattattaaataattaactttaaataaaatttttgtaattaatatttttcactgatttgatcgagagaggtgtaaaattcaataatattaattattacagattttgtgggctaactttattatataatgtaagaattaactagggatgactaataaaatacttttatttttatttttattaaaaaatatataattttgtatattaattagctttgaatactcatcttttaaacaatatagcttgaattaattaatattttctatagagacaaagatagaattagaatgtatatatatccgataaataaatatatagttgatatacataaatgaaatacgaacaaaaagagtatcatatatattatatatgtataattattatttaagggctcgtttggaacgccgtattaggtcgtattg

SEQ ID NO: 326858 - DNA, 1440 bp, Cannabis indica
aatttttgacaaaaaatatttttgtttttgtactggtagtaatttttctagaaagtagatgaaaaattaataaatttaagcttttacataactcattttggatttttatttaattagttatgattttttgaagtttgaatgaaaatatatatacctaaggcaacacatgcacaggctgatagggttgcacctcagtcatgatagagctttagacaaagctcacgatcgaggtttctcggacactccttatctgaacgagacgatgactgagctagctcagtcaagatggctgcatgcagcctcatttcttgcgcaggctccctctttgcgcgtgcggggagtatgcattgtgttgctttgatttgctatttttttttttgaacttttcaaaatcagttttcaatgaaagaaaattcaaattttggtagaatttattgtagaatcttaattttcaaataaaaatctaagtattagattaaaataaattttaattaattttttaattaatttaaattagatttagatattagtcagctttgaatttgaaaaattaatttttccacaaactttccttaatggttattttagaaatttaattatttttatttattttaattataagatcaaatatttacatattttattattaatgttatacctgaaattcagttcacttcagaaagggacacgtgttatacagaggaatatgaaccacatgatataatgaaattatatcatttcatgcgaaaaacagtataactcattaaataaaggattaatataaaatatttataactcgctgactatgtagtcttaagcgagaccaaaatagaggactattaaaacctatattgacgagacacatgcctggcttggagtacaaagatccaaggagataattcatttattttgaaggaatgaatgtggttatccaaagtaacctccgattatgtatagcgagatcatcaccttgctattcataagagacttggcgaggcgaatcatttgctaacacttagcatttttctacataataatagctaaggataacaatttggaaataagcgagatactattgtccaaattagcattgaccatcgaaatgataagaataacgtgcagttaagcagttatatagtattttgatttaaatataaataactgccaacttatattcctataaataggggcaaatcccaccgaaaaagggacggagaattctagagagaaaaatgtatataatcaattctatattgtatatgatattcagaaagtatcttaaataagatagactcgtggagtatgcagatttaattgcaaaactacgtgaaattatttggtgttaacttcactttatttatttcttattatttatgagttatattaattacgtaaaggcttattattggttaacaaaatctgcgttaacagtttggtgct

SEQ ID NO: 326859 - DNA, 2590 bp, Cannabis indica
tataatcaacatacaaagtaataaagacttggagccttctcaattttggttattttagcattaaaacgtttaaagtaatcctgtaaagactcaccggctttctggttaatatttgccagcgtgtgcggcagtttgtacgtcatcgtggcttggaaatgcgtcaaaaataggtctacgaaggtttcccatgttgatatggaggcctcaggtaattggctaaaccaatcatgagcattatcatccagggttgcagcgagtatctgacatttttccaactgtggtacttggtctacttccataatcgtattaaatttatctaaataattgattgggttggtagtacatttgtatttgagcgatttagatagcctaaaaccctttgggagtcaagcttgtctcactttttctgtaaaaggagatgtcccatggattttgtaaatgggctttctctgctgctcgatcattcttaatgctcgcaggaggctttcttggtcaatacctcctggtaagacagaattagcctgtgttttcgctggtatagcagtaaccacagctatgttagctaggattattacctttatggtcgcagctggtgcgatcagggggttgattagattagtcaggtttttcacgttctgtgtgtcttaatttcccatttagggatcacggggctcgtcatcatcgtgattccttggtgtctgggattgtgccctaaaaatctcattgagatgatcacgaaggtcacctctatgaacatggtatctccctcctcattgtgtctcaacagtcatcgacctggtataaattctaggggagcgactgttagtgaaagaagaatgagattcgacttcatttacctctatttgtgtctgggcctgacttctcgagttttgtcgttcagggttgttctcttgtggtctctcttctctaccgtgaccggcataaggagtaatcgactccccactccatatggagttatgtgtgggctaattcagatcgagatcctcttgctcgttcacatgtttcctgcaaatacaattattgttaggatgttcatttcatcgtttgtttgtggtagctacctgagggttgcctgaacgcgtgttcgggatgcagggtagacgttgggtcctaactctcccatcgacttcagcctacaatgcccacatctgttcctgcatggtcgtatactatgctgttgtcagctggacaattctttcagaggctacgactggcgtgatagatgggaagtggcccacagcggctgtcagtgtcgacgtctctcctagatgaccagcagtctttgggaacaaaatgaaaggagtaatgttggtttgtcccacaaccccattgattgtgtcagtcagattagttccatcacctgggagtgggacattcattgttccaacttttaaagatccagtatttctgtttgtctggtttgcagccatgttgattttcctccaaaattaaaagaagtttccacggacggcatcaaatgttgtcgaatgaatttggacaacttcaaatataaaataaagagttgatatttaactaaaaaaaacaacgagtactcaacctaaaacaacaagtattcaaacacggctgcacagacaaagtaatgaaaacaatgaacacaaagaagtttagtggttcagtcaaatcatattctgcttagtctactgttgcaagggattttctgtctcctcttattcatgtcggaccacctctttcttttagttacacaaaacttaatcggttataaaactgttttacattaaatattaacattaaattgaaataaacgtaaaagaataaatgaagaacagttaaatccgtttcactaaatacaacactgtatgcgacttccatagagcgagttgcatgttcatcttctctcacaagctcgcgacttagggtgcgttttatcattctaaaggaggctaacagaccttgtactaaggtatttgcgtcctaatcgagtcgtgtatgaggacacctagtgttgataacataggacatacaagtccttatcaagtcatcgagtacgctgggtcacttggaccaactcgctaagtaaagacatgatctttactaggtcgcaggagaagactacttggtcatctcatatatctcggtatgtgcgcgacttgtatacttccttcttgatcatgctgcttattttatattacgcgaggcgtaataatgcagctagactctgtcacggtcacatcatctcgcgagtttgattcaggcgaggcttattctcaaggagttcattgttgacaactcaacgattctcaaaagatgtgagttatgggagcttggtctcgagtttctaagtgaaaaattcgcactataacaacagtcaagttagcacaatatattatatagtcacaattgagtattataacttagattggaattggagtttaattttaagtaaaatgtgtttatgaatattaattaaatactaactgactatattaatattagtggtattattcgataattatgataaattccttaaattatcccaacattattgatttagttgacttggagggatacgatgtcttttaaacttagg

SEQ ID NO: 326860 - DNA, 670 bp, Cannabis indica
atggtagtacccttttgttgttcatagtaagatattcattcgaatctcccatgtagtgggctgacttcaccaacatcctgatggagccattaatccaacagagctagcccaaaggagaggatgatgaactcgcttcgacggaacaagggtggggctagcggcgaaggtgactgatgtgatttaggcgactgggaacgataacaaagagagatgtgaactggcttgcaatttaagggttcgggtctgaggcaaagttgtaagagagcaagagaagtgagaggaatgttggttcgtggtggtggtcgatgtggtatggggcaaatgatttcgttggtcaggggagttggaaagggtttgctatgtatattgttactcaaattaaaataatgcttttttatagattgtatagtgtctctaagaggaagtttaactctaagaaataacattttttacacaatctgtataagataacaaggaattgatggttggtgctggtttttttgtaagcctttttgtggttgtttgtgttgcttgatttagtattttgcttgtgagtaataaaaagtttcttttcttaaatcttttattattttttttttcatattttgtattaaaagttagtcccacattgctaatgtgtggaaataaattgtgatatataagctgaaca

SEQ ID NO: 326861 - DNA, 1721 bp, Cannabis indica
agatattgctacctccatgctcacctcaccaaaaataatgggaaattaattcaactttcaaaattattaattaattattactaattattcaaagtctaaaaccttgtttgttggcctgcctccccatatttccaaattccatgttaatcatgaaaaataaatttaaggtggatattgatgtaaattatgacaattttattatttgttttttttttgtagagtgacaaaaataaattttaagaggtaatctttatttaaagaaaaaaaaatgaggtaggatattattcccactagtagcaaacccaataaaatattgctatgagacactcatagtgcttagcatttaagggtggcaatttgtattcacaggtcgtattcgtgttgtatcgatacttattataataagtatatgctcgatctgaacacgacccatttaataattgtgtcagaaaataaaaccctaacatgacccatttataaatgggttgacacaacacgacccgtataactcgtttataaacgtattttatttaaacatgtcaaccaataacaaatttttgaagtattcaacatgtttatggctcatttatgacctgttaaagtactaaaataactttaaataggtcattaatgagtcagtttcgtgttagtcgtgtcaacccgaacacggcccgtttattaaacaggttagacgagtcaacccgaaaacgacttgaaaccgtataaggcaaacccaaatccgctaactctcgtgcagattttgagttgtgttatcgtatctgacccattttggtagccctactagcaccacgatgaactgtccatttataatttgtattaaagtaaaataaatgagactcgatattaaattacattaataataatattacaccttataaagatgttaagcaccatgagtgccctttaacatttctcaactcaatatttaaatcaaagggtgtacttttttaagaaagtcgcgtactttgttttctaaatgatacaacatattaaaaattaatacaaatttatattttatattttaatgatattttaaaaagtttaaagtaacaataaaaatattaactttaatgattaaggtaataattacaagtcttattggtataaaaataaaatagctcttgttgcccaacattataccactatactgatgtggcgagttgtgagtgattatcagtttcctatgctatttattaaatcaaaacgtatgcgacctgacattaaattgcatcaataatggtatgtcacatcttgtggtacttgacaccttaagacgcaccttactatttctcattagcattgctattaggcaccactactacaaaaataaattttaatttcagttgttaagcctatttatcttcaattttaaaattatcactaccgtagacaattgaggcgaagatgtaagggggtttatgttagagagtcccacattgataatgtgtagaaagataatagaatatataagattcatgagttactcctctcatgaccaattaatttttagatgaaactccatccatcttcccaaacactcactttctacctttgtccaccacaattctaaattctaacatgttatcagagccaaacaactctaacgagtatccgatccaaaaataaaaagaaatcgatcgaaacaaaagtacagcaaaaaaaagagccaccaaaaatctaaaaaactgattaaaaaagta

SEQ ID NO: 326862 - DNA, 775 bp, Cannabis indica
aagaaaatcaatgagaaattccaccacaaaaccacaaatctcggcctatggccaaacatccataacgtgcctaaagcccaacaccagacctagagcctccaaattcccaaaactcacaacccaaaacatacagcaaaagcccaaaaacaacttgatcgatagccactaagccatctccaaaacacgcaaccagatcgagactgcctgctaggcaatgaaactaaacgagaccaaagaacaatcctaaaccaccagcaaagcaaaagatacctaggagaaaggagactacaataagatggatgattcgagaagtccaccccattgcatcggtcatcgtacccgatcaaagccacacctagaccctaaaggggtcggtgagcttggccagacaaagaaaatgaagaagaaagaatctagcagtgtcaaggtatatgctagagagaaaatcaaacaacagtagcccttgttttgtccatataactcaattaatggcttagttggtgtgaaaaaaaaaacaacctaattctcaactcaaaaaagtatggaactatagttcaactttaaacaaatattaaatgagttaatttttgtggtaaaacctcccttcaacgactatctcattggtatgtaatataatagtgtaacaagatgatccaaaccaaaaaaacaaaacagaatacaattagaaattaaaatgatacttaagcaagaaataactgaacagagaaaatgaacacaaatcactacaagaaatatcacttttgccagcatattt

SEQ ID NO: 326863 - DNA, 1008 bp, Cannabis indica
tgttgtgctatttgcaattttttgagttatatcgattgataggaaaacttctgaccaagttacatgaaatagcctgaccaagttatatcggagcttggtgagcctaactcagtggatttggttatcgattgtcctcaggaaacacggtgggactttcagtttcgggttgatgcctcagtggtgcagggtgcggctggaactgctgcaatccaggttgatgttgcagaggaggaagctgttgtcttgctgcatcacctcacagttgagagtgtcctggaaggtgagttccacgccatttggtctgtgttgtcctgggcaaaggagaagaaagtagatcatgtgcgaatcgaatctgattcccagattgcagtgaaagcaatcggtagccgcctgcttccttatgcttggggttcctttcctttgtttcatgattgctgtagtttaatttctggttttaaaggctgtgttgtgtcttttattcctcgtactgagaaccttctcgcggacaatttggcgtgttatgctcgaatgtccagtgtttcagtttgtggtttgttaagggaggttgccccctttgtggcagccatttgacttttgtttgtttgctttcaataaaattctcacttaccaaaaaaaagttacatgaaatagcttgattggtttgtaaagtacaattatatcatttaccaaatatatcaaaatcccaagaggggattcattccattaggaaaagagatgtttgctaatgcttaattatggcaataatgcttaattatggcaataaactcacttctttcctcagtatactatgctctcagctatctcttggctgtccttacgaggagagctccataatcaactgtgaggtgaaccaaagctttggctttagcctttaaaattttatgaatatcttgctgtttcaatagcaatagttagtatatgctaggagaaataggtcataaaattgtgtcacattgcttttgcagaatattcttgtcctctaattct

SEQ ID NO: 326864 - DNA, 949 bp, Cannabis indica
aacttttgtaaatactttgtaaacaggatcccggtttaatataagtatgttattttaatgtttaagattaatcaagcaaaattttatttaatcgcaattttttaataaactcgttggtcaacaacgagctgcatagttaattaaaaatcacgctaacatgcctaaactagtagggtgttgcaaataagggatgtcgtaggttaaattgacatgtactctttctcccactaactattttaagttaatgtgtttcttttattaattctcataattaatacatattaacaacttttataattaggattaatttatttataataaaagcctccaattataaataaattacccaacattattattacatctgaattaactttttatttcataatttaaaactcttttaaaactagtaagttaattttaaattacaaagttatttataaattaaacttagccaattttaatatttttggtttcaaaaatggtaaacacataaacacataggacaatcctagtatatcatgtttctagtatgagatgcatgataattaaaactttttgggatttctatgtatgatacgttattcaataatgcatgagcattttattaatcaactattaatgaatattttatttaaaagaaataaaataacaatgagaataaaccgagtataaattgggtatatctaatcttaaaacctttaaaattagaaattaaatgacaaaattaatctacatagcagcaatagtttttttgtaattttatagcatcatcgtaagcatttaaattaattaaaacaattttcattgattattcttaatttaattcatattttaaaccctttttaattaattaaaataattttagttaattaattcttaagtaaaccttttatttatgataactattttattgttttttctaaaaataataacatttattatttta

SEQ ID NO: 326865 - DNA, 772 bp, Cannabis indica
  modified_base (759)..(759): a, c, t, g, unknown or other
ccaaaatcattcttcccttaaacttttccaaatcgaacttcgcatttcccatgattcccaccttgcgttcttcacactatttgcaggagcttcttcctcgatctttgaagctcaagaacacttctttgacagaccaccaagctccaagaacgcctcggctctgataccagattgttgggaaacaatcgatttctaatgatgctgcataccatgcatgattgcacacttgaactgaaaccagttctttgaaccagaaagaaaattagagagagagttgggaaagaatagttgtatttcactatatcaatgaatgaatacgagttgcttactaaaatgtgtttttacagtatatataacttgcctaggaaataggaaagctaactaacaataactaactttccctaactgctaattgaataaaatcgacaattacattaacatgcttaatgatatatctcatgttaggatatcattccttagtttatcttattctcattgtaataggtctttaaatatcattactcattctttagcaaaatgagagcatattttaggtgggtctcgtgcacaggcggacttacatagagcccagggagggcttaagcccaccctcaaattttagaacagattatataaaattagagataaaaataatacataattattagacaacataatttgtataggtgtttattcgttactcggaaaatgtggttttgaatctgattccccttaactctatctcctatttttatttanaattataaatcta

SEQ ID NO: 326866 - DNA, 2464 bp, Cannabis indica
agagagagagaagagagaagagaagaagagaaagagggagggaattaggggtttttttaaaaatttttatttttttttaaaatgtttttttaatttttaatttcttaattttttaaagaaaaagaaaattctttatttttttattttttagtttttataataattaatttgttaattttttttaaatatttatttacgtggactaataaaattatgccacatgtacactgtgtacacgtaaaaagatgtggactttccaccatggcagttaacagccaaaaatggatggaaagggctaagtactaatagaacttgagtttaggaggttttaccaccaaaattttagaattgggagttagttgcaaaaatttagccactttatgccgcaaattactcttttagaaaagtttattgtacactcccgaatttattacgtgtatcttcatatgtttctctaaataaaaaaaaatatttttgaattagatcacttataaaatttaaaaaaacaattacatattttggttgaatatgtgataggtcatttttaattagcatattaaaaaatatttaaattttattttaaatagtataaattattttgaagaaaatttataaatggtccttaataaagaaattattaaaaaaactcttttaattaaatattaaaataggatgtagctaaggtcatcttttaagaacatctaacataaatatagtgtatatatattttttagtccatgttcataaactaaattttaataataatagtaatgtataatatgatttaaatttgacatatacaaaaagttatgttaattggtgtgtgggtaatggtggtaacatcatggtccttggtgaaccgtggctccccagtgaagataaccccgtcatcacctccaatcatctgctctttgtaatgtacgtgtaaacaacttgatgagaccaggtaagcttgcttggaacgatgagattttgaatgatctttttaatgacagagatagaaagcttattgaaaatattcatcttaatgtttcacaagtggaagatcatttggtttggagaaatgagaactcgggtttttattctgtcaaaaatgcatatgccctgctgcagaaaatcaagggacactggtttgaagcctctgataactctttttggcccacgttctggagattgaagcttccattgaagatccaaaatttgtttggcgtgcgtgtacggattgtctaccaacgattgttcaacttcggacaaaacatgtggttgttggttcgttatgtcctatctacaacgaggaggacgagtccatcttccatgtgctagttgcttgtcgtgagactaagaaatgttgggaagtgtgggcattggaatagtgcaagttcagggtacaagcttcctcagttgtgtttgaatgtcttttgtaacaatcttgtagcagctgtttgttgggttgtatggggagctcgaaacaacctagtttggaaagaaaaagccttcttgcttgatgacattgttgcgttcgcatttcgctaccttgataaatggaaaagtgctcaaaaatctgtagattcgtcatggcctattcttcaggctagtgatgttaatgagcattgacctttacctcaagctaatagtatcaaggttaacattgatgcaactctttttaatggcggtaggagtatcggtttgggtgtggctgctcgtaattttgatggtttttggtagaaggttggactaagcttctttcaggccatgtggataaaactcttgcagcagcaatcggtatccgagaggttcttaattgggtaaagagatgtggttgggaaaatatcttcatcaaaactgactctctgtgtgtggtgctagctattcaaagctcgattaaaatgatttccttatttagtatggccattcaagattgtaaagatttgcttgcaaatttgaataatgttgttatttcttttgttaagtaatcaactaatgtagtggctcacacgtttgctaaaactgctagattatatcctggttgccatttcagtttggagtttgtttcaagtgacttgctaccttgcttggtggcggatcttcaagtctaataaagataaattttcagtcaaaaaaaaaattatgttaaatttagaatatataacatgggctatattttataccacaataaatattattttgtgtttacttttttgccactcattaatatactaggtcgatgctatatacaatacacgtatgattagttttcttttttaattaggtgatgttaagtgcaatacatgtatatttaatttttttaatcaggtaatatttttttattttgtaatttttaaaatagggtttgagattttttttagctattgcggctacattagtgtgctctttagatgtaattttatataaacatattttatatgtacaataaaaaaataaatttcattgttatacgtatttt

SEQ ID NO: 326867 - DNA, 1553 bp, Cannabis indica
cagctaattgacgcttttgaaatcacgtttttacacccctgcttaagatgtcagggcagaggccatcactgaaagtgcgataggaggccaatgctaaaaaagtgatgggtactagctcttttgtgaattcctggacggtgaaacgtcagaggaaaccactatacgaactggctagtgagagcactttaccgagatgttctctattccaatattttgataaaagagccaactccaagttctcattgtactcaccaggcttgtatgcaccttttcctgtgcagaccttttcagtttggtccaaacgtgcttgctataggatctttattgtcaaagaatattcttcagagcacttagtctcttacgaagaatttactcttcttgacttgtttgttgaagcacctgccaaatttttcctagcaaacatgccactttaagttgacttggtctcttcttctttccctttcgtcaagggagttttctagcaggatgtggtttacttcttagtcattgtataccaaaatatgagagcagactgttggcggattgggccagccagtgtacagaacaggtggtcaaccatgttggagcattgcctagccatttggataaggctatggctggccagcctgtgaaggtagtggccggctaggttattaattccatggtcggccagccttttggaggccaggtcgatgttgtagtttgatcccttctacacttggttaattttgccccccgacatgattaccgtagaacctttgtgaactcctgtcagttgctattcagcttctttcttggtgacccttcttagaagtggtattgggataccacgtctctgcgttatgttgtccataattggacactcaaaagctatccccttttatccttgctatctagaaaggtttttgtttggaggtatgctgctataggtatatccatgttggatgtttgtcttgcatgtctatttcttttgaaatatagatgcttagttctttagagaattgtgcgggtaccaagtttgccttgattgtcaaggcacagttggctagtcgagtgagtgcgtcggcttgtgtcgtctttagggacttgccttttagtacagcctttgagctgacctaacaagtcttgaaattagctcaaataggccatcatctttttgcattgaactgcagattcacctagaacatgacctacgactagttgagagttgtaatatatatataggtatttagcccgtgctttgtgtgctagactgaggccagtaattagagcttcatgttcagccccgttggtagaagctttgaaactgaccttacttgcctcgcgcaaccattgccccctaggtgtcctgagggccatgcctacactaggcaggtggtcaatgcaccttctgggaggatttgtgctactcttgctctcccttcttctttggctcttatttttctcctgaactttgagagatttggagagatatgcttttatgtttaggcatgaagctggcgagagcttggccttttatggccatgctaagttgacatgtggccttatattgg

SEQ ID NO: 326868 - DNA, 1142 bp, Cannabis indica
aatggcttaaaaaaatgtaaccataatggttacaataaaaatgtaaccattaaaacctcctccatatatataaatatttagaacatgaagaaaaaaaaaagcaaatctttgtaatattgttcaaatacataaatggtagctacttttatgggacaaaacatatatcaaaataaatatgttttgaaacttaaattaaattttaatatataaatatgtgacttattatataaatttataaaaattagtttggtgcagtttgaacaataatattattaaatttaaaatcataaactacatcgcatcacataatttagaaaaaatacaaaccacaatataataactattattttattatttatttaattattatggaacaaaattaggttaataccaaacatattagtaatatttttgttattatagaattttgtgaagaattaatgaattgctttagagtaatttgtcacaaaaattaattatttagagtggagatattgataattgaattaatattatccagaattcgttagattataaagaaataattagcacacaaggtttagaaagtgtgtgtttaattatttatagattagggtttcataattagagttagtttgggaatattcttctctgagagtttcgaccatgaataattagtagggttttcaaattttttttaagacaagtttaattgtggaaactaaaactcaagacttcaagtgttcattgttggtgtttaccgagattttttgaaactaaatatttaggagctaacaaaataataaattgtagaaataaagagacgaagtttcttgcgtaaccttactccacgagtaagtctattagcttcttagggcaattttgatgtatttacattattttagcaagagatcctaactctttacccttagtttctttttaaagaagaagaagaagaatgatcgaaatccaagaaccctgaatggacctgacataaacaaatagttcttcaccttctggccaaaaacttaccatcttccatttacagtcaatgttggttacttgaacaggaagtccatcccaattataatatcgaacccaattaattccatgtaacaagtttgattgttattctatgtgattaggggtggaccatcctatgg

SEQ ID NO: 326869 - DNA, 1072 bp, Cannabis indica
atcagaggtcttaagtcacatttctcgaaaaaccataagtgttgccctaacactttcggggcttaaattcaaaattaaaaattttcctatcgatccataatatggaaataccctaagtatcaagaaaacacttaatcgcaatccgaggataagactcaaaacggacagtctgttttaaaaatggctgtcctaaactgcctaaatcgaacggttcgaaacctctatgtctgagtttggaattcccataactcacccattgttgggccaaaccttaccaaattttgcagagcacctatacacatcatagtgaacatttttcattaagaaaccttatccatattctcaacagaaatcaaattatcacgaccaagtcaagtttgagtttttgaactcaaacttgcataacttttgctacaactgaccaaaacacttaaaaccacttctaaacagtcataattaaccttaagaagatttttctaacctcccttaacttcctcaacaggtccaactacaaaaagccactgaaaactaacaaaaaccctaaaaaaattcgttaaatttgggttaagttttaccttaaaagtttagaggagctagggattgaactccttgatcaacttcagccagaaatatgcttgaaactggtagaaatttctggttttggccgtggtgcagaagcatgaaggtgatttactttttacttttgactttcttttccttttatttttccttcttattttctcctcaaggtcaccaataaatggtgagtcacaaccctctaaaagtttcaaataaggtgactaagcacttggggcgaaaagactaaaatgtcctaacctccccactaagttatctcataacccttggaataaaatggttcaatactgttaatttgctaaacactgatattctaaaagactcaatgatactgccccgtcaattacccaacccatttccactattaccaggtacaaaaatgtgaaagggaaattttatttacaccccaaaaatttattagtacaccctattttaataatttttattttatataaaatttatatctttaattcta

SEQ ID NO: 326870 - DNA, 585 bp, Cannabis indica
taactatggtcgggttaggtttaaaatataaaaattacatttcaaaataaatatctaaaaagtgataaaaattgaatgagtcttccaagtcatgttggtgagtaatgagaggcacgtgccgctaaggtaaggccactctattgggtcaaggtgatgggagcgtgaggatccctttggatcgagacgatggaggtgtgaggcccctttggactgagatgatggaggcgtgcagcccctttgggccgagtgatagaggcgtgagacccctttggaccaagatgatggaggcgtgaggcccctttgggcggagatgatggaggcatgagaccccctttggaccgagatgacatgagaaggtgaggatgcccatttggcctaaggtgatggaggtgtgaggattctcctccttggtccaaggtgtggaggtaccaaggagacgcctccttggtttgaaatgccatgaagaggtgagagtgtagaaccccattgagaggaccccattagaaggcccccattagtgagcctttcttatgtcaaagaaaaatgggataagttgaaaaatacatcttttttgtatccattaat

SEQ ID NO: 326871 - DNA, 1307 bp, Cannabis indica
ccccattagaggcgggtccccgcggggccccattcccgtggagaaaatgtgcatccctaatgttacccatataattataactttaatcatttatttatgaaaatggtagataaggaaaaataatttttaattagtatagaatgacttctttaagttattttatttaggaaaagtaattctttagtttacaattacaatttctattagaatgagttttttaacgacaataaacaaactaaacacttgaataatctttctttagaaataacaattttattcctatatttatttatgcaaaccaaacactacttaagttgtataagaccgatactgatataatattaatatgacactgagaaaaatagtaataacatgtactacttaattttatgagtcaaagatacttttggtaaacacatcaaccgatgatgcatactcattatttatttaagtgaatgaatggtctgattaggttcagaattccatattttttaaaattaactaattatatttataaatagaatttataatgttttattcatgcataaaccctcttaaggcttattcttcttcttccaaaaaagaaagaagaggatgtgtcatgtgtggttgccttgaaccccataacccctagctagctagtactatgccctaatccctacaaaccctaaacaatggccctagttagtagtattttcatttggccattacctaatccactatgctacctataaatatatcctactatctatatatacatgggattccacaaattttcaagtttggaattgcatgcattcaatatataaataatattaatgaaaataaataaataaataagaaggtgaattattcaactcaaatatcaactggtcttttgaatgcattcattccaaactaataaatacatatttatattcattccctacaaaacactactactaataatttactgatttttttatgtagtggtatttttttgtcaccattaatttgtagttgtacctactacaaatttaaccataactataagttaaaaattaatgctggttatttttaaattgaattgtattgaatatagtgttcttaactcataataataataataataagttttaatatgtcacactgtatattaattaaaatattaagttccttacaaaaaaaaaaataaaatattaagagcatatatatatttataataaattattagatatctttatatattaaaagtgcctatctaacggcaattcttggtttaacgattcttggtttaacgatttctttttttttatttagccttacac

SEQ ID NO: 326872 - DNA, 1621 bp, Cannabis indica
atatataaatataaataaataaataaggtatcaagcaatattgtaataatttcccttttcaataataggtaatagacattataataaaactattaagaaaagcatacaagtgcataattacactttttcataataatattgattcttttatgatcttacctcaataattaaacgaagatttaataaaagattcaaataaatatatgtataacataataaaaaaaaatgaaatacctttactacaaatcaccctttgatatattatattcaagcaaagaaaaaaatatattaataagtctctttcatcttttaattattcctaaaaataggccatcgaattagttgatcattttacaaaagtaaaaaaaaaacaaaaaaatagtaatttttaacgtccattaaagactagaagcaattaatttatgagaattgttatgagacactcatacttataatacttatagtgtttagtattatataattaattaataattatttattaaaataaaataataattaatattgaattgcacccataacaatattacttaatttattataaaagtgctaaatattattggtgtcctttcaacatttttcttaatttatacgtagatgatgatcgatcactagtttttgcaagtttaatgactttattgagctgggaacatggattgcaaggcagccttttttcacacacataaatatatataataaatatttatatatacttattttccattgaaactattaataaagaatactacaactattattaaagcatagatagtaattatttcctcatatataagtactcacaaacctagtaagtagtaacctatcatttgattctttatttacttcttctttgtttgttttttttttcttatgaagtagaatttgtttacctttcgttcctgaattcatgttccctcatagaatgaatcactactcattattattattattatttagaagaagtagtagtagtagtaggggacctaacttggcacatgtgtccactaattaattactgatcagaccattttctctatcagattcagtccctcatatgcatgcctttacagcttgccccatcattgttctaccagtcaactacccccaaccttaattatagtaaattatttagtattcatttcttacaattattccatactacttatatctactactcttttgaagaagagaacattgttattattgttattatgtattaattatcggtgtcgtctaatattattatgagatgcatatgataacatttttagttatcggagtcgtctaacattattatgagatgataaattttttttgaagggttagtaatttttatataataattattaaattaaaatatatgagattaatttgatacttaattacaatactatatactatattactattaacaatatgatacgttgtaatagtattgaacctagtgacaccttttaataattctctttaaaaaaaaaaaaacgaataaaagaaaataatatttgttatatacacataaaagagaaaagggtactaattaaaggttaatttgttatataaattaacaattaacccaagatatatttgtatataacatagaaca

SEQ ID NO: 326873 - DNA, 911 bp, Cannabis indica
ttttaaaaatttaaattaaaaaaaaaactttcattgtttatcaaaatactcataaaagaatttttttaattctaaaaaccaagcttaaatttatcttataaatgataagtctcttatctctctccagcttaatgtactttaatgcattttgtttccagttgcttgataggactcaactgtattttcacactaaaacctttctaagaaattttcaaaattcttctatgaaattgacatgtatttcttcttagaaaatataaatttatgaatcaatatgttatgcatagtcccaatatgtagtagagtaatggttgtcctagtttataggaattgtcctattctaatggtgtcaatgtagtagtggtttgtagtgtgaaatgtgtagttagtagtttgtagtgatcctattttctaacattagctattggttaatagctctatataaagagcaagtacttgtacgattttgtgtattcagaaagaaaagttttttttttttttattaaaccttgtcttttctttaagggtaaataccatttcagatctcgtgttttgcaaaagttatagattggactgtctgttttgttaaataacaaaatagaccttgtattttctaaaatactgagcttaattttcaacaattttttttttaatataaccaacttaaagacaattcctcatacgaacagatacataaaatgtaaacaattttgtcataaacacatttaaatcggattattattaaattttattttgacgaaaaatcagttcaaggtcttattgtactattttgtaaagtacatggtctattttgtcatttaataaaatagagggtctgttgtgatattttgcacacgcaagtgtacatatcgttacaagtagtaaactcactaggagtgaggtcgatccca

SEQ ID NO: 326874 - DNA, 838 bp, Cannabis indica
ttattaaactaaattatataagatttaatgtttaattgcattaataacaatataacattgtagtaatatttctcataaattatatatatgagtgaatattcatggctacattaaaaatatttatatgataattattatgacctattataacatgttattaattggtaaaaattttatttttatactcaaaataattataattaattatatacttaaaataacttaatttttcgtttaaaaaaattaatttttaattaaaatatttgatatataagatattcttcacaagtatatgtataaatattttttatttttatttataagaaaataaataaaatcaaggttaatattaaattatagatattttattaattattttatttaattatttttaatgcaattttatttattttttaaattaatcacaatcgttaataataatttaacaactaaaataaatgtaataagagtaattatatatataaaataaaataataatttgttttaataatgtttaacttagataagattcttatttaaaaaaatgtgaagcgttactttctgtaatattttagtttacaagtcactcaataataatattagttcatatatatacaaatatattttaaataatatttataacattggtatagactatcattgtatattatgggcccgtttggtacctcgtacaagagttgtattatattaaataataaataacattatgtttgaataaaacaatatattgtattaattattacgaccaaattttataaaacaatatatggtgtattatttaatacataacaaatggttcgtattagcttgtattata

SEQ ID NO: 326875 - DNA, 763 bp, Cannabis indica
atgagagaaatactcatcctaacaagatggatattttgacagagttacaaagctagagaaggtaaatatgatttactttttcatcctgtttgtgaaaactagtggattgaattgctcttaactacttatattacttttctcttgcgtgcagattcgtgactagaagacgaagatgattcgagaaagtgagacttcttcaaagttcttaatggtagaaggatcttagaagagcaagaaagaagtcattttagtttaattgcacattgaaaatttattttatttaaataattttttttggaacattttattgatttattaataatgtttaatttaatttcaaacttatgtgcaaagttaactaaataagactgcaatgctcatagtataattgtaaaatctaatttaaatgtttagacaatttattttgaataaacattagttagtaattgtttggtatagtaacttctgaaaatttctacaattaagtttaaaataaatttaaatatgattttaattctatattattaaacttagaaaataagtgagatttaattaattttttgaatgatcactattacaaaaaccccctttagagaaggttttatagccgtttcagcatcgattttggcgaaattcactaccaacgctgatcagggcgacgctaaagggttataaacaaccgccaccatatgtaccctatgacgtcggttattagctaggaaccgacgccatagggttacatatggcgtcggttcctagctaa

SEQ ID NO: 326876 - DNA, 796 bp, Cannabis indica
aatcaaaaacaaaaatccatcgatggactctcacaattttattttcaaggaaaaaatcaaaagccatttatctttatgtagctaattaacttgtacgcttattaaagttttgaattcaacgaatacgatatgcattacttaaatcgatctgtcactctcagtggaaaaaaaaaagacaaaattgaaacggtaattcaatggttagagcttaacaaaggccaaccaaggtggtccaacagacaaggctctgcttaaccttaatacagaaaatatttctatcattatatataaaatatatgtatttatttaatttcttttttttttaaaaaaagataatgaaaagataataagagattaaagataatctctatgatattattatacggtgtgacttgtgaggtgctttcaccattctgttgtgaagccaaaattagaaaatggtggtaatgaaaaatccattcccttagccaatttcgtcatatcatgacaaaatatctatatcaatatattgcttacattcaatgccacactgtacaacatttcaaaagatatttttttctctatatatcaccacacattgagattattatagcatctctctcatgcaataaaatcttattcaaaaagtagttgggaaatttcaatttttgaccctaataatacaacctatatcaaaatttatacacctttataatttgtacaaatttagtccattaattacatgaacttcccattttaccctttttttttaaaaaaaaaaaaaaaaaaaaactaaaatactgaaagtgtatttctc

SEQ ID NO: 326877 - DNA, 1184 bp, Cannabis indica
caagactaattctgctagttaaagtgctgtggcggaacagcaaagttaaagaagcgactttgggaattagagtcacagattatagtagcgcttaatgattctaatcagattattgtaggttttgttaaacctatttactgacattgtttcttccttgttgttgctgaagcgaagaccgtctttttggggtgaattggattcaaatgattaagtttgtctgttaaagtggtcaagactgattgtaaaattttaattgataagtttaattgttgtaattggaataatgatatacttgatgacttgcttctaagtgttaaaaaattctttgtcatttagtcctgattttgagattgcttatattagcagggacttgaataccattgctcacaatttagttaaagagttaatttagaatgattctttattttctttgtaaaacttgttagctttgtacttaactcttttcctaataaaacttttaagtttataaaaaaaaaattaatatttaaaatataaaataataaaatataaattatatagagtattttggtcttactagaaatatgttttgacttagtcagaactatttttaactattttaataaacacattgtattttttttttttttttgtaattttgtagaaacttaggatccgtttttatttaaataaataaataaataaataatgttttataggaaattgactgcacatgcttcatgtgttccttttttaaaaaattaggtttttattttttattttttttgtaaaaaaaaaaaagaaacaaattgtagttaaagaagcatcaccacattaaattcctcaacgtcccatcaagctgaccgtgtgggacaatttaataattaggctcattaatatttttgtctctaaattttgacaagtatcaaataatgtcttttgtacttttaggtatcgttaaaaatatctcgtgaactattgagattgttaaatttaaagacttttattcaattttagtaaaaaaatctaacgtggataaaagttcagggagcataatttagtacatgtcaaaatttgagggacataatttggtatatatcaaagtctggatagtataatttaatacataaataatcactgaaaaagtaaaaattgaatgaaattagataaaataaatgaaaagtttactatcactgaaattagat

SEQ ID NO: 326878 - DNA, 560 bp, Cannabis indica
aaattaaattaaattaaaccaaaaatcataaaaatcataatccaaaatcttcctcaaacctaccaccaccaaaaccaccatcaccaccaactcccaccaccaccgccaacaaccagttttgtattcaaataacacaaaaaaaaaaaaattaaaaacaaaaattacagcaaatttaaacaacaataccatatgtgaaacaagaacttagatataaaatcttccaaatatttcagataaaaaatacccaaaataacaataaaatccacaatcaatctcaatcttaaattcaaacacaaaaaaaaataaatgggcacatcgagagagatatacttatagccgtaaatgagctctccattctttctcccttgttcttccctctgcttcgatttcaaacggtgcaacaccgacaaagattgggattgagagagagttgggtgttgagaccaaaaatagtacgttttacatttatcaacttgcaagcgcacacatttttattgtagtgtagagtttatgaagaatgaggtcgaacccatgagaattacatgagatcgaaaaaaata

SEQ ID NO: 326879 - DNA, 801 bp, Cannabis indica
tgcaatgttcccatttgttagatcaactttcttttgatcgattggggattagtaatagggtaaaaaattggaagtgaaagttcgttttgtccatttttgtcatttcaaaccttcaagcctttctaccgattttttttggattatcctttctcaaccttgcatgccctctttgtcccttacacttttcttgcgtattacatctaaccgatcctccatctctagaaatcgcaaggacccagcttctcaatcttcaaattttcacttgcaaagtcctctgttgctcagaaattctcagcaagacagtaagtaattcactcccttcttttaatgcttttcttttctatatttgtagtctcgtcttcttgattcatatttttctatctgtgttgtttggttattcttacgtaaatttgttttagttgtttagatagttctagggctaaggaaaattctaggttattcagcttataggtttctaggttaaatcgtatttgatttttctaaaaattgagataacacttattcataagtatgacctaatttattctagaaattacaatcccagagttcttagaaacgaattgtcctcaaaatatagccaccccattcagacccaaaataaacattcctaaaaccattcctaaggtaaacaatgcaaaaatttgagatcatcttattaaaaccaactaggacgagatttcaagtcgatataggcaatttttgcaagaaataactaagggtaaacgtcattttctgtgagaagcagcttggcctgaaccccaaactgttgggttttatgcc

SEQ ID NO: 326880 - DNA, 715 bp, Cannabis indica
aaaaaaaaattggcattgtaaagtttatcgcatactaaatgttgatgcccaaaattggctcaacaacaaattgtcttatgactttaatttctttaaaccaagtaagtttacacaatttctctctcaattactctatttagtttgggtcgtctacatctcatactcacagctagtgttcttgaggatgtattctaacagagtttcgactagtctggtatgagcgagaatttatcattttttgaattaggaggtcttctatttataagtgcaaataatcattttcatccctctttatgcctgttttaattggtcaacgtggattaattctcatctgctcctctgcacactttcatcttccggctttcagagctcctcatatgtttgttctttcttttcttgagttctactccagtatcctttcttctttgagctctgcttccctttaaatgaaacagtccatttctttacaaacctgccaagccaccatatcagttcttcctttattttgttattttggaattacttttttacctttaagattatttatctcatttataattgccccttggttttatggtatttcagctcgtgactattttagttcaagctctgatgccatggaattggttactgttgcgtgagattttcagcaaccaattaaataatatataagaagagttgtagaaagtttgatgcatgagatttttacgtggtt

SEQ ID NO: 326881 - DNA, 848 bp, Cannabis indica
gtttgtgattgtgctcaattataatatagtttttctctttatattacacttttaaaagggacttaaaagctcatggaaaacaattaataatcaaactcaaactcaaactcagatatatattaaggattgatgagagagagagagagatacctaaaggagagaatagcagggagagttcgttgtttgatgagtttgtcaagttgagaagtgttagaagaaaaagatatgggaaactccacaaggtcagctccttctgctttagcctcattcatggaagccaccatttggtccaagcttccatactctatgggtgcgcacaccacaagattccttttcaaattgaaaaatgccatcacaatttcagaaaaaagtactcaaaattaagagtttgaaacttattggaagttggaagaacacaactaggcacatatatatatatttttatttatataaataaatgactataacctctagaggacttgtcaattgcactctacaaaaatgagtgtgtatgacgtataatttttttttttatatatagaaattctattttttttatatatattttattgcagacttgtttttagcatgtcaaacagatcatttgaaaacattacctataatatggaatgtactcttatatcttattggaaaactttcctttatcttatcgtaaaaactaaaatttccttatcttattggaaaaatcttgtactattacgctcatgtgtttaagcgtctataatagttttttagtttcaatttttattatcatgtatatgttgtaattatttagtattatttgtaaattttttaaaaattataaataattttatagttgtttaaaa

SEQ ID NO: 326882 - DNA, 695 bp, Cannabis indica
ataataattcaaatttcccaatttaaaggacttcagacttatatatttttaagattcacccatgaattaaatttcctttccggagggtgataattgcttggtataataagaatataagaatgaaagaagagtaatttttggttttacaatttaaatgtattcataaggtcttatgtatttattcgtgtagtataattttagtattctctattcttgattattattattatttagtatcttgaatttacaaaataagtataaaatagtgtgttagtgttcttccaattcacaatttttttaatacatgtttaataaattttaatgaggtcaaatataatgtcttataagtaaataattattaataggaatttttacacaaaatgactattttgaccaatttttaacatttatattatcctttctaatttttaacatttttactttttaaaattttctttaatactttttaaagttttataattacatatttaccttttgttctcctttctcatatctaacctcattcaaatctggattcaacatgtcatctctcactctctcatcaagcttatcaaactttcacactcgtcttcgcacaatcaccatatgtagcctctcttcatcacgcaaagcctcttctcaagccaccattgtcgttcaattgatgcttgtaaggtcttcttcttcttcttctt

SEQ ID NO: 326883 - DNA, 694 bp, Cannabis indica
ttagaatgttaaaaacatacttgttagtaaatgtagattctggtaaaacatattccaacagatttccctgacgatacccgaaagggtactcgaaaggcctattgcaaatatcgatcactttggagtgtcgcggatgtctacctttcacacacgctaaatcaccaagtgacagttatactttttctaacaaagatcagatcttgtctcttatgtccaagcatggtagtgtgcacacctccaccatctttttgctaggcaggtattatggaccaccacttttaaaggtgagagctttgggtgacacatggcctctacttttaaaggttaaaggtttcaaagacacgtgttcactaactacatattgtccccaattgtccagctgcaagatgcacatccaagggaccaaacggtaaaatctcactttgcacgtaatttaccccactagtagattttgagtagaaaccctaggtaggtcatggacatgtccatacccgtcacttaacccataaatacccttctatttccatacgaaaggaggatgacaacctacatagctaaaactctgccaatattactcttggtctttttctttttcaagagaaactaagagtatagagttagagtttccttcaaaaatattgtaaacacatcaaaaacgctctaagaggctgatagactgacttgtggactaaga

SEQ ID NO: 326884 - DNA, 827 bp, Cannabis indica
acattagctactaaaaaatattattttcctatgtaattactaactattttcccaaacaagatataagtaatttatatataattaccatttcatatccaaacataccttgcattttaaaatatagtgtaattactaaactgtgtaattaccaccctagtaattaccctacctagtaattacacagttacttccaaacacacaaagcaacaaatataatactgaattagcatttggaaatggagagccttttgtgtctggcttttgattcattttcctatgaaaattaagctatgaaaattaagctgaggtttgttttgttgacctctttctccaccaactaatggattatattaagctaagtttcttttttggtgtatgtttgtgtgaaattaaagttctgcaataattttgtagtgtcaagttcttagagttgatttctgagctaataggttctgcaataatagtctccatctccacccttttgttgattgtcaaaactgctttatacaaatgcctcttttacaactctaattaatttaattctcagggttgcattgtcgtggaggtagtttttttccctcttattttatcacttggattgcaactttatccttggttaatgctcttcttcttcttgtactaattgatttattagaggttggctatatatgttattttttattagaattaattgaaaacaacttacatagatgtgaatttctcataagttatatttaatcactgagtttgtacaataataatatcgtagcaaatgggctttaggcccatgaaacaagaaagttttacttgatttggtggggtgcgcc

SEQ ID NO: 326885 - DNA, 908 bp, Cannabis indica
ccccaaattttaaaataattttaatcactaaaacaaaatgtgaagaagaagaaggaaatgtgaagaagaagaagaatgaaatgtgaagaagaagaaggaaatgtgaagaagaagaagaatgaaatgtgaagaagaagaaggaaatgtgaagaagtgtgaacaaatgtgaagaaagaactatgccctaatacaaatgaacccacgaacccactatttagtgtattttgaaaattggtaattgtcacccgtacatcaaacgtcaatcgttgtcagttttttaaaaattaattaattaaaattaaaacaaaaaccaaccggttactattttttacccctaactacccctactttaaccccagccattagatcatgccccaattcaatctaacggctacagtacaatcagtgattgtatttcctattttagcataacaggacaaaatccactgccaatatttatgtgtatggcacaattagtaaattatttatacagtaagagtttgttagataagtaaaaactaaatatttttttttttcatataaaattggtatataaaatgaatatatatgtgtagtacaaattttttccacatgtcaatatttagtgtagcgtctgaataggagtttgaaaatggagtgtgaccatcgcattgcccgtagatgattatggcatgcaagtggagaggcctgggactgggagtgggaaccaagtctgacgcgctggcagatgagacaaatgctgcattcgcgggtcccgcagtgggacaggggaaggggctcgccacgtggctgctggagactttgtggctggtatgagttgcaaaaataccaaattcaattggggtaagttgaaaaatgcttcttttattaatcaattaatcaaatttacctctaattttatatttatt

SEQ ID NO: 326886 - DNA, 749 bp, Cannabis indica
atactattttaatctggatattacatatttttagaatttttgtaggtacatgaccgttaaatttcaagtcattattcacgtatcattttcttgttggtatatttaaattaattttttttaaaaaaataaaaatttgtaacctagaccaataagggattatcacatggcaatttacttaacatttaacaactttgtacctacagagttctacaaatataatttaagtattattgctgccaaaaattaaatttagatatttacttgcaatcaggagttaaacttaagtatttatgctgcaaattactcaacaaaattatatacaaccattaaaataattacaccataaatataaaattatataccacatttatatataataaaataaaaactaatcttgatctaaaataaaataatatactaaacaataaaacctatacaccatacaataaaaaatatatacatcaataaaaatatatataataacgacaaataaaaataaaaaatatgtatagcatgctaataaaattatatgttatgctaacaaaaatataataaaaaatagaatctaatatcattttaagaagatgatatatcgtacaacaaaaaatacatgtaccatttaccaaaatatatgtactaacaataataaataaatgggatattggcggctaaaccacccgaactttacggtttgtaacacttaaccacaaaaactgaatttttggcggctaaactacctaaaccctggt

SEQ ID NO: 326887 - DNA, 1224 bp, Cannabis indica
cgatgggtatgaagaaagagagatgaagagagggggtaggggataatgtaaatggaggtattttagggatattgtaaaatgtgtcatatcccacaaatattacatgttatgtgtttaggggaaaaatattaagtatttgtaagcataaaaagtcaaattttcctttaataattcctgaaaaacataaatttcagtgctcatctcttaaataaaacaaaaagatagagtatgaaagatagctcgaaatgaggagaagtgataagaataacttatccgtagaaaaagagtttggaagaactcaactatagaaaaggaacttgaaagagtaacacacttgatttctattttattttcaattgaacgcaacatttaattaagactaaggtgatgtttgattgagaggaataaaaatataagaataaaaatgagaatgaaaataaaaataggaacgtaataaatttaaaatacataaaaataattgataaaaaaaattattaaattttttctcatattacattggagtagttttttttttctattttaaaatagagtagtcattctaccaaaatggtagaaaagacatttcattgaataatattctgatccttcaaaaatacaactaaacaaataaatggaataaaaattattttatttccattccattctattttattacctccaactaaacgtcacttaagagaaatggtaagggagaaaaagaattaaaagagatgatagcgaacactttaaggtgtcaaatactgaggtagtatattactattggtgtaatttaacattaaattacacatattttaatttaataaataatataaataatatattagtatagtattgaacatctcaaggtccataacaatcctctctaactaccaatgaaagaagaacttcaataaaatagaagataaaagaattgatgaaagtagaagtataagagaatattctactactatgctatgtggaccaattagaatacatctttctatttttgaactcactttggagaccttagattagattcattaagctgaaactaacttatacgtcatttcaaagtgaagaacacactcatcaagttgaaatgtttgttccaaggattcatcgacaacaactaaaaaagaaaaagatatttctttatttgagaagttttccttggagaggtttggagaaaaataataaagaaataattacataaggcactatttt

SEQ ID NO: 326888 - DNA, 1360 bp, Cannabis indica
atatatgtggtatatatatatatttatatatatatttaataatgataatttttgtttttatatggtgaaggcaatgttatgtatgttataaattttatcaaaatattattttttctattttttttatagtgtatattcaaaattaaaaaaataataaatcaaatactataattattttcttaataaagattaaatgctaaaattaatatttttttattaaaaaataattcatttatttattttaaaatataagattttattaaactttatttaacacttaacatttaatattaataaaatataattttataaaattattatattttttgatattgtattctccatttagctatatgttgcatcaaatatagtagtattaaatattatttttaataacaaaaaatattttattttaaaaatcatacaatggtttttttttttgaaaaagtaaatcatacattagttagaaaacaaaaattatacttttttagctatgtacttgtgttaaacatggtatagtacaaatataatctaagtccaatccaatttaattttaataaataattcaatcaaatctaatcctacataccaaacagtacttaacaataataataataataataatatctgcttattatttcttggttaaggagctcgagttgacatggcatgtagacgatgtgtgtgtactgtccacagcaaagttttttattcttcttcatccgctgtgctgcaatgagatgacccgccccatacctacatacaccatataaatggatatttactcaaagacctatacaaatctaaaggtgttgtgttttaaccaaaaccatgtatactactgaccctgaagtgaccattatttatacatctccacctaatttgtatatccatcaaaatcgacaaatttagaagatggtgtccaataaattcgtttgatgataggtcacccattggtattgcactattgaacctcaatttctatgcaagtgaagcagttctacagttgcaataaccatatctgacatcagctacctttacaatggcgatttaactaatacgacgtcgttgttattgttgctgtttttaataaaaatgctcctgtaggattttaaataaggctctttataatgtacccaattcaattcaattctcatgattcaattgagtctgcaaagtacaaatatgtagatatatggattggattagattaaaaaatttacaatttgcacttgctgggattgaatgttgagtgaggtgtaaaagtaattgatcaaatccaatatatgatacaaatatatttcaaaatttagtagattaaatgtatattctatttttatttacaaggaaaatataattc

SEQ ID NO: 326889 - DNA, 732 bp, Cannabis indica
taaaatatattaaaattgaaaaaaaaaaaatttagtgatgtattttaaagaagctgatgtatggtgtaatttaaaagtttgtgtaggattttcttgatttccaagaatgcccctacaccaactcaatgttagttcaaaacgacaaggttaaaattgaccaagaattaaaacatcaattaatcaaacgacaaagaaatcaagtcgtttcctcctacacgacaaattaatcgtttagacccaaacgatttgtcgttctcctagaaaaaaaccaaggcaattgagctaaccctagctcagaaatacccttagaaccttcaagttttcaaactatctctctctccctgcttctcttcgaatgaaccctagaaaccagatctccttctcgatcaaactagatcgatctaaccaattcctttccccagaaatttatctcaaacacatacacacaacagatcaaacattaaacagtaaagagaagtaagaaaaaacaaacacaagaattatagaggtttgccctaaatttaggggtacgtcctcttttgagctcaccttgaagaacgatctcagatctgcactataaatggagaatattacatcaggtgagaaatccgagtcacaaatcgactggcatttcagatctttctctcttctctctcttctgtgtatttttttttctttttgattctcactgactctctctttgttttctttgcatgtacactctgaaacaat

SEQ ID NO: 326890 - DNA, 1558 bp, Cannabis indica
taaaaaaaaaaaaaataaaaaaaaaaaaaaaaaaaaaattacattaccataatatggaaagaaaaagaaaaccataaagatgaaaaacaaaaccacattttggtgatatgtatatataatatttaaagaaactaagtttaccatattattgtacgttccccaacaaaaaaaaacaaaaaaaaaaggaaaaagaaaaattagagcactgaagctaaaataagataaacctcaacatctcaagaatatttggccaactgtagtgtagtttttctccatgcctctgcaatttatttatttcaaaaataatacgttacatttatatgagtaatgaaaagcaactttaaaaagttagtaatataagtttacctctaaaacatgcaaaagaatctttaaagacccggcacgtgcatccacactctcagtagagaaatatagaactctcaacggagaaatgacagcacattcaagtgatttcatttctctaagcgtggtttgattggtttccatctagagagagaatatatcaatgataagaaatgtcaattcttatttcactagttaaacagctacaaattattaggaagacagagttctcacattctgtgatatccctttgggtctggttgacagatcctggaagtgatctgaacctaaaaccgcacatatagattgatctaatgcatctagtgccatgtttcgtaaattctggttaggtttatctgcaagctgtaaatcacagaaggatgtcaaggagaatgcagatggacctagaagtacaagaaaaatagaagaaaatacctcaagaaagtggcccacaacttgatcccataagggctctattcctgttaaatggcaaaactatcactaatccgaacaattattaagaaaaaaaaaacatgaatcatgcatctttaaaacctatacgcatctctcaattgcctaatgagtattaagggaagtcttcaacaagattataatcacataaaatgacttaagatggttcatgtacatgtatcaggtgttaaaaaaatgtcattgacaaacttctgcaaaaacacattacatactgtgaagattatttacaaggatggatatcattctttccactgaaaaagtgatgcttccaagtttttgactcgatgatggcccggcgccacttgaagatccagatatgcattgttctgaaagctgacgtaatgcagaaagaagggatttcacggcagatatatgcatcagagctgagctctcgaacagcttcacaaggaaaaaaagtcagaatatatagttcatcattttttttaaataacaacagcttggatttatgagagaataatacacaagaacagtgaaacagcatagaaaaaaagggacagaattaatacatataacattatattaattgtttatgcaagcagatacagacattaatatttacgcaagcagatacaaacattaatatttacaagtacagaaacaagaatgatgaaacgctcacattttttcaaatgcaaagttattatcctatttaaagtagaaaaaattgaagagtggctaatag

SEQ ID NO: 326891 - DNA, 959 bp, Cannabis indica
aaagaaagcaacctccatttagagaaaaaaaggagggcagcacgttggaagaaatattctgccatttttctacaaaaaaaggagtgaaagaagaagaagaaggaggaaagaggagaagaagaacaacaagattcaatatccacccttttggaaaactcctcatctatagttgtttgctatttctttcttttctcttttattttctctaactctaacattcaaactccatgcctaaattttatcttgtaatggtagtttttaagttagctatgagctaaactttttttggtttgaattgttgaagaaccctatgttttagtttagtaatttttttatgcaaatatttagtaaaaattctcatgttcattcaagtgtgtgtattgctaatttcttgatattgtttggccaccaatagcttgatattgagttatatttaattatggaatggttaaatgtaatggacttagattgaatgacacaagatctcattagatgagatttgaaataatataggaatatgttatatctttgcgtaacaactgagaactatgcttgaaatggtattcttgagcttacttggcataggaatatgtttgaataggtccaaggactgattgcacaaaatttggaagagttttgtgcattttaatggagttcttgttaacatgagatttttactaaagatttgctaacattttgctgcagcaaaacacacagtttttgctaaacatagggggattcaatagttcaaacctttcacatttgaaaagcttacaactcatttttattttcatcttgcattcacttttgagttaatttacttatttttttgttcatttagttgattcattaatcatttcaatttggttcttaggcattttgcttggtaattaacttttgcaatagaaattgtatttttacagtccttgtggagacgatactcgttacttatcattata

SEQ ID NO: 326892 - DNA, 704 bp, Cannabis indica
agataaaatagtgtttaatggttattgtgtatgtttttttttagatattttataactaattaacattttctctttcataacaaaataaagtagttttctatgcaaaatctttaatgaaatcactagttataataacctaaaatttcaatatatcattattcttaatttacatatatctagtaaaaaagaagaacaagtttccaatttttatacttgttcctaataatatcagattttttactaattagtagtactaaatgactccacaccaaaatccgaaataaataaacctcatttaaacctaaaatagaaactcctaatcatttgcttccacaaatacatgaccaaatgtagatgaaaattaaagtttttaatttagtgattgaaaatccaaacttttgtttttcctaaactaaagcaaatattgattaatagccataaatttaaatcattgagtcaacacaattccatttattcaatccctaaaaaataaaaattcaaccaactcaacaaatagagatttcttcagtcaaattaaacaatgcaagtcttcattgcaccaaaaatacataaatcaaaataaaaaatgaatcgcagccagatcaaaaatgacagattcgaagaaaattaaaacgattaactaaaaaaattacagtacaataccacttcagaacacatgcacacacacagagagagagagagag

SEQ ID NO: 326893 - DNA, 1227 bp, Cannabis indica
taaattttttataaaaaaataaactattgttatacagcatataatagttgaggattagggtgagagttatttattttgatactataattatcaataaatagaaataaattacttggttcattaaatttatacacaaattcaaaaaataacaaataaagaaacatgtttacaaaaatagcaaaataaaacatatttaattattttcaaaatttctaacaaaccgatataatgtcccatttaggcgagagtcatagatataattcattgaatagagtagtcagtatctaaaatggacactattctaacaactttttattcgattgaaaagagaatctgacattatcccgtttaggcgagagtcaaggtcattcctattttatgagcttctactattgtttcatactttgtaagccttactcttagctgccactattagggtggacgttactaagaataaaagacttacaataatacttatctttcgagattctacgacgttaaattattaatgaacgaatatctattagggatgaatctcactaaaatgagaactatacagaactaacaatggatattgaatgtctttttaagtaaagcttattatttaaaataaagtatttttaattaatcattaattttaatctatatatttcaataataaaaattatttaatttaagctgatataaaattaattaaaaaatttaatattaaaattatatttttcaatattaatttaacattaaatttaaattttaattaacactgtagttaccattaaagtgtattagcaccatatgataatggctaattatatatatagatatataatataatatttatcatgttgtgttttgtgtatcactttataaaagtgcgaagaattaatccttatccatatctcaggtacaaaatgtcgataatttatgcaagattttcttattatttaatctttaaatagaaaacacttcattcttaaaaaaaaaccttaattcttaaaaaaataatactaaacatataataatatatatatatatatctattttatataaaatatggttatgtaacagaattcttaatttaacagtttttttaattttctatgttaactttaacagaatatccaactatttaacataatattctttattaattttataatattattatatatttaaaaataaaaattttgtagatattttatataaaaaattaattttattatatat

SEQ ID NO: 326894 - DNA, 1251 bp, Cannabis indica
aatttaagaaaaaaaaaaaagttaaaaaaaataaatatataaggtaattccccttaattaaactctagtttttaggttgaaaaaattgtatgtatagttatatctctcttactcaaaataaatctaccctttcttacaatatattttaattataacatattaactatcctaaaatattaaacaagtaaaaaaaacaaacttaaataaactatttaaatatttttattctgtttatcaaaatataggctttataattctatacctcaactattattattatttttaaaaaataatacatttaaaaaaaattactatttatatatttatataattttaaatcttatttagacacttttaattaccaatttttgataaatggggcacaatcttattttttatttttatttttttgtgaagagggcatgggaaatttaaatattatggtatagaaataaataaatatatattatttggtctatatataggatgcaaataatccaaattgtattaaccacaagtaattaattaatgtattagttcatataaattaaaaaagaaagaaaaatgcactttctagtattatcttgtacaacgcataggggaattgtataacaaggcactattatatagacaggagcaagaaaggaataaaaataatttaacaaaaaaaatacattaatttatttataaaaagaaaagcaaaaaggaaaagtagtacataatccactaaaaagaaatattatataaaatatatattaaattgacgattacaatttcaatatgggatatatatttatttaattataatttatattatataaaaaaacaagattttgatttataagaaaacttaggtggttatatatacctactaaagcatcctagtccatacttaagaatataactagttattattacgtaatttatcataaacaaaagtgataaatgtgacatcggcagattataaagaatatgttatataatacatatatgtgcatttttaatgatattacccatcacaaataagtattattagaaaatttaagtttaacttagattttaaatatatttttaatataataaaaaaattatatttatttttagttaagtaggtgaaaacttaaatttctgcttcattattatataatcaaaatgtaatatgttttaatagtttaaaaattaatatttatacgttttttttttttttttttgtagataaaatggagacattttattagcaaattgaatcaa

SEQ ID NO: 326895 - DNA, 2705 bp, Cannabis indica
  modified_base (26)..(26): a, c, t, g, unknown or other
cagcttctctattcttctcaggttcnctttcttcattcttccccactaccccaatttctatttaatttttatttatatttattattattattattatttaaaagtaagttatttttaagtaaattattagttttattttggtaattttacacgccctttggattggccatggcatcgttttctcaattctgtgtggtcattttctcattaaattgtgcagagtacataaattctatctgtattcgatttttagcacaatgtggtttttaatgtttcttctatttgatttttatatattttagagacaacatgattgtatttaggctttagcttataataaatattaatattttgcccacaaagtcatgttcttctgcctctgctggcatttgggtgtgaataatgatagagaccatgtgataaaatgattttcttattgttattcttaagaaaaatattatagggagcaatggtgctatttttgccctctattgatgagagaaatattacctgggttcgagtcccaggtaaaacataatgtaatatataaacgcttgaataaaaaaaaaaaaaaaatgagagaaattaggttaattatgatagattttttttagaaaacttttatttgttaaagttttttattggatttataaatttatgtcgaacatggtaattatttatgttaaattatgttcattcgaactttgacatatattaaatcgtgttctttaaactttttaaaaattctctttgaacttctgagattgttgaattcaagaattttaatcaatattaggcgctcgttaataaaattaaatgaaaattcttgaatctaacaatctcattaatagttccacaagaattttttacgatatgaaaagttaaaagagtacaatttggtaaatgacaatacttgggggacaaatcttaattagatgagaaattataataaaattttgtatatacataattaagtatattaccaaattttagatttattttttaacaatgtaagacacctaattcaacccaaaagaattaggtaagtattttttaaaacatgagtattttataaaatttagaatgtttgccaactgataaattttaaaaggcaacacttaaattctttcaagaagaaaatgatgcaacttagagctcgtttggtataatttttagaaaagttaaaagttgatttttaaaaaaaatttaataaaaatgtgtttggtaagtagttgaaaaacagtttattgaataatttataaaaaaactactgcgttaaagctaatgcaatccaacttttagaacaaaaaaaaaatgttttgattaaaaaactctatcataaattaatttttactaaaaatgtatttaattatttattacatattaaaagaaataaaatattttcttaaggaaaaaaaacatttaaatttattattttttatttttttcaaaaaatattttatatatttttttaatttaatttgtaattttattaatttgttaaatcagccaaaagacaagactgtaattcagtaggaacatccctcccactgaaaactcaatctggaaaagaatatgacgctctaataaagctgtgcgcagtcatataagcagatcgtttaataaaaaacaaagaaacattgtttaaaatagatagaagctttcaacagtccatcaccactcccccaagaggcgaaaccatggtgatgttacttcgaatagcttggacaattgagagacaatcgaactcaagttcaacattatgtcattcatgatccttgatccaacttaacgcctctttaatggctaaagcttcaggcatgtctggtgccatggtaccattgccaaagaaccaaaagaagaaaaaaacagagcactcaaaaccaatacgaactttgcatgtcaataaacaagacaccatgacttacaatttataaatatctctcattattagctttggagaaacatcaatgtttctttacaagagataaaaatattataaattattttaattaaatgcatataaatttatactacagaaaaaaaaaataaaaatatatagaaaataaaaattttatataacatattttatattaacatatatgatatatatatgaattataatgaataatattatcaatataatcattaaaatcataaaaacttaacaactcgcaacgatttaaaatttataatttacaaaatattcaacttcagtttttttttacaatcttactacaactattttttctcacaacacaactataattatttttttcccacactaactgtgctaaactagccttaatgctccaacattaataatggagatattttaaagaatacttgatgtggcatcttttccttccatttctctattttctctattttgttatgttttctaattttttttctattgaataataaagaaaaaaaataatataacctcccaaaataatgtaacctaacctccccattattaattttttataatctattagtattcttttaaactattagtattctcatctatatatatagatattttattacaccaaaaaatatgatatatgtatagtaattttgtaaacctatataattgattaatctttaacaattcaaaatatatgcatacatatttatattgcaaaaaagtatatacatatagctatatttatatatctatctatatatttatatatata

SEQ ID NO: 326896 - DNA, 1434 bp, Cannabis indica
cctgtcgagacatcccagaacacaacaattaaagacgtgtttaaatacacgatcattttgacccagtaaaagcgggaaaatcacagctatatgattttcaaataataaccgcatttacactatgtgatatgtaatcaaaccccataatttttggggatagtcgttgtacagtcaactttgtaattaactgcctactatgtgaatataaatagtagcgtgtaagatccaaagagggatgaaagatcatacgaaaaaaggggccctgagaaaactatcagaaatataataagatttactcgtggactatgcagaattttaaccacaaaaccacgtaaaaaaatcccttgtgatttacttttcttattttactgctttcattttttctgtgtgaaattatcactgtgaggctcaattttagttaacaaaaatctgcgtaaacagtttagtgctttcattgagagcatttgttaaaaagctcaaaaaaaacccttctttcttttgaaaaaaaaaaactacctccttcatggctaaaaacctagaagatgttaatacaccacatgaggaaactcaccatcgttctcgaaaagaacccacgggctatagaagatccactaacccacagtccagagggaccacccattctcggagaactcaacctgagggtggccccaatactcggaccacacatccccggaggaaccaacatgacgttggtcctagtacgcgaataacatgctcgaggagaactcaacgtggaaatggccagaaacctggaatgggggatgaagaatcgtacccagcctatgggagaagatacttatgaaacagaaaactgccgccttagacgccatctagaagagacacagtggcggaacactaaattagagcgtgatgcagtcgtggctagggcagcacaagcgattaatgctgaaaatcaacatgaacctggagtgagaagatgacaaggtagacctcgtggctcacgaaccaagagataggaaaatgcatgggaagaacaacccagggaaaatgagataccccctgaaaatcaaaatgatcagtcataaccttctcacagaaatgagactggtaggcagccagaaactgatgaacgagaaattcctcatgacaatgaggaagatctcgggactgaacctagagaacgtaggtcacctgggagaaatcaccagcattcttcccgaacccatagagtgagggctcgtacagatcctaaaggggtaatacgacaaaccacactcaggaggaaagaatagagcatgaagaagcaagtgtgacctcaaggccgtcaaggacccatagttgatcaactcgatgagaagaaagtactcaacgagttaatgatcgagaaagcatgggaacaagcaaatccgcgagatactcaaggacgaagtccatgagcaagacgaggtctgt

SEQ ID NO: 326897 - DNA, 1160 bp, Cannabis indica
tggtaaaatatttccaacaggcaacacgaccaagcaacaaccacaaggcccagatcgatcaacatttttaatcgacttggaagacaaaagaaactacaaagcaacaccaataagactaagcgagcccttacaaaaaaattaagaagtggtgagctgatacgcacatcaccacacgtgatgtctagaaagcagaattcggtactctttccaccttggtgaaaattatcaaagcgccaaacaaatatgactttgacctagaatgggagcgaaattcacgtctctcgaatcagatcaaggcttttaagatcccctcaaagttcaaaaatctagtctggcacccatacactggtaaagaagaccctctctctcacatacacaattttgaagtacaaaattgacctgcaaggcatttgagacaactctcgatgttgaatctttcaagccacgctattagaaatggcacaataatggtatctcaagctgtattgatgtaacgccctaatgctaaggcacgctacagtgctttttcgattacagtgctgtctttgctaatcaaagaattttcttgaaaaacgtgtcaaattaaactttatattaattaataaactttataatatacaaaaccatttacaagttccgggatcccattttcaaactttttaacataatacttcaaaatacataatattcatgtcacacaacgactacaaaatacaactccagatgtttcgagaccaaacacttcatgtcgcgctgctttgacatgtacaagctcatcctagctcaggttaactcctattcagctttcgcctttcctttacctacacatggaagcagaactctgagtcgacagactcagtaagaaaaacatataatatatcatataatttccgacttgtatttaggcgcccatacacctatttacaaggctcaacagatgagtaagaacgttctatactagggtataacctctataccacatacactacgtacctcactatacaagtgttggtagggtttgtttcataccctgagtaccactgagtgatgtaccacacacactcaatacttctccgtacttatgctggtatcactgtactctcaaataacattcactataccaatgcactctataccttaactgtaaaagtgttggtagt

SEQ ID NO: 326898 - DNA, 1057 bp, Cannabis indica
gtagcgtgccttagcattagggcgttacaagattgttggattaaaatcctcaatatgggctcatacgtatattagtgtattgctatttgaagtttggcccaaaataaagtgatcgttttagtaattgtgggtcattgggtattaaagtgccatgggctaaatgtggagataccttaagcgatatttttaatttattgaggggctaaattagaaatacttaaaattaataacctagctatgaggttataaatttgtagtggtccccaagaaacaagagtcaatttctattctcatcttcttggaagatcattacccaaaatcaccacaaagattatctctacaagatggattaagatcatcactatctacgaattaaggtacggttctgctatttggcttcttctctttgaatcaacaaaggtattctttagatctatggttatacacttataattatatgtaatatgtttatctataaaattgaatattgttattgcatattttatgagtgataaagaaactaacaacgttgtgttctaagaaaaggtcagcacccattatgttcatgaaacattaaattacaacttagtgtaaataaatgaaagaatgtgttttgaggtatttatccttttctttaggtgaaatgagctacttaaaaattttcattcagttggatcaagatacgtgggtagaatgacataatttttaaaacagattgtcttgaagttactgaattgtaccacttttggaattacatgtgtttctattcgaaaacacggataacacttctaatcgaagttagcatatcgacattatttatttaggcataacaaggtgtgaaaagtggttattcagcacacaacactaattgtgtaatcgcagtatccttggctaaaggcatgccgtaatacaaattcaaggatagtaaagtaaatttggaaatcgattacgtaccccttatgcagtttttggttgtactgttggaaattattttaccaggatcttagatctactcacaagtatgttatttaaacaccctaaataagaactttctaaa

SEQ ID NO: 326899 - DNA, 563 bp, Cannabis indica
aaatatttataaaatttaaaaatcataatattttccacaattgacatacatccttaaaagatattttagtcaccaaaatttaaatttgttgtatactgcgttgtccgatattggcccccctaactatttagttctggctccgcccctgtatatatataatattatacactatacccaaaatagtattttagatttttatcattatattaatcaaatttcacacctcttcttacaagataagattccaaaatcgaatttctctccccaaaatatataaatatatattttttttaaaaaaaagaaaaataaattatatattttgtaaatggtttattttttttcttttttagagatatattgaaaatataatgagatttgtatggtataaaataataattttaagtaatatttcacatttccatctttagtataacacttattattattattattattattatattaaaattattaattattgtgaaagtaagattaccccatgaaaatgtaatcttaaatcttttcaaaagtgtaagcagggcctgttggaaattattttatca

SEQ ID NO: 326900 - DNA, 700 bp, Cannabis indica
  modified_base (7)..(7): a, c, t, g, unknown or other
tttcttnttcttttcttttctttcctggtatgtgatattactgttctgttctttgatttattaagcttgtgtgtatctcactttttcaggtggagaacagctatttcttggtcagcttggtcgataatgattacatccatggtgatctttttgcagtttttaatgagttctgagttgtgttgtcctttctattagctattattgaaaatgaaaattatgctttgctctttagttggtttgtaattgttattgtcctttgtgaattgtgtaataataagatgagttttggaacctcctcccctgctgcgatccagaaatatggagcagtaacagtaactgcagacccaaagccgatttctgtaattgttgtctaccttattcattgtcgttacaatttttatttatttatagggtgattccatacaaagtctataagttgcactgtatcttaagttgttgagtaaactgctagcaaaataaaagaggaacgatattaccgaatgaagaattctgggttgagtcgcggactaagtcgctctctttaagacgttcgcggcactgcccaggagtgtgcaagcagtcggaaattgccggtcgtccccaggataaaacagcccagtcgttgcactgtatcggaaccccactgcactgtagagcaccgtcgaatacacccaaaaaatttgatatcgcagatggaatt

SEQ ID NO: 326901 - DNA, 1460 bp, Cannabis indica
ggcacaaaacccaacagggacaagatctgaaatggtgtcaagcgaggcataaccgtcaaatgcatctttgggttaggtcacaaggagcttcctagactggaagtacaactcgagacttcctaaaatacccaactcctgagaactcctcgaaggcctgggcttcacatatgcttccgcataccgaaagcattaggttacagcttcaaggatcgattcctcctttataacgggtgtgctctcctggataccttgatgcgttccctgatcctatcttagaagaaaggggaatctaggatgtttccatatgatcttacatggcaccctcttactactttcatgtaaaacctatccataaatagggataatatttatcccccaagctttcaggacttgaaagtacttggagcttgtaaccttcccctgaaggttcgttttgtatctaaactcacggattggccatcaggagactgaagggacacatttcgtaatgatcactactggaggcatttctgcagactcaccgaggcaaaaatgtatgtttagcagggtcgtgtgactcccgctctccattttaggagcgtttcttgggaggaaaaatgacgagtgattttgaaaacatgcatgtccttaggtgcattggggatgctattgcaaaatgatgagtaataaatattttattccttttttcaaatatattaaacatcaacttttcatatccccaactgttggatgctcttgatttcaatctgtttgatcaagaccgtgcattttgaaatcctttcggccgttaccacccatataaatggggcttttgacgattagagtcattttcttcacttcaacctttttcgaactagagataacttttcctttctaacacacacttctcacttagaaacccttaatattttcacacatcttcgccctaaaataaatcatttttctcccaatcctcaccattactcccccttgacacccactgttacctcatgttgtcctgtaaccgaagctaagagggtcatcgtcgctttgcaactagtggaatcttagcacatcaccaccaccaccgactctttcctcgctgtacaagtaagtattcctcttctttcatgataggaggatttaatcactttcacacgcgtagaatataattttaggtttaggatttgtgatgtctaagatttatgtgctgggttcatagatggacagttatgatttttatggtttcatagaggtggtattattattttaggtccacactagaatgcatgttcaaggtttgagtttttttgggtgatgagagtttcacagaacatttttttatttactttttctctggcatgttgtgtgcattcgctttgctttgtctttgaaaagaaatctagtccttgtatgtcatcatgcatgtgggatcctgattcatcactgttatcccaaatttggcactctgacgtggcatc

SEQ ID NO: 326902 - DNA, 1571 bp, Cannabis indica
ttcttttgagccttataaattaacaatgagaagagtcttctgctcttgtaccaaagcctaatggctcatggcacacatgcatcaattttacaaatttaaataaagcatgtccggaggacaactttcctttacaaagcattgaccaacttgttgatgctattgcatgtaggtcatgaactccttagtttcatggatgcatactcggaatacaatcaagtcccaatgtatgagcctgaccagagcatacctccttcattattgatcaaggtttgtactgttataaggtaatgccttttggtttgataaccgtaagagcaacaaatcaaagattagttcagatgatgtttgcagattttataggtaagataatgaaagtgtatgttgacgatatgctcataaaatcttaacgcatagaagaccatgtcgctcacctagattccatgtttagaatcctgagacattataaaatgcaacttaatcctttgaagtgtgtttttagattaggatcaggaaaaattctcggctttattgttaaccaaagaggaatcgaggctcatccaacaacattaaaggcattggtggagatgcaatctcccataaaaccaaaagaggtccaaagcctaacaggtaaagtcactgtactaaattgttttatatctctcctacaaatgtaaagaatttttttagattctaaaaggtaataaaatgtttcagtggattgataaatgcaaagaggcttttcaagcactaaaagcgcacttgggacagcccctgatactatccaagcggatgcctggagaagttttatcgatctacctgctagtgtttgaatatgcaattagctcagtgtaaatctacgaacaccaaggtaggcagcatccggtgtactatgtgagcaaacgcctattggatgctgaaactcgttatcgttttatggagcaactagcatttgcctttgtggttgcttctcaaaagttgcgatcatattttcaagcacacaatattgaagtactaacaaactatcctttgtgacaagtattagcaaaactagaagtgtcaggacggttacttaaatggtcagtagagctaaggcaatttgacatcaaatataaattgtgatctgcaatcaaaggatagaccctcgctgatttcattctcgaatttgcgaacgacaaaatagcaattattacagaagagcgagtcgaccctaaagtgccatcgagagaagggtggactttgtatgttgatggggcatcaaacaacgaaggatgaggtggtggaataatagtgataagccctaacaaattcaaagtgcacgctgccttaagatttgaattccctgccttaaataatgaagcagaatatgagggactaattacaggattaaagcttactcttgaaaaatgaaggtcgaatacctcgaggcattcagtgattcactaattgtggtttgtcaagttaatggagaatattttgctagaggaggacgcttaaccaaatacctttcctatacttgtgagttgttaaaaaaatttaaaaaagttaattgttagtagaatacctcgtgctta

SEQ ID NO: 326903 - DNA, 992 bp, Cannabis indica
atacacccaatataattcatctcattgtcatactatgacagtgcctcgcgtttgcctctttcaacattacagaaggacgcgagaagtatttcccagagtaaacttagacgcaaaatatatcttcagaataaagtgtcctgagaggattatttttattgcgagatggagaagtatagttagcataaccatttatagataaagacaagagtgattattacagttatttattattatcccacgtgatgtaaatatgaaatgtggagattattcacgtcacacgaatgattacagggataagatcttaagggaatataactgccaccctaaaatttctataaataggaacatgacctagggaacagaggatgactaaaaagaagataatttctcaattcatatgtcttgtattctgtatacacttcataaaatttcagaaataagattgactcgtagagtataaagaattaacatcaaaaccacgttaaatattctcttgtcatttacattaattattattattattattcattaatatcttagagtttatttattacgtaaagactcatttattagttaacaaagattttaataataatatttttcaaaaaaatatttataattgatacatttatattcaaaaattcgaattagttgggagtaccaaccaaaaagttgttgtgtgggattgttctttatttataacactttagagaaataatattatatttttttttttatataaccgtgtataatatagctatagcaaatgttttattcatattttaaaaattttaaattatttagagtaataggcttcaaacattcggttactcatttgtttttttttatattggcttttttctttaaacgaatgtaattaattatttcaaacttctatttttaactaatataactagggataagaacacaaattttgtaaaaaaattattttttacatttgaaagttttgttttatatttttacggtatttt

SEQ ID NO: 326904 - DNA, 1198 bp, Cannabis indica
ctactactactactacaattaacttatttatttttaattttttacgggaaaaaattaaaaaccgaagataaaggatcaatggggcttattttatcagtttttctcatggagaggagaaatccaattaatatcttacctatgactttaattatttcctaataactaaagtcgtaggtgcgacattagcataaatatcacacactggacacatatcgttttatttgctcatctcgttctctctcttccctctctctaaaatcttaccaaccaccgcatttttctcattatcaaccattttttctttttttttttttttattaaaactctcatgattgactaccaaaaatacatctattacctaaaaaacttggtcgagattttaggaattttgggtgctcatattggtggcggtattggaataaaaatgtggctagaatcgtcttagtttttatatattaaggtaaacatgatcaatggaagtttcttcacttggaataacaagcaagaaaggaaagatagaaattgtacaaaactcgatcgggtgctagcaaatcttcatggatcattctttacaacacgactgaagttacttttctcccagaaggagactttgaccattgtcctatgtttgtttcggtttatcctgaaattaaaaatacttgtaagccttttaggtattttaatttccaaaaaatcttaaaccaatttaatgcaattgttagtgactataagaagacaaatgtgaccaaaactcccatgtttaatttggtttccaagctaaagaggataaaagttgggttgagagctcttatttaagatggaaaggggaatattgagacattggatagcatcgccttgagggaattgctttcggttcaagaagctcttcaaaaccaacatggtaatgaagagttattgaagaaggagaaagaggctatattgcgatacaatgagactcaccagaactatttactattcttaagtcaaaaagcaaagttaggttggataaagaatggtgatgacaacaccaaactttttcatgctagtattcggaaaagaagagttcgaaacaccatctactcaatcaaagatatgtgaggcaattgggttgaggagcaagataaagtgatacatgcctttcttcatttctaccagattttgcttggtacaaggaatgctagtagaaccaaggtgaaca

SEQ ID NO: 326905 - DNA, 860 bp, Cannabis indica
aaccaaacttatccttattccaagccccccaacctctcggcacatactccccaaaaactaatccagaatattgtcttgactatccaaaggaacatcaaactctgaccatgtatgattaacaatgtcatgacattcttcatctttcaaccaatgagtttcaaacctaaaacacctctttttgtcattcttctgaatccgaaccacattttccaaagtggccaccgccggtctatgatcagaatgtaagaaatccccattagtgactctaaccgatgggaataaatcatgccaatcctggttacaacaaaatcgatcaagccgttcctgcacatgcgccgcaccttgccttttattaagccatgtaaaacattgcccctcaaaccccatgtcaaccaaggaacaattatctagagtctgttggaattcattcatagcagaaaaactacggtcagcaccacctttcttctcactgggggagaggatttcattaaattcacccccacagatccaaggaagatcaaaaaggtccttaaggcgcctcaacaatctccaagaatcggatctatcacttgctttaggattcccataaaacctcgtaaacctccataatcttctacccggacattgtaccagagcatcaatgtggcccactgaaaacgactttaccgacacatcccaatcctcattccataatagtaacaaaccaccactcttccccacacaatcaacatgaaaactattctgaaaattaacatgtcgccttataccttccgcccaaccaccataaagtttagtttccgacaaaaaactaaacttggggaaaacttacgaacaatcgttcgtaaggcagtcaacgcacc

SEQ ID NO: 326906 - DNA, 711 bp, Cannabis indica
acatgttggggcgattaggcatagaacgtacagtctttaggagagttggacatattttgtatagtcgttaggcgataacatttgtatctactaattgaaacagttgtagatattttgtacacaggatcccaatatatatataaatgttagtttggtatttataaatatttaaataaagtttcaattattcacgatttttaataaactcattgattagcaatgagcttcacaattagtataaaatcccaataacactcctaaactagtaaggtgttatatttattagacttagcattaaataattacatatattttatatgtggtagctattatctctagaactacatataatatatattaatataaataattaattcgacataacattaaatatttatatatattgtatatgtggtagatattatcttgattatgatgataattgttattctatttttcgcactatgacgttgcatcatatactggtgacacgtggctcctatttcctacattgagctaaagtgatatttcgaacaaagctcagcatacacctgcacggatagagttttctcgaccgagcaaggtaagggtagactttggagcagcgtatcaccacttagcaattctaagacttgcatcgtgatgcacaaaaccaatccctataatctagggatcgtatcaaaggaatatggcaagctgtctgaatcccac

SEQ ID NO: 326907 - DNA, 1076 bp, Cannabis indica
ttatttttaaacaatatagtagtcagtagactagagaattactacattactttctttattttagtttgaaaaacaaaccgcgaaaacatattttctttggcttaggttaggcataaaggccagtttggcctaattgtgttgtatgaaaaaatagttgtaattgtgtcgtgagaaagattaattgtagtagaattgtggaaaaaaaaaaacgaaagtatttggtaaattataaattttaaaccgttgtggcctgtaaatttttaagattctattatattgttaatgataatgttataatctaatttattacaataataaatatataaaaacttatgttatattagatttttatcttctatgtatttttagttattttattccccaaagtataaatttatatgtatttaattaaaataatttatattacatttaatttatatttttatctaaaaaaattagaaacttaaatatattaggagctctagatcgatctagtttgttaatattaaaaataaaaaaaaataaaatatttttctaaataaaataaagaaagaaatttaaatattatttattttaattatttttattttttataatatataataaataagtaaatatattttttgtacaaataactttattataaagtattttaatcaaaacaattttttctaaaaattaggttattataaatatatttttagattttaataacttctccatagattttttactaaatactttcttatcttgccaaattgttacctgttagcaccaacatagtcatatccaacacagtcatatattaatgttataataaacggttgtcagtcttacattatgttacactaataaatctcatttatatgtatgctaatttgttacttcatattgcactatttttttttttttgacgtggtgaactgagtcacacatgattaaccacgatcggcggtgcaacttcctcgaaccaggatagcttattgtctaaccgaagggcatgttttgtcaaaccatgaactgcaaaaatcttatcgcaagctacatgtgacaaaactgcccccggaaatttagac

SEQ ID NO: 326908 - DNA, 1006 bp, Cannabis indica
gtttattaaattaattttgtaagcttagtattttgatttaaatatatatatataaaaaaaaaggcaagtcctctacatgcaattgcaaagatatttgaattgaaatggatatagtccttatttatcttgtccaattcaatatttatttaatgttaaggtacggctaagtttaatttatttgagtatgggcttgctaattgctaagacatatatacatcaatggaaactacgtagaagtttccacatccaaaaatattaaagaaatatcatactcaatccgtactcatatacttttatcaatatattatcctaatccaacatttttaaaaataaaataaaatgatgacttcattaaagatgccttgagccaaaaaagtaaaacttaaaaccataccaagcaaattttacagccataaattggtagttatgcaagataagatcatcaggctagctaacaaaaagataaaagaaatggtagttaaatatttacagtaatatataatagtaatattttttataaatgggtaaaagtaacaatatctactaataaaaatgtactaaaaaaacaaatacaaatctcacataaacatgaccaataagagttaatcaaaatcaaatcatgtacattaacagtagtgtagtatatggcaacacaacaccataaaaagatgagaaatattaaaatgcactattaatattactatcgatttaattaagtattcggtctcatataatttaatgtaataatttttagaaaatatcactaatcaattacaaggcaacatgtctacaaggtgcttgttaggcattattaatgcccaataacaatacttaatctacaaagatagaaattgctcgacgagccgtttataatagttacaaaatattttggtgaaccatcaatcaaaaccgaatcaacatactcaaaccaagaagataaaatacttgaggagtgctaattacaacttcctattacaatttttttagtcaacctctacgtctgaaa

SEQ ID NO: 326909 - DNA, 556 bp, Cannabis indica
tttttcttcttcttcttttgggtcaaataataataataataataagtggtgtgtgtcatgttgtggtggaccatttgagacaaaggttaaaaagaattcacctcttccaatgggaatgccccaaattgaccactccattccatataacatatatgtataaatgttcaaatttcaaagtaaaagaatagacaagcagacaaaagaagattcagatagggcgtgatttgattttgaacgcctttttctacacaaactcaactttcacacacacaaacaaaataaagtccttcaattcttcaggcaaatcggcaaaatcttttcatttcataaaacccatttgtatcccaatgtcatgctacatattgtattaaatagcaaataatattgtatttaaataaaattccgtattgtattatttaatacataataaatcatttgtggtgaatcctcacccccaaaacaaattgttacaacagtaacaatgttcaagaaacacaaatcaaaactaaaaccaatcataaaaccaaaacttgaacttaattgaaataagacaaag

SEQ ID NO: 326910 - DNA, 1376 bp, Cannabis indica
ggttgatttacatatattagtgatttttgttcatataattttggtgttttttgatatttttcaaaaatctggaataaaaactagtatgttgaatttcttgtgcagcataatgagaacagtgagcgtgttaaaatttcaaaataaatttatgtcttcataacattgttgtccatgattgtgaaataaaaattgtacatgcaacacaataataacataaaaacaatgaggaatgagacttttttattaagagtaataaataatgaaattgagtttacgtggagaaatttttttttataatgtattataacatcttgactcatcccaactaaatatatatttttttattcagtagttggatcaatctttccataattttcaatattgaatatttattagagaaggaagcaaagcagccatggctgcacaaggagtgactcctcaaactcaacctgatccttctgcaaggcgaccacggggaaggccccaagggtccaggaccaggagacaagaaaacaatcaagggaaccctacaaacacttaggaagaacaacctataaatgtgagggatatctcgatggatagagaaaacccacaaaatattggaaatataagaaatcaagaggctcaacgtgacaatctaagaacttcccatgatttgtaaactatgggaatgaatagtttgatataccaaagtcatctcgcatgaatgcaaatgccaagcaggtgcgacctagaaactaggaaattccacaacatgataggagaaatgctagaaatcaacctagggcaggtcaactcccaaggcatccacaaaagcctactcgcaatgacagagaaagtgcacacacttatctaagtaaggaccgtgtgtcaaatctcttttgaaggggaaggtcgatgcgagaagagtcacatgaatttggttcaattatagatcaaggtgggtcaagatcaaggacacgcaagcgcagtaggtccaccagagctcatgttcatgataggtgaatgtagggctgttcatccgatccaatccgtacttttttggtcaaacaacatccaatccgcactaagtgtggatttcaatttttagattcaatccaatccgcacaatagctcaaatccaatccaatccaatccgtaaaagtgcggattggatcggttacttttgattggttactttttaatattaaattatttaatatttatgaaaaaatattttttttttcacataactagcaacaaaataaaataaattatagttattttatgtctctaacaacacattaaataaataaaataacaaataacaaattcaaaggaagaaaaaaaattgtaatatatataaaaaatatttaatttatttaaattgtaatgta

SEQ ID NO: 326911 - DNA, 649 bp, Cannabis indica
tttttttcaaaataattattgagaattttttttttcaaaatttaaataatttatataatttttaatttatttacaattttctttttaataatatctaaatattttaaaaagtacttatataattatccaaacaataaaaataaataaaaacttattaccttatactattagctataagtaagtaaaagtaaaaaacttaaaattaattttagcatacaattaaaaataaattaattatgaattttaattacgtttgtatatagaagagtacgtttttaaaattatatattttaatttattatcattaagaaaaagttaaagtaatagaaaagaaaaaaaaatgaagaagaaagaattgcttttcgtgtccttttattaatatgttttagtaatagaataaaaagtgtgagtggcacctaatttcctttatgtaatgaaaactattcaaactttagaacatttgtttctacaaaaaaaaaaaaaacgaaaaaaacttaaattagtagctaaagttgttaactactctttaatcaaaaaaaaaagttagttaactactcataattttagtgataatatttctttgcaaaaataatataatttttgtgatttaattagatagatttttctgtttttttgtttttgtttaaat

SEQ ID NO: 326912 - DNA, 1111 bp, Cannabis indica
taagaacataaataatacagttgagctgaacctaaccatatcaggattaggatccatagacctaagatcaatcagtgttattgacttagaaagatataacggtaagtttatgatatcttattcaagttcaatatcggtccaatccaatgtatactccatacatccgatatgggtatactttgccaataccctggaaatgacataacacttatgcaaggtgtaagtataccttatcgttgattatcatgtcagtctaaatctagtgtactgacatatcatgagacttaaacttttgagcatataatcatgattattttccactgtgttgaaaacattataatcatgaataaatagatatatatgttctggacttaatagaatttatacattgaacatataatcatgaaataaatcatgtgaaccatgcaacataaaatgatttatgatcttttattaaataattagtaaatatgattatattgaagtgagttttattttgagcagaaaatccaacaccccaaaggtcagagtggtcataatctaacctttctgtagtggtgtgttcggccttgttgaactccaatctgcaagccttccccaaagcatatttatcgtagaattgaagtctttatgttagcttctctttcaacagtacttgcctattcttttcctcaagtcccatgtgacttacatgccccaatctgaggttcgccatggccttgtttgactatttttagttgattaataacaagcattacactacttgttattatctttccatccaagaaatacattccatcactcaaccttcctctaaacacagtttcagtgccttgttcaatttttattacgctttcctcaactttgacaacataccccactttatcaaacataccaatagagagaagatttctttttagatttggaacatacttgacctgctacaatgtcttcatgactccatcataattttttcataagattgttcacacaccttagatctcacacgctttgttgttcctaagaagaactgtgcgcctatgactctctaagagggacctaaaaagttctttgtttggtgtcatatgaaatgaacaccttgaatctagaa

SEQ ID NO: 326913 - DNA, 927 bp, Cannabis indica
ggaagaaaaaatttaaaggacattttcataaaatttttattttttttaattcacaaaaataaaagtaaatttttacatttttaaaattttatttttttaaaaaacaaaaatatttttttaattttaaaaatagaaaacaaatttgtatttaataaattttactttataatcttatttaagtcgggtctaagtccggatctggagtcgggactatggtgggtcggggttagagtacggatttcaaaatttaagttgaggtcgaagtactaaaatattaattaagaaaaaaaaaaactatttaaaaatgttggaaaagtgatttttttttttctgtttttcaaaatttttaaaattttgatttctcaattaaaaaattaaaaaatgaaaataattttataaaatatatttttggaaaatatttttacttttctaattaaaaaaatagagaattgattaaaaaaaaaaaagtgttaacaaacacattgttaaatgctcccaaagtaaaataataaaagtcaatataaattaaaatttaattttaattaatagaaattattagtaaaattactattttaatgatggttttctaaaaactttaaaattttaaatatatacacatgttatgtgtatcatctgacatgttaaaaatgtgttgaacataattattgattataaatataaataataggccaattatgtaaaacctcaagtcatatttgaggaatgtcacacctgaatcatttttgaactattagattgataaaaagtatgtttttttggtatcctatggtaagtatatctcaatctagaagcaaggatagaaaatttagttaaaaatggtaaccggctcaacaggcccggccctgggcataggcgggctaggcctgtgcctagggcccacccagcccaggggcccaaatttttttt

SEQ ID NO: 326914 - DNA, 588 bp, Cannabis indica
ttaccgattttgaaaaatactatattttttctaacataagggcctaaaattttttaattccctatggcccactttgtttcagggccggccctgcagctcaatatagctactattgtactatcatttattaaaaaaaaatccattaaattggcaaaacaaagtatatttttgttaagttactctgacctacattatctcaaaataaaaaattgcagtaacatatttttttttctaaagtgaaacatgctatttgcaattttattttatcctttgtttaaattattatatgagtgaacaatattatgatttgtattagaattaataataattataattctaattgattttattcaaagttaatatttagtttaatattgaacaatatacactactaatcatagagcttgtagagcaaccaagtcaacaagagcggcattttctgctggtgtgtttgtttgttgctggagatcggtatcggtcgagatttgatcggagaagagaatgtggcggcggagaagaaaaccttcttttgccggcgcatttttgcgccggcaaaagtacactcaatgcgccggcaaagctttgccg

SEQ ID NO: 326915 - DNA, 737 bp, Cannabis indica
tcatgataacatagttttgatcaacacgtaaatgatgttttcagggaagatctcaaaaagcctttggaagaggaaaagagaagtcttcaagattctctttatggaaataaccccgaaaccaaagaaaatcttcaaaagctgagagggattgaacaagaaatacagacagtcttatctgaaattgaaaagaggttagaaattcctgcaatatgaacatattaatgatgtatgtgctgaaagtccctttaatgtaatatttattattatgccagaaaggatgaactctctgaactttcgaaagaacttgcaaagcagcctaaagtggcatcaaggaaatcgtacatcgatcgggtaaaggaaataaccaagaacagcaggaaacaagaaagtgacatagagaaaatcttaaaagatacaagggagcttcaattagaaagtaattccatccaagagcgtcttcataggacctatgctatcgtcgatgagatagttttcaggtaaaacatttgcatttgctttaccgaaggtggaatcgatgtcatttcgtgttaaacttaaaagagaagcttgttttttctatgcagggaagctaagaaggaaccagtgggaaggcaggcctataggctccttacaagcatccacgagagctttgaacaaatatccgagaaaatgctggcaactgatagaatacgaagagaagtgttggaacacgaaaagaagcttgcagccatggcatc

SEQ ID NO: 326916 - DNA, 574 bp, Cannabis indica
aagaagcttgcagccatggcatcgcgaagcttcaatgtagacaaactacagtctgatattgatgatattaggaaggaaaatgagtacttagagaaatgcatccaagacaaagtgaatgagtgagtggagtgaatcccttgtgtttttgtttgtataccaaccacattacattctttcaattaatcaatggccattgtcttgtgaaattaacattgtggttttacactcttgtatctttttctatacaacttacaaagtggaataaatagtgaaaattcaaaacttcttctccttttgttagtgcttctctctttaatgttcaataataacttctctttatatatacaagaatacactaaaaaaaaatacaaaaatatgattacacagaattttaaatatttttataatttttacgattttatttacaaaaaatatgtgtattgatttatttttatgttgtattcttattaatttcataaatacataaaaataacaaaaaagttacaaaaatatgttacaaattttaaatatttttataattttattttcaaaaaatacaatcttttgatgtatt

SEQ ID NO: 326917 - DNA, 719 bp, Cannabis indica
cgtgttatttttaggaaaaccgtaaaaatagtaaaaaaaaatattctttgaaacgtaaaaatgtgcgtttacaaaaaaaaaaaataataataagaacgtaaaaatgtaaatattttacaaaaaaatggtgccttatgtaattattcctagaaaataagtaccattgaatattctttttttaattcatattttagtttgttgttttttttagcaaaatgataactgcattattttttaatttagttttggctcttacaattcatcaagtgatgtcgagtgaaagaattgattcaattaaaaaaattatggaaagtatagatgatcaccaaagcttaagaatttttgtctaagaggaaaaagtgatgagaattgaatcctattctcaaaactatttctgtggattatatagcaaagagacatatactattgcactaaatatgttaataaatattattaaaattaaaagtaaaattctccaacttttagctattttgaccaaaccgtaatcttcttcaaatttgcttatcacaaactttttgtttttcctttttaaatagaataattaataattttgtctcttaaacttttgataatattaattagaaaaaattacatcgagaaacaaaaatttaaaaaatatattacaactaacgttaatggttttaagtgttaaatatacctttagttttacaattttttttggcaggtatatacttagg

SEQ ID NO: 326918 - DNA, 1073 bp, Cannabis indica
gataactaatcagattgtaaagagttttatttagggcataaaacccaacagctaccccctaaggttaagaactttctttggagaacttgctcaaggtgcctgcctactcgatctcagttgaggttgagacatgttcaactggaaacaaactgcccctggtgtcaaaatattgcagaaacttctctacatttgtttgttccctgtcctatagctatgccgtgctggagtacaattaatttcgagacaaaagttgaacagttcactacctttgctgcttggtttcagcatggtttggttacttagaacgctgcaacaaagttggaagtttctatgatatcctcgtctatatgaaagcaccggaatgagaaaatttggaatgctaagtcacctacggttgatgaaatagttatgtcagcaaaactcaccttcacaaactggagtaatgctaaggaaagatgtctaacaactccctcagctcagacagcaggagttagaaccgagcattggacccccctctttttcctaagttgaaggttaatgttgatggagctctttttcaacaggaaggaagatttggagctggtatggtggcacgtacagttgctggtttggtgttggagactaggcagattgcacaccagggtgtggtttcaccaattgttgcagaagctttaagtatacaagaggcattaagttggataaaaaataaacaatggtgtgatgttattttggagactgattgcctaagtgtggttaatgatattcattctaaaaaacctatggtttccacatatggtttggttattcatgattgtaaggcattgctaatagaattacccctggtttcaatttcttttgtaaaacgatccgtgaatagagttgcgcatgctttagcacgtaattccattcacatggctgattgtacattcagtatggcttctttgcctactgaaatttcatccttagttttggatgatttaagttaatgaagttttctcttcttttcaaaaaaaaaaaaaaaaatgtgatgtatgcttaacaaaataaaataaaaattgtagttagcaattatg

SEQ ID NO: 326919 - DNA, 669 bp, Cannabis indica
aaaaaattatataaaagtatttagatacactaataaaaaaatgtcacaaggtttctcttagtatttctccaatattaatataatagttctcccaactgtactacagtaccattagctatatgtatccccaaaactgagatctggttgtaaaaatgacaactgaactttttcttaatttgggctttttctcgaattaattatttttaattgttgggttttaattattaattgttactaattaaatatatggtgtactcaccacgtcatattaatttaatttcaattagtactgtgtcacactaccaaaaaataattagtggctgacaatatgccgctataatatatataagaaactaaattaaaggaacctttaacaaaaaaaaatttgggtttcttctttttagctaatagattatgactataagagtatttttaatgttaatattgtttaaagatgttatatctccgtatcatttaaatatataatattttattttatttttcttctatattttttttggtatttttatttttaaaaacacttcaatagtatgagacattttaagaatgttataattataatctcaaatattattatataaggtaaatagcgatataagtactcaaaatttaagtttgtaactgtcataaattcaatgtttattttta

SEQ ID NO: 326920 - DNA, 779 bp, Cannabis indica
ttaaatagctacaacatatacaattaatagaaaaaaaaaaaaaaaaaactaaatttttttttttaagatgttaaaacagatacaagaatctactagatcgacttttttagaattaaagaaattttcaaaaattaatttttattcaatttattagacaagattggatatcatgtaattatatacctaatgatcaataatttggaaggatgtaacaattatagaaaaaatgtggttttcaattattattccttagaaaattaaatggttaaaaatacaccacttcatcaatatattgcttgtgaatattatttgtgtgtggaaaatttaaaaatatatataatctaataactcttaccaaacaaacatagatagagactagttttatacaatgtatctattctttccatttctctttgcatttatactaattaaacaagttattcattttatttttcttctacctagctatactaaacaataatttacaaaccatttctctaatttgaaggccatcatgacttatcgagccttttaaaaaataaaattatatatataatcattttatgatccatttacatattttacttaaatattatacaatatatttatagaaatttatatagtatactcccttaaaagattacaaatttggtagattttctatctatttcgacatttaaaaaaaaaattgtctattttttttaatcgcagacgttgtagctatttagtactaaacttataaatttttaaaaaaatttgaataagtttacaatactaaa

SEQ ID NO: 326921 - DNA, 579 bp, Cannabis indica
tgcaaaaataagctagtaaatgatcacttatgatacggtgattcaagattggtgagcaaaaaataactaccattttaggaggagcatgaagcactaaggtgcctagaaccactatgagatgatgcccatataaatcaaatgtaataaaatatttataaaaaaatgagctacttcacttatcatcgtttgaaaattcaacccatgatttttgttattggactttaccaatagattgatataatcatttttcaaaaagttgatgagttttatttttgcttttccaaatatacttgatacgtgtagtggccaaaaattgctttaagcccaacgaaaaggtccaacgatcgaagtacttacaaagcccacttataagtcagaaacaaggaaccggtaagccctcacatgggctacgggccacgcccaatccatgccttttgggtcatacccatattcaaacgcccagcccacaataaagcttgatcttaaagtgtaatgttaggtttgacacgtggatgaagaaggatgttaagtttcccaactaacccacaaaaatagcaatcttccctagcatagcggagc

SEQ ID NO: 326922 - DNA, 1066 bp, Cannabis indica
taagagccattcattccgtgggtgtaagggcccaatggaggcttgaagcggggacgttacaacttatttgggggtacccatctatgcaaagaaaatatcatggaaaagaatgtgctatacttgctgagaaaatcacagtaagaataagaacctgaagctccagaaatctatcttttgcagctagagtggtattaatcaactcaatgttgatggtcgtacatgcttattggtgtcaggtgatgattctactcaagaaagtgattaggaatatagaatctatttgcagagaattcttgtagaaaggataagcattgttcaatgggccaggtcctatagcttggggttttatatgtcaagcaaaagctgctggaggtataggaagatagtttgtgattaagatggatacacaacaggcgggttcgatatacatttccccgaacccaaaaaacttgaaacttgtcaaatccacccgatatgtcaccttagttttgctgttggttcatattttttgttcttttgatggctcgctatcaaatcactattattggttaggaataacaagttcaccaacaaatcctaatcatattagttgattgttattaataaaattatatgatttcttaaaaataatgataactcatagggtggtttataattttaaactttcaaatttgaaatatcactacgagaaatattacttttaccagctgtttgctactacgctagtaaaagtaacttttaccagcttatcttgcaaactgcgcaggaaaataggtcaaaattttaccacacatttacaatgacaagtataatttttacaaccgcatttacgtgttcgaaaaaattatttttgccagcactttcattttgcaccgacaattccttttgccaacatatcaaaagtagattctgttttgccagcacaatactaaattttagccaacgtgaaaatgtattgacaaaagtagcatttcttagagtactatttaccaaaaaaaaatgtattaacattaaaaaatatatatatgatatatatttttatcattatatatatagggatatgatt

SEQ ID NO: 326923 - DNA, 1188 bp, Cannabis indica
caatataataattatatagtgttgagtattattaattcttaccaatacttagtacataataaatatttataaaatataataattagaattgttcttttattttttttagaatcacaacatggtcttttttaaaatatatatatataattacttgttgaagatcaacaagaaaaaaaaaaaaagaaaaaaaggaaaaaagaaagaataacaaaacgtgagtaataaaacaaaattgtattttgcatatatgatcattattattcactgctaattattttgtaatatatgcatacatttgttacaaccaggttcatcattttatttaggtaaaatatttatataattatttaaaattgaggataaaaatgcatgcaaacataatatcctaaaattaattatcctaatctgtgttaccataccaacccaaattgacatgcatgcatatatagtttcataatttctctcctactttgtgaatgatatatatgccttctcctcatctaccaatatctataacatatgaatgtatgtatatgtacgtatatgtaaatataatatatatatatatttatacagattctgatccatcgatccaaatagttgggtagttgggtgggaaagacttgagggagacatagatgaggtaaacgtcttcaaaaagagacacaagtcaattaatttcgatatgtataaataatatactaatcagcatcttgacagaattaaattttatatataaattaatatgatttcttgatatatatcctaataatatatattatatacttttacctgtcacacatgggcatgtggagactgtgtattagtttttgttttgaagcaatatccttacctgaaaatgacctctagtggtagttaatatctcctcctgaatgatatcggcttaacccaacacaataatataaatataattaaatttatatcatttaaataaagaggttttttttttttatttttacttactctaaataagttttttgttttttttttttttttttttgcattttttacaaaattttacataaaaatccctattacaactagcgctgcaatttaatttgtaacaaaaaatcgtacagaaacccttattgcaactagcgatgtaacccctttacaaacccaaactgtaaatttgaagaaaaaaaattaaaaaatagtatatatagt

SEQ ID NO: 326924 - DNA, 803 bp, Cannabis indica
ttttgtggcatttagttttgttgccatatttataataagatgactcatttttcccatatttttgaaaatatccctttaattaatactcgttttcttttcgtgccgctatccaataagcatgatattgttatattataatttggaatcaattattatttattatatatgaatgaatggcaattttataatacacgtaaggataacattttcatttttattaggacttttataaaaatattagattttggataaaaatttataattttaatgttacacgaatttttttataaaataacaaaacagaataattaaatcaagagtaaaataataaaaaaatatctgtgaaataactgtacagtacataatataaaatttacacaataattttaacaaaaaaaaatacagtatttttataaaaattctaccccacaattaaaaaaaattaaaattttaatatgtttaaggaccttataaaggaataatatatgtgtgagtgttaagagagtacttaattatatatgtcgaaaactcagacagcaattgaaattaattaaggtaaacaaatgtttaatcacgtgacacgtgcatgcacctaaatatttgtgtttgtgttattctattccaactaggttgttgcatggctcgataaaccccacccattatgggtaaatactattttggaccctctattttacaaaagttaccaattggaccctgtgttttgttaaatgacaaaatggaccctgtattttctaaaatagtataaataggaccctgaattgattttttatcaaaataaagtt

SEQ ID NO: 326925 - DNA, 893 bp, Cannabis indica
tagataattacattcttacataataattcacacttctttattattttattatatttatatctttgtttacattcttataatttttttcttctttcttttggactacttagcccttttcatttattcgattttttttaaaatttttatccacattgtttatctcaatcatataatacattaaagagaaatgagtggtgtatcttatttattacgtgttaatatcttataataaaatattatgtttcatataatttattataatatttttttaaaaatattactaatttattgtaaagtaagacgtttaaaaagtgatagatactactagtgacaaataacaatgttctacattaaagaatggtagtgcctaacagtttttagaggttgcaaccaacgattcgctagcgatattccctaaaaactattatattaaattatataagactcttaattacaccaatagcaatatgatatctaagagggtactaagcaccaataatattttttagcatttctctaaaaaaatgtgatgccgtcatcatcatcttttgctcatgtgacattttatgtgcgtaattaattaaatacttttaaatgagttaattaaataattaacccatttttaaataaataaataaatttataaatagagttgacaccagccaccacatgttgacatagcacttccatcaatttttctattttattgtttaaaatacatcactaaaattttactttctttattttacatcacacttttacattacaccatatatcaccttttttaatttttcttttacaagatttaaatattatatcttattaatatattttatttattttattataaaaaaaaaataataatacaacacacatatgtaaaaaaaattaaa

SEQ ID NO: 326926 - DNA, 563 bp, Cannabis indica
ttttttttttactaaatttaactcatttgtcatattatgcatgcattagagatagtgtaaaataaacgagttgtaactatcaatatatattcttcccattattcaaacttacttttcgttttctattaattattattgtttaatttggggtacaacaactgtacaagtacaacaaataatttagtttgtccgtacgacgttgtttgtgttgaatagaataattaacattgcatgtgatttataatttcaaaattctctgtacgtacttttaaagtgctcacatgacgtctatatatattagctaggtatacattaatctcaattttgtatatataataccatgcatgggtacaattttaatatatacttcacatatgtttactaataattaaacaatgggaattaataataaaattatcattacttataaatttgtttttttgtatatatcagatgagtatattattacagctcttcaaaccaatttctatctttttgtgatacttttattcttgttgatgaaagtattttttttcattatcttgttgatgaaagtatttttt

SEQ ID NO: 326927 - DNA, 619 bp, Cannabis indica
gataactgatcagattgtaaagagttttatttagggcataaaacccaacagttctgtcctccctgattgtcacttgggtcgctatgacgcccatggtaacctactgaataggctcggtgagccttcatagctaggactggatcatgtcctcgagtaatctcttaagctaaagatactggacgcgagaccacaaggagttagttgggtcttgcctgctttcactctttctgatgaggcatttagcaaggttcttgctagtggcttagtaggggatgtccagtgcaagattcgccatagaaattgtcgtgcgcaccagccctctctaggttggttagcgtggtttgaacgtcatattgaacatgggtcagtgctaccacttcattagtattttcttaacatcactgcttacttcgggatgtgcccaacacagctcatgccaaagagcatcaagtatcttttggcgatgttcgtgttgtatagggagctaggctaacctctacataccccctacgagattgggtactactttgatctgaggttttagccgaagtagaacaggataggatattttaatttcagttagattggtctccaatggttgggtgacactaattgcaca

SEQ ID NO: 326928 - DNA, 711 bp, Cannabis indica
ggtatatgtgtacccttccttattatcctaccctatcctactcaatgatatatttatatatatatttacatttttttaaaaaaaaatagttataaagattgattttaactaatattttattttttaaaaattaaaatttatgttttattattcatattaaaatattatttttttttactcttttgaaatgcaatcacatacatttctatatattgattttgctttgacttttcaaagtattttttttttattgtttgtagctatgtatattagttgtaattgcaattgtatatcaattactatgtatgatttataaaaaataagggggggggggggggggggcgccacggccactgtaaccccatatgtacatccacccctgattagagatcaaggctaagatgaaggtatatgtctattattatatgttaatgctctaaattaaatgtttaatcttggttaataagggtattatttgttgttaatgtttatattgattagaacataagtaatattaataaaagagattgtaaatatagatagataatattaaagtttataattactttttatttttgaaaacaatcttataattacatttttattatgaaacattagtattatgtaatattataatttagagaaagaaaatagagaagagatgagaattttctgagtgttttattccaataggtgatctcctatttatac

SEQ ID NO: 326929 - DNA, 810 bp, Cannabis indica
atattttttagttattttatagtttatttatagttgtcgtgatgtcgatttttcgttattttttaattgttttttaatttttttgttgaaaaaagtgtattttttgtaattttaaaattataaaagaagatttttattaaaaaaactttaagttgtaaaattataaataaaatataaaaaatggtatttttaaaactttcctaataaataatgattgttttgttttgtttttctttatgtttgaattttatctagatgtataaaaaagaaaaaataactattttatgtttggtatgataaactgagttataataatgtgtgaattatataaatatatttattggggttgtgttagaaaatcaaatgtggaaaatattgctattggacaccagtggtgtttagcacccttaagaagtgtcgccttgcgattggctagcgatacttcttaaaagttattatattaaattatatgagactcaatactaaatcgatattgacacgtaagaaggtgcttggcaccactgatgccttttagcatttctcaattataatgcaagaataatgaatgcaaaagaggcattgtaaagtctttcacaatgtatattggggctttttctccttattattaatgtcttgttgatttaagatgtcttgttcattggaaaacataatgtgttgactaaaatttttgataaccaataaataagaaaaaaaaaaagttagagtgtttaaagaagtttgagactataatttttatagtgtagataagttgaggaatatttgtttttgtatctattaattaaaaatatt

SEQ ID NO: 326930 - DNA, 927 bp, Cannabis indica
gtggtgcagtttttaactttttcaaaccaacccgcatatgcagtttttctaattataggaaattttacagatttatccctacacaactcacacacacattaactttcaagttcaattttgacctttcatttactgaataaatgagcacacaattgacacgtattatatttgctgttattgttttactttgactttgctttaccatatatttgctttgtctaaacaaatctttgaaggacaaacaattagggcaaaacacagtgtaagagagaggttagaatgagagaaccaactctgttcttgagctggtttcagagaaaataaacaacacaaagtgattaacagattaaagagattagggtaagagagagcaaacacagagagattttacaaggttcacccctaaaattggggctacgtccttggtgagctgcctctgagaaaatcagccataatccactatcaagatcaatgattacatcaagttttagagctccaagacacatgaatcgcctggtagctcattcttcaactcagttatgtacaattctctcaaaaatctcttattttcttccctctcgggatcaaatagatcctctttctttcttctctctctgactatttttctttttcttcttttaacacgtgatgagtttttactggatctctatcttcatccctttatggtttctgagaagttttgtgaagctgcaagtatttatgtgtttagatccttctatttatagttgatgtaataactgattaagttagataggaataactaacaatggtcttcatcttggattgcatatggttaggttagttaggattttaacaaactgttttttttacttgtaatttgtgataggtcaacttatatgaggaattatttcaacactaatttcccaaatcgcacccgcaccgcaa

SEQ ID NO: 326931 - DNA, 1384 bp, Cannabis indica
gctctcattgagagttgaactcaagaaagttacaatcaagatggttgcaacacgttctacaagtgttgatagattgactccagcaactagccatgcaactaggggcacaccaattgacggggttggaattgagactacttttgtgccccaagtgctaggagctggttctggtgctaggagtaggccttggaaccagctcctcaactcatcttccaaggccaccaccaactgctcctgggactagcaccaacgaccagatgtcgcttggggagccacacctggagatagaagaccctgaggagaccgatcctcaggtagctcacctcagccaaactgtggctgacttgcaacaacagctacgatactttctcgataagcaacacggatggttctaacactggttcgtggaaaactagaagaacattgagagttgatgcgttgagcaggaacaatagagagctaacctatcttaatggattagagaagcttatcactctaatcgcggaactacctcccaaagaggtttttttgagttggtgagagagacaacccattgaccaactggtcacgtgggaactagtatccaaggcaaaaccctgtatgctcagaacaacactgctaggtactaggcaaacaccaggcgtggaaacctcccagagggaaggtacccttgatcaagagctcgagaggactcaagctcaagggcgccagccaatgggccctccacctgatgttgaacgacctcgcaagaatgagagaacttacatgactcctccagcaagtcctcctcaatgttctcaagaaactaggcctcaagaccctgtgaggggaaagggacctactactcaaccttaaggaagtagtaggagaagctactttaaaactggagactaagaaattcggcaggtaaggaccaatgagacacttcatactcgaaagtatttttaagatgaaagggggaattatgccgttactttgctcgtggccccgatggccaaaaacatgattacttccctcgagttcacggagaaaaattaaacttgagcaatcaattcaattctgtccacacttttttatcctgctgaagactactttgagggaagtacccattacaatgctccgaatgaacactcccacatgggtcatcccaagatgatctagagttcattttggaggcctcactagagttgccttcacgagccggtgattaggagacaactataagacctaggtcgaccacagtacaagaacgatctggaagattaagagacctgcatgacctcttaaacaggagaagaatggtggatgtgggaactgttgggttttgtgccctaaataaaactaatttcaatataatcagatttactaattaataaagattaga

SEQ ID NO: 326932 - DNA, 535 bp, Cannabis indica
agcaacgagggcagttcacttcatccccgatgttatcgtactctcctctgccatcgccatttccatcgaaggtcgggccgccgcaattgtagcggaggaggtgggaaaaaggttgttgtattcggagtccacttgtagtggcggtgatgtgagtgtgggtataggacgatggcggaagaagaaaccaaccaccggcggctgtgactgtgcatggcagagagcatctgctcaatatgatgaagggcagcatctgtttcgagctgtgtttgtggccgttgcgttgaggtttaggtatgccttttttccatggaaagggaggtttaggttttgaatacagatacagattaaagagacgtccctccctagcagtggaggtttaggtatttagtgtttaggtttttttgattgtgtttggatttgaaaaaaaatgttgaggtggtggtggtgggcagttgtggttttgttgaggttgatggtggtgatgctagaagaagaaggaggaggaggagtgcatcaagatagaagaagaagaaag

SEQ ID NO: 326933 - DNA, 1032 bp, Cannabis indica
gtgtgccccaatttgtgacataactggcactgaggttttgtgtccaagattgtgaagctccacggccagaagtgaagtttcctctgccactgtgaggagcttgaccacgaccattattataattatttctaggcatagattgcatatgaggaggtggttcattatacctgtaaggtgttccacgactgtaaccagatggcatctgagagttggaaagatagtttctgttggcaaaattcccttgagctgattttgtgtgggctaaattggcttcactcttgttgatatccagggctttggtgttcttctctatgcgaaccgattgtaccattagtagagcctctatttcagcaactgagtaggactcctttcttgttgttacagaggtaacaaacacatcgtattctgggggtaaaccattaaagatagctttgatgtgatcttgggaagattgtttatgaccgatggtggcaagaagatcaattatgcctttgatcttcaacagataatcatttaaagaaccggtcatcttggtattcctgagttgagtcttgtaaagaccaatattagcagaattcagggctgtgtaatactcactcagggcttcccagatttgcgcagtagtctcacaaccaatcatacaattggttgtcttccccgacatagaagagagtaaccaagaaaccaataagttatcttgttgctctcagtcttcgtaagcggagttgacagtgttgatttcatcatccgtactgagaaattcggggggggggggtcttgtggcgtccaagaacatttgcaaacgacttcctttaattgatgcgagaacttgatgtttccgcggtaagtaattgtgttcgtcaagtttgattgacaaagaatgtgagaacgaaacaggattggaacgacggaggtagtcatggttcgatcttgatgctcctccattaccggttgctgaagcttccattgttgagcgattcatagctctgataccatgttatatttcatagatgtagagagagagagagagag

SEQ ID NO: 326934 - DNA, 1075 bp, Cannabis indica
gatagctcgcctacttggatgactccataattaactatctactcggctgacaacttccaactgaaaagaacgaggcatgaacactcctgtattcagtgcctcactacacgatagtggatggaaaattgcatagaaaaggctattcatccctctccttcaatgtgttcttcccgcagaaccaaacgagatcatctaagagattcatgaaggcttttgtggggatcattcgggttggcaaagtctatcaataaagattattagacaggaatattacttgccaaccatcaacaaggacacccataaatttgtcaaaaagtgtgataagactcatagattctcgcatatacctcgcatacaaccaacaaaactaagaatgatggcctccccttacccattttctatatggggcattgacctgattggggcacttctcacagggcaaggaggagccatgtacacagtggtggccatcgatttcttcactaagtggaccgaggctgaacctttaatttccataacctgcaagaaagtcctcgacttttttgtccaaaacattgtctgcaggtttggaattccagtgaagatagtatctgataacgaaactgttgggaatattttagcaggatctagatttactaacaagtatgttgattaacatcctaaatatgaattctctaaatcaatgaaataaacacataagggtttaagaaaatcttacattaattgcagcggaatataatgactccttccgttcaagatctctagcccttgattcctttctattgcaaagcattatcaagatttgaacctggatctctttctctctttcgggtttggttaccaccgtctaactcactatgattgagtactttacttgctatgtgtaagcatgtaactcactcactataggccgaaataggtcaagaacaatgaaaaaagtttgaatcactaaggaagaaactctgtcatctagtttggttaaaggcattaatttgacaaagtgtcaagtggatgagatgagagcatcatgttccttttatagtgtttcaactagggcttagggctaaattatatg

SEQ ID NO: 326935 - DNA, 1420 bp, Cannabis indica
tcgcaccatttttgtcgatgccacaggtctgtcggatcaattacatttgcattgtcatcgactgagtgctttgaagcctatcacgttgcgttgtcatcaacgaaggggtcgagctcctctgtcgtgggtgtgagatcctccatcatgggtgtgacatcgacaaagagacagatcaagggaagagagatcagagatcaaaggataaggagatgaaatcggtgtaagtttttttatggttgagatggaaagatcaagaggtaggttgaaggaggctgctgtattttttaaagggttgaaaatgtagagtttcatgaggttccttaaatacctctacaaataataataataatgataataaaaataataataataataataataataataataataataataatgtagggttagcattaatagtacatacgtgtgatacctatttgatgactttttaactttattttataagatccctcgtgccacgttcagcaaaacttgtcacgttttttttgaaaattaaaaaaaacaaaatttattaattgaatttattagcttttaacgtctcctcagacttttcatgtctagcattcttagacatgataattttttttatgtccatcaatgttggacatgaaaactccccaagacttttccatctctccaacacattttttactggagcattgctatgaggcacccatgttgctaacaccacgataaagtgtcttcctataattggttaataattttctatagtatgtattgaagtaaaataagtaggattacaccaatatcaatattacatattacaaggatgctcggatgtcctttagcatttctctttttacttgacatgaagaaatgacatgaaatgtgtttttttagaagtgaatagttattttgccctcttatttttgctaattttcatatataatcatatattatttctaatagagtgttataaatataatgtatatagaacgtttttagcctataattataataaaatagaattccaataatagtgtataatattgtggattaaatttgacacatgttaaaatattaagccaaataatacataatatatattatggattactaaatttatagttcaataattgttacattttttatttactctttggccagtcactcatgagttattaatataattgattatcttttactttttatttatatatttaactaggaaacaaaagtcgcgcgttgcgcggttttaaaaaaatacataagctatatatattattgaaaaaagtttaattttttaaaatgtgaattttttactaaagttatatcatagaaaaactagaagtttctaaaaaataaataaaaatagcattgaaaaataaatgatttattcttatcattcttagttcttactatatataaatttttt

SEQ ID NO: 326936 - DNA, 938 bp, Cannabis indica
gattatgtatattttattatatatatatatatatatatatatatatttttatagctgttgaatgtgtataaatataataatttaattaaattcaaatttttatttagtaaccgaccatttttaatgatcaaacaatattgttatgtgtacttgttatcttttagtacaatattttaatattttaaataaaagaaaatgaaatacattataaaaaatatctaattttgtaaaagtctttctcattcatttaaagagaaaaaaaaaaatagaaaccaatttggagaattatatttgtaattgacaactacaaattgtaaaaatatgttattattagataatgatatatatgaagttagggcacatggcaaatggcaagtgaaattgacttaaattttaacatattttgatcactattagttttaaatttatttatttttatctattattattttaaaaaattcaatattactagtgtctttttttttatttataaatttggttttaaataattttgttcatactattaacggtatgatatgtcatgaaagtgttaaatattattaatactctttaaaaaaataaaaaaaaaatatggtagttagttatcatgtaataatttttgttaattatgagatatttgcagcgaaattttttaaatatttataattattacatacataattttaataaaataaatcgtggcaaaagtactttatgtcatgattttgttgcaatcgcaccattttttagttgttaaatattaattaaacctgttaagtgccagctcaaaaacacatagtgacatgtttctttagcttatttaatacacagtctaataataagttctcacgtatttttgagttgatacttaatggctaaaaaaatacgactgtaataaaatcataaaataaaatatttttgttgctacttttttttta

SEQ ID NO: 326937 - DNA, 1091 bp, Cannabis indica
taatttgtttttttttatatataaatccctactataattattttaatagttaagtcatttaattataatatttataataaaattttatttttttttacaaaagttagacttcaacttattacatagattagaattcttttcttgtataataaatatttaaataattaattatttttgaatgatattttattattttcttacaactaaaaaaattaagtatgagacatcaacttgaagcctaagtggtatatgttcaaataccattggactagagtaatgattctgcctacaatactacatcattttgttcttcagtcttacaatacttttaaaactttgggaaaaattctacatttaattctattaatataactttatcttgtttaattttaatttaaaaatagcacgttgttcaaatcagtagcacaaactagggttaataatatacataaatctatggaaagttgataatcattattgttgtgcgtacatacttacctttctagcaacaattcaagcacatctccttgaaatttcaagatttagaatcaacaaagcgagagatgaaagaaatcagaaattttctctcgttatagtattggcataaatttcaagctttagtattcaattcaaagcaagggataaaacttaagagttgagatacttctagaccactattgctattattgcaatgcaaaatttataaaaaatttacgttaattacgagaaagagtgacataaaaaataaaaagaaatcaaagttattatgatacatagagtgagggttagagtaccttacctgccatggctaataagactactgagatttattgtgttgttgagaaatcaaagatagcgacgaaaatcagagaaagcgatggggagaagagatcgacgaagataggtttctctatttttgatgtttgacttttgtttctttaaaagtagaaattgctctcagatttttttgaaaactaaatcaatatagtagattactagcgaagggtcttaagtgaaagggcccttcaatttgtgcaaaacaagtcgaagcaaggagggaggagtttttcttttcgagtttgaggttgctt

SEQ ID NO: 326938 - DNA, 656 bp, Cannabis indica
aaacgacatcaaattcagataagcgaaacccaatgcaccaagccatctgtcaacctgggcgttgggtacatactctcgagctttaaggattttctttttgttacttccaaggcttctaaacttgagggcaaggtctcctatcccattttcgaccattacagatttaatggtcacattggatttaatttttatgcaattgaaggcagaatcccaagttaattgttaactgcggcgccgagcccaacaccaaatcaacctaaaagttgggacccgtgtctaggggctcgagattgtagttttctcctggagtttgcttgattccacatttttttatgatgaaaaaatttttggaacacgttttggtgaacttgatcaaaaatagccccagttgacaatatgtcaccctgggtgttgcgcccagccccaagtgtcaacctgggcgttgggtcccaatttcggccctccaaaaattttgtttggtcacaagaaatagttaaatctcaatattttctgaaaatgaagaagatgcttgaaataattcctaaaaaactccatttaaactttccctggttgacaaaagattaacttgggcgtaaagccaatcccaggtgtcgacttgggcactgggccctatttttggtactcataaatgattg

SEQ ID NO: 326939 - DNA, 667 bp, Cannabis indica
aaaaaaaattataccttaaggattataaaaagttcagaaccttcattatctcatttcttctaaacaaaaccttgactttcttgttctttgtttatttttttattttttcaatgaaatgaagaaaagtgcaatgtatgaacctgcgtataactctaaaaataatgtatgaagaaaaattgcagtgtttctgcaaaaagttattatttttcatttaagatgataatatatgatgtaaataattaatttaattaaaaaaatcaatttataaaaagcaagtacaattattttatttatttaaaattcatacttaatatttttcaaatatttaaccaaaaataaataaataaagaataaaaaaaatcttaatatgccataaaatagaacgaccaagtataaatatcttaggacacttatttatttcaagtaattaaattgccaatattaataatttattaattatcatcttcggcttgcaaaagtatcttatacgatgtacattttcattatacgataaaactttgtgactaaagttaataaaactatgcttaattttgaaaactattatttttgaataatttttattttttaaaaaaagttacccaataatttctcataaaccaagaattcggttatatagtcacactttatatagaatagatatactaac

SEQ ID NO: 326940 - DNA, 925 bp, Cannabis indica
ccgagatctgatctagcgggacggggcgggacaaatccttacataatctggatcaagtcaaatcatagccagatcagatccgactcgacccattgacactcctaatataaaccatggttaattggaacatatattgtacgtattatattgacaaaaatgtttcaatttaatttattttctcaaagaaagttaggcaaaatagtcctttcaattttattataaagtagaattggaatggaaattatataatattatacatttcccattgttgcaacggtggaatgcaaattaagaataataatgattccaataattaataatggaattacattgccaaaattaagaattccaaaccaaacaaaatgaatatatatgaattatctttccattcccattgtttccaacaaaatatatccctattagtagaaaagtttttgttttaatttgtttgttttcgtaaggcacttagttgggttgggaacacatgggatcatcaagctatagccatatatataattaatcaatattagagctaattaattaattaagattgtaattaacaatgtatagtgcgtttcatacataaaagaaaaattaatggagagcaaccacattggtaaaaatgtggctagtattaatctacagtactatacttcttatctcaccattaatgaaatagacctttcatgactctttttattttccattttggtaagatcaaatattaatattcaactcctttggagcacaagaattattagtactactcaactcattgcttggccaccacgaaaatctcttcacatatatataaaaactctctttctcattggccgacataattgagtgcaataatatattcttttctttttggctcttgttactagctaagttgagagagagagtatatatatatataatatag

SEQ ID NO: 326941 - DNA, 759 bp, Cannabis indica
tattaaaacttaagaaaataaaattaacgttacatagttttatataatttaaaaacttaaaactaaaactaattaatgtatgtatataatttaaaatttcctctttagttttatataatagttaagcagccttatcattagttaatgatatttcttgatcacaaaaatgtctgagtctctaatgttgtatacggccattgtcagacttgatagagatgcactgttatagttcaagtgggagaatcaacaccgcccaatcacctcctgggcaatgctcaaacatttcattcttctttgattttgtgctgtgcctgtgggttcattatcgaatgagctattgtcgttgacccaaacaaccacaatgaaggaatattgggtacaatgggaagtgttggcatctcggttccggatgtacccgaccacatcttggaggggagctttgtcattaaatttgtcacaatgagaattgttttgacaattgctatcacaaaaggctggacagtgagatagctagaagtcaataaagccttctgagatggggatcttcaagaagaaatctacatggttcaatcacctggctttgttgatccatctactgttcacaaagtttgcaagcttcaaaatgccatttatggtctcaagcaagacctacggacatggtttgaaaagctctcatcaattttactctcacttggctttatctaagtaaaaacaaatcactcattgtttgtcaaacatgattctactggctgttcatat

SEQ ID NO: 326942 - DNA, 528 bp, Cannabis indica
aatatagtaaactattttagattgttatttcacattcataatttcttgcaatgtttataaataaatctaaggaagtcaatgagcaaattttatctgcagacaagattctcacatttataaatttaaggaacaaactatatagtggtgactttgttttaatattatcaaagacttttatgttctaagtttctttataaactcgatttagtcacatatttaaaggtctttactatattaatttacgaaatgatgtcactcattaagatatgtatgtttaatttgacaaaaagaaatgtgttataaataacaattcctctatattatggtaccgaagattatggaacatatatccataaattgaataaatattagtagatggtggagatactaattacacttgattttactaactttatttagagcttgtgtggattgcattaaggaaaaatataccaacaagctaaaattgtgcacattagaattctgtcatattagaaatcatacaagtcaattaacacttgtagatat

SEQ ID NO: 326943 - DNA, 1322 bp, Cannabis indica
aattctcaaaaatagaattgtaattcaagtgatctctaaatttattcaagtgagattaaaatgaggtttcctccaaaataaatttatgtctacaaagaataaaagattacgaagacacaccaaactatatgaacaatttgatcctattctgggtacgtaagcaacctaatttttaaaattaggtacaatcacaaatcctcaaaatctcaaatgaggtcattcacctcatcgaatcccaaataagatcattaggtaaagtgggccaaccccacttggaggctactttccaaaaaacgtgttatggttccgccctggaaaagcctttcgccttcagcaaaccatgcccgaaagacatgtccggtaccacgaaattagagagacaagacaacacgttcctaaaagacccttccgatttccctttttattcccgcatacaaataaaaaactccagttgccagatcacaacagagtatcctattaagattaaaggggaaacttattataacaaatcttatgcaattaattcagattaattatccataatcagtgtacgcggtattgactagatcaatccaaatccgctccgcctagtcagtagattatcttctccatgacttggatttcatgagaaagcccaattgtattatttattgtaaactctctaatagagggaaatgagaaacctaatgtaattcttaaactactataaatatcccactaattttattgattaagggttggactctcttgtaaactttgctcatgcaaacttgagaacatacattttctgtatttcctaagacatttacaagcaaaagacttattgaataatactgactcgtggactaaggctagttaatgtcccaaccatgttaaaaactgtttgtctcattttatactttctcttttgatcattattcatttcagttcttattatttttattctgcttttgaaaatttcggtaaataaatactgattagttgtctaaaaaaatattttagttagtttactcaaatttatgtttatgttatgtatattaaatagaataatttactttatatgcaaactatttatagtatatgacaattcatgaatttttaatataaacttgaaagttactaaaatgtatcttaaacataaactatacagtgactcccaattaaataaactatataaataactaaaaaaatctattaatatgtaatatgctttaataataatctttttaactttaatatttaaattattaattttttttaaaaaaatagtcaataatttattttaggctaattaggattttttttttccacattttgacatg

SEQ ID NO: 326944 - DNA, 1735 bp, Cannabis indica
ataatatctttaccaagatcaatatcggtcacagtctgatgtatactccatacatccgatactaacatactttgccaatattctagaaagaacataatacttatccaaggtgtaagtaagctttatcgctgactatcacattagtgtaaacccagtgcactgatgaatcatgggacattatcttttgaaacatataatcacaatcaccttccactgtgttgacatcactgtaattatgaataactatatgttctggacttaacagaaattgtacacattaaatcataaacatgtaaacataaatgacttctaatcttttattgataacaaataagattattgaaatgagttttatgtagggtgtaaaatcccaacagagatttgggattatttacttgacaatggtaaatctattggggaggacatggtaaaacctgtggttagttatatttttgttttggtgattaatttgtggtttaatttttctataaaattatactatttacttatttatttgatatatctgtattttaagttggcaaaattggactcattgttggctagtggtattacaactttgaagttattttcggaacaaaagtcccaaagcaaatgggtttattttttatttactaggttcagtgttaagacaattactatatctttacaaactaattgttatgattgtggaatatttgtcattaatgcagataaagtttttctttatgctttgattgttgtcgatactatctggcgggtccggagcgataagatacacaataataagctagacaatgtgaaacaatgtattgactctattcataactcttatgcagatcattatgcttccactttccttagtcctgcttcgagcttggtgaaaatcaccctcctccctaggattgactcaaactaaattgtggtgttaaagtaggtttggatagtatgtatactgcagtggtagcaagaaactatcatggcgagatggtttgggttcaaacgactcggttagagttttctgatgctttgtgtggggaagcgactgcttgttgcttggcgttggaagcactaaagtcaaatgttgcaagtttattattgtggagagtgattctaagtgattattaatactctcaatggaaaggaatcccgttgggagagtcgacagatttagggaaaatgttttgtctgtgttattttatttctgatataaagcagtatatataacatgtacaataagtctataaagagaaacatatcaattaataaagatacaatgaatccctaaactaattctctaaaaatatggtacaataaaagttgaattattatcatacaactatattgtagaataataataattaagaaagctgattttccaacactccccctcaagctggactaaaaatgttctccatagcaagcttgctagtcagaaaatcaaattgttttttacacaatccttttgtgaaaatatccgccaccttatcttcactagaaacataaggcatacacacttgaccgttgtaacgccctaaataattaggcacgcttcccaataaacttatgaaaccctaatcccctaattgggattactaaaaaaataagcgcggaaattaaactttattaataacggaatgaaaataacttgtaataatttaaaccttataatttaaaagttacaaaagttgggatcccaaaagtatttacaaaacactattacaagttcttttccttt

SEQ ID NO: 326945 - DNA, 2928 bp, Cannabis indica
aaaccataaggcacaagatctttaagatcattgctttttacaagatctgtatgtgtgtggagaatttcacggctggcactgtcttctttcaaaaatctaccaattgtatcattagcaagtgcagtatcacgtattgcccgagccgtcttagctgtctccttccttgagtggacaaatataagaacttgatgcttgcctgctacggccaacaccttctcataacagagatcattcatcaattgaaacctctgcagtggcttccttaccatgattccgatatactgttgcgaaagagggacaggcctatagctattgtcaaaatggaacagtcctttattgtgatcaacccttaagaacaatgcaacatccaaataatttggcagtgtagctgataagccaaccaaccggatatgttcttttgtagtttcaatctgcctaacagttctagctacaatactttcaagcacaggacctctattatcatgaagaaggtgaatttcatcaataatcagaagtttcacaagctgtgtgtacgtacgatcacctgacttccttgtaatgatgtcccacttctcaggagttgtgacaatgatctgagtttcttcaatctgctggcgagttagagcctggtcgccactaagctccctcaccgtcacaccataatgctgcaaacgattagacagattgccaacaacttcagcaacaagagctttcataggcgcaacgtatacaatcttgtaatcattgtggtttattgtgccatcttccttattcatgtgcaacccgagctgttgaagaatggtgagcactgcaacattagttttcctgccccagtgggagcacaaaagaaggttgtctggcttgaaaagagcagtctcatacaccttgctctgcaccctgttcaactgcgtcatccctgtgaaagccggttgtgcccactccggcatggaagatatctctataagcttctcctcaggatcaaatggctttggcttcaatgctggaacatgaatttcttcataccctttacctgcttgtctgaatgatttatcaggaaggatacatttatgatttgaagaaagtctaccatgttgaagagcaaggctatcaagatcaaggagctgcaattgacccttcaaccaaccactatctgaatctctgtcaactctcctactcctttcaggatctccaccactctcatccttcaatcttcgagcttcctctctaatactcttctccaagttcttttgcctctctttagcagtggccctggtggcatacaactgttcaagaattgcagccaaattaggacccaactgaaccatttcctcctcaattttcttcctctccttggtcctcagccctagccaaacgtgtacaccacacaatcttcagccgatttcgcagcagaaatttaatgagatcaaacttctgatactcaagttccagcaccagtttgttttcaacctccatatcatctttctcagctagaatcccaagcaccacttcagcaacgttctggcactgttgtggatcaatctgttgctcaaaagcttgagaaattttcctctgcagccaataagcatcaatatcctggacattaagagtcataccctcattcgcttcccgcatatcatcatcatcaaccccagcccccatttgcatacccccagattcattaggctctgccacatcatcatcatcctcatcatcttcctcttggaccatatcaagatcactctcttcatcatcatcctcattaccctcaatctcaacagcaacaccgatatctttatcaagagcatcatcaacaccattagtcacagtcgaatctgcagcatcactcccatcttgaaaatcagtaataagtctaccaatagaaaccaactgatcaaacacctgattaggaataggattcaataacttctcaatctctttcttcttttcagggtttttcaaaacatcattcttaagaagagccaaaatctcatccgctgcaccactaacaatactcaacggctgcccacccaactgttgctgaatcacactaagcatagcctcgtaagcagcacgagtctccttcgtcctaggctgataaaccccttcttccgtagtagtaagaacactctcctcctgaagccggcgtctcttagcctgacgaaccagaccaggctcagcaagagggtcacgctctttcttcttcttctccttagatttcttcaatttctcatccaactccggtggcctccctctgtaagccctatcaccgaagcttttaggatcgattttcccccaaagagtttcaggctctccagtgggctcgtgagtatcgcgaggccgggagtctgtggtgagcaccagactagagttggcccgatactcatactgcttgaatcgggcgtgagcctccgcaccaccgccgaggtgggccattatagaaacgcgctaccgattcgaagatcccagaaaccctaaaatgagaggggagaaaagagagggtttttagggtttttgagttttggggaagtaataatcagaaaatgataaaccttgaaaaccctaaatagaataaaaagaagagttacagtgaaaaacttacttgaggaagacgaagacgataaggagtgaagaagaaatatgaatgaaactttgagctgagatgagagatccttttgctctaaggtggtgtttggttcacatgaagagcattggaatggacttgctattccttaagaaagctcaatcaagtgtttagtttctttattagaacttgattccaaaggaattacaattcacttaaattaaggatttacttttccactataaaatcacttgaaagctaattccatacttacaaaagtctattttaccctatcaatcctcctccacttctcacttttttttagatgttaccatcatattactaat

SEQ ID NO: 326946 - DNA, 750 bp, Cannabis indica
tatattatatgaatttatatatatatacacattacttttgcttgcaatagaatagaaaaaagctaaaaagtaattagtaatatctagtaccatctaatgagttacattactattggtacagttaaatatcgagcttacggtgatattagagaaaatgataaaaaagtattagtggtgtcaagtactacctagtgagtcatatcgctactgatacaattaagtctcgtgtttgctatgatattagagaaatgctaaaaaatatttgtggtgtctagtaccactaaaagggtattgttattggtacacttaagtattgagaaaacttgtagtttttcttctgaatttccttggtgttaggctatttttagcctaaattttgggtcatttttaatagttattttttttctttgttattatttttggaatagaattatgtttttttttttttttttgtgtttttaggtcttcacatttagaatgtataaattaatcaaattttagaaaacaactagagaaaattttacaagaaaataaaatttaaaaataactattttttgcggtgatctcacgaaagaacttacaacactacttcacatatagaatagaatagaatattgaagcatatgtacatgaccgttggtaccatttttttaataaaaacgtaagatattatccattaatataatccaaattattatgagctgaattgtcttgattaattcattgaagattggagatgggcttgactat

SEQ ID NO: 326947 - DNA, 1074 bp, Cannabis indica
tcattccatatatatatatatatatatataaaagaatgcattggtgtacctaccctaaagcagcctatattttttgtatgtattaatattaaatttaataagtgttaatttgatttgcatcaagcaattcctactttttctttatttgttatcttgtacatgtacatgtatattgtgtgttgagtagagtagagtaatgaaaagaagttaattaattaattattaattaattaagttcatgaatatgatctaccccaatatcaattggatagtcaaccaaattactttcttaattttatttatcaacaattagctaaagcaatacatataagctagctttccatttatgatatatattttgttatgttgcaagtagtagtatatactagtagaagtagattgtaagaaaacaaaagaaattaattaataatacaagtatattattatgatttaatatatatttatatgttaattatggcaaagaagtcaaagtcaacacatataaattgtggaattagacctactactccatctcttcagccagcaaacactcttgccacctattccttgcccccactactatagtactattactattactttttttatattatatgaaattaataataattaattaactataaaaataaataaatagcttctagaagagaagaagagcaaaccccaagaccaacttactcccactcacacacactactaaattatgccagtactcttgtcaattcattaggagggcaaaagaggacactatcactacacatttttacaccaaaattacattacacacaaggccaaaaatttagtttagtaaatcctatcttaaaatcaatatgtgattgattatttttttttttagattatgtagtgagatattgtagtgggtgaaatctacaattacggaattcgggcatcagtaatctgtcaagaataaagagatagataaaaatttaattgggagcatttgtgggtgtcagccaaagagatttcaatgctcaagtcagtatgattatagtaaaaaataacaataacaggaaataaatgaaatgtaaatag

SEQ ID NO: 326948 - DNA, 611 bp, Cannabis indica
aaattactgttttgtagtgttattccaattccctgtcattttcttcataaacacctttcgattaaaggacttggcagtgtgtaatttagcaaccaaaaagaattgggtagggaggttttcagactcagtggtggctgttggtgtagtttcatggacggtctgaacagtgtttttcagtatctgtgaaattaagagctacaaataaagatgtggttaaatcatccatgagagtgtacttgtgtgtgcacaagaagagaaagtaagaacagcgagctattgtagtaatcgtacataaaaggaaggtttcctttttagtaaagtcaccaaatatcccaataaatgaatttctaagtagttgcatatcacatctcaccaaaataagaacacagaaacaaaaaacccaaaatacagaactaacttatgcgcatagaaaataacaacaaatgtaaacattttcataaaattattttaagattgtcaggaataattgaaatggtactcggtatttatttaatgttttaaggtttaacttctcctgaaaataataataataacaatgaagaagaaataaaaaaaaaaaaaaacaatggaagagaatataaaaaaaataa

SEQ ID NO: 326949 - DNA, 776 bp, Cannabis indica
ttcttcttcttctgaacttgaagaaaccgaagggggattcgtcttaagcttcttggctggagaagctgggttgtcatggcttcgtttcaagcgaagttccttctcgatagatgcttgctgggcacgagtgcgagtggaaggacctgttggagttgttgcagcaactcccttctctgttgcagcaggaggtgatacagcagcaggtggaggagatccttttgaagatgaagacgatgaggtccaacatttgtaaagacgcatggaatttctaaccacttgctttgggattctcttcggcttgggcttcacaggctaagattcacgctaaggaagcgatgaatctcctggattcgacgcagttgcagcagcatgcagtaagattggagcagtaggaggagcattcgagggtgcttgttcggattccaccattgttcttggatgccctagattcttagtcttagccatggatttttgagagagaaaaagagacaaagaacaaaaacacaagggaatagaaatcgggttggtcgtgagagtaaatgacaagaaaaattgggttaagtaaccatggaaggtgaaaaaaaatggaaaccaattttgaattttgaaaaataaccgccagcccatggacaaaagggaaaccgcccactcttttgccgaattatatttttcttccctttcttttaaaaataaaataaagggaaacataatacaaaaatagcccattaagaaaatctttcaagattaatgacaaaatacaataaataagatatcaa

SEQ ID NO: 326950 - DNA, 873 bp, Cannabis indica
ataaaatagattacattgaaatggagttttatttagggcataaaacccaacaattcccttggattttactactatgcagagtacaagggaggtcaaacatgccttgaggaggcggcacgagaaagaaaggaggattttgcgagtgcaagcgagcatgctttctactgtgaagagggtgaaacctctgaaggcctatatgccattgttccccttgggccaatggtggagatcaaggctttagaaaagcagatggcacctaaggtggggagagaaactgcattctttgtagccgaactttttgaccaggtggccagcagtgcatccatgttacccttggagacatgggcgacttgcagtagcactcatgtgttcacccttgcccacactgctaaaaaacaagtagtgggggtaaactttgacctttatgttctttttctcactgttgtgtactatttttatttccttaagttttgttcatgtgttaggcagccttgatggaaaagagggccgttaatgaagtaggcacccttgtcacagaactcgagtaggtaaaatccaaaaatcaacaactgcatgcggccaacaagggtctggtggatgaaaacaaagttctaaggagagatcttaaagacctaaataaggaaaaagagttcttggaggtcaactatggccagcaagctcttctcctacgaggcgttcacgtaatcaatgatcatcgaaaggaaaccacagagagattgcgcaggggaaactcgacttcagtcgtccagcagcactcagaggctcggggcttaagtagtcttttgaggcaatgaactccttggaccccttcttcactcattcttccttctttttgctttatctttgattttg

SEQ ID NO: 326951 - DNA, 1131 bp, Cannabis indica
aacataacacttatacaaagtgtaagtacacttcatcactgattatctcatcagtgtaaatctaatgcattgatgaaacagggactttgtctttcaaatcatataatcacaatcacattcattgtgttgacatcactgtaattgtaaatggctatatgttctaagcttaacagattttgtatatatattaaaccataaacatgaaaaaaacaagtaaacataaatgacttctaatcttttattgatacaaatcagattaaattgtaattagttttatttagggcataaaatcccaacactccttccatgtataaggaaatctctactagccaccttgccacgattttgatgtttcaagagtcaaactactcacgagtaagtgtagaatttttcggtgaattttgtgcgaatttttatattattttattgtaatttaatttgatctccttctttataaaaggaaagttctcctagctcattattgacacttttcattctctctacaaggtcagagcttctttctcctcacttcttatctctagaaatagtaagtgcagctagaattagtcattttttctctagttctctttgtaaggaaattctcttttccaataacaaaagctctaagtagatgtagctctattaccatcgcaatatagtgaactactatagattgtggtgttctctctttagttattattttttctatttgccgctatcgcttatcaaacaatacagaagacgatattttaaaccaaaatagacaatggcgatgtctttgtcctaataacatctttgtctccccatttaatttaaataataaattttaaaattattacaaaataaaaaattactattttactaattcaaaataaatatttttgaacattaatattattgttatctataaccctgatagtgttacaaggtagcgatctggggaccacaggtctataataccaagctacaatgaattagattatttattgaatcttatcaataaaataatcctacttattaattccatgattactccactataaatattaaaatgaactcttagtaattatataattatgtatattgagttcaattgtagtgtccattgatataatcagtattagtgattag

SEQ ID NO: 326952 - DNA, 1744 bp, Cannabis indica
cttgttgtgcttgcaagaaggatctgttgttgtagggggctagttgattggccttctttgaatgagctccagcctcagattggccaggccctagcctaccataccttgggagagggtatactcaaggtcagtcagccctgagtattgtgcttgtacatggtcggccagccctaagctgggcagggcctggccgcccacacttctctatttggttgatggagcttgtgtgttgacatggagtagatcacaccaattactagagtttgttgggtccaactgtttgaagtgattaattccacttctcaaattcttttttggatgttcccactcgctcccagtcatcttcagttgaaaattgatctttggggtgactcgctccccttggggagggagtgatcttctctggcccgccatggggactactggaggagtctggtcggccatagggactcttggtatttgttggccagccacaagatggacagagggggctattattgagcccgagatccctagccagcccctcatgtcgttgtcaagatctggcagttttcaccgtttggcctttgaggaaaggtctgtcatccctctgtcaaggagagatctgtcccagtccctgaggaactgggttgataagcatatcaacaaaccctccttgatctataaaaagacttccttaaagtagatctctgttgagacccttgcctcttttattggttctctggttgaactgccttattagatcgctgacctctctattatagcgatctaaatctaccttgtgagatcaaaggatgtgatcttggtcatccatcaatcttcaaagaatttgggctctgctgagcaaatacatcgcattaagcagcgcatggttcttgaattaggcctacatggcccacaactttcctgagtctggaaaactcaaggtctttgcctaagcccaggtgaggctcaccaattcctggcctcatctgtcctgcatggtactgggggtgaaacttgttgttgttcttgggggtacccctcaaggattcttccttcagacagaggcgccaatggtgggtctactcttagaggcatgggtctgccatttggatccactataatgcatgtgtcagtctggccactataaagtcctaccaggtaatcctcgctgcccatagacttacaggggaggtctggccgccaaaggtgtgcaggacctggccggacaaggtgtgtgggacctggcaagacaagggctgtaggatttggcagtataaggcctgtaggacctggcaggtcacaatagctctgtctagaggaggctagactcatagcgactcttgtggtgataggatttaccacatctgcagtgttcatcgaaattccggttatgaccggaacctgagtatctcgatctacaatctatggtctggagacccaaagatgtagatggtgtgacaggagttaatcttgtgttaatcatggcatttgatcaaatacgatatccacgctctcaataaaaacatcgaactattaatctcaaaaagtgatcatccgacaatggaattgtatgaatctgatgcttgccacgtgttacacatacaaagaatgaaaggcaataaacacaaagatttattatagaggttcggcccccttgtgataacgggtaatgacctactcccattttgttgtatttataccgagggagataatatccagatcactataggtgggatctgctatagcacccttaggatta

SEQ ID NO: 326953 - DNA, 991 bp, Cannabis indica
cattatatcttgaggaaattagatttgaaagattggttcggttgtacttctaggggagcgttataatgtaatgacgagtaactgggctgaaaacttcaacaacacaactaaggactcaagaggctttcctatcattgcttctattgaattcttgaggttaaaagtccaagagtggtttgacaacaaaaaaaaaaaaagctgacaagtggacgaagatactagcactggaaatggaggaggacttggcattgcagtttgagaaatctcagtatttaaacgttgacacatgtggaccttacacgttgaatgtccaccctagaggatcagttgagaccggtgtcgtaatggtcttgtaggaacaaacttgttatggattgttccaaatcataaagtttccttgccatcatgcatgtgctgcagcttagcaatgaaatgttggcatgtacacactattctcactattttacaccgtagaatattagaggagcacatatgaaggtaccattatgctagtttgtgatgagatgaataggaattgcctgatgacaaagaaaaggacagttaagagtgcctattgagaataaaccagtagggcgacccaaagaaacaaaaggttagaagaattaagataaacaaaattgcttgtaatggtgaaatgattgtcataaaatgaacctatagcaagcgcgatggtaaggggcacaatagaaagtcttgcaactaccgaattataaattcttgttgaatttcagaaaaatcgattgttatgtaatgtactattatgtattattattgaaatttggtgtttttaatatttttttttgtgtggaattgttgttcttcgaaaattatgttgtattttattctaggtttttttttcttttatgtccgatggtgttcgatataaggacgatagatggttcgatggtcagctcaacttatatttagggaagatgtcccgattgtgttcaatgtgttggaaattatttta

SEQ ID NO: 326954 - DNA, 2612 bp, Cannabis indica
tattcaatatcaataaagaaacaaaagtatttttcattcatttgtgtattatttggttcatattgtcaatcgcttatctatttgatttaaattcatccaaacccttttcacatttatgttcttgtttattgtgtcgtcagcacagtggaaagtaatcaagactatgtgattaaagatattcctagatttatcagaacacagggttttactgatatgacaatctacaacatagtttacttacatcttggataaatgctatgtccctcttgctcaattcccttttgatatgaaagggctttctgtatgggattgttccttgagttgccttgaaaatggccctaagtttctctgtcaggaaaggtgaagcatgtatacttctcctccttgatcttctaattttgtggcgtgggagaagtattaaactttccctttttgccactgtttctcccagggtcgtgttattgtgcttactcctagtgctcttgccactagaggtttgggcagagttgctggtacttgcgtgagtgttgggttttgtgtcttaaataaaacttatttaaatataattagatttactaatttataaaagatcagaaatcattttatgttgcatggttcacatgatttattttataatttacaatacacatttttaaaagtgatgtacgaatctacacctatttttttcgacactggacagacagtcttttttttatagtcgtgtacattatagttatttaagatatcctgcaaaatttaagaaaattgaacacgctaaaaataaagttcaaactttctattgcgtgactcttttaaatataataattgttgtaatttttgttaattaatatgatattaatttttttaatataataataagaaatatttgtaattagagtaaaaatactttttaacgctagattaaacgatagtgtaacaatgtcactaaatttgttgtatatttacatcaccatattaattgcttgtgggcagaggatcgaggctccaaagacttatggagtaaggcaaagaaaaagaatgcagtggaatagtgaattgtcaagtcaatgagtcaactatttagaaagctacctctactttcccctcatattgctatattgctttgcttcttcaagaagtggttctttttaatattttaagctgataatgtaccagccgtactgtactaataaaaagtaaattcgatggttctttgtgaaccgtagatgaaaaacattatcaattgatttaatcacttttcagaggagagaagggaatatataaagctaaagcaaatgtactactacataggaggggataaattaaatctaatgaaccagaacaattctctgtcttgcttataatatatataatttatttatatgaaaccaaaaaccaacaaagaaaagaagagatttgaagagaagacttagagcaattagaatggcttatgttccaccccataaacgagtttctaagaacaataatgattgtgaaggttcttcacggagtcccataccaaaaccagagttgcctccttttctcaccaactacaaatatcccaaacacaaatcatctgctgctagtactactgcccactaccaggacatgggtgcttatgcctatgaggatatccacagatggtttgctgctggtttggatgatgataatctctttccaccttcggttgatcttcaacctgtttctgtggaatccatcaatggagatattgtacagcgtctagctttattcaacaaaattgattcagctcaagaacgttagttttttgttttatttttaatggtgggatatttgaaatttcttaattatttgtcacttaattaccttccatgatgattttgcttcacaacgcagtaacaacgagctttacaagaaggtcatgggagtacatagcagaaaatgttctacaagacttgcatccttggtttgaagattttaagagaaaaatggaggcctctcatcagaaccatgaaaaaatgactccaactataatcactagaattggaaaagttctttttcggaggttagtgtcattgataaatatattagagaattgtgaaaggcacaacttgtcagaacaagtattttgaagagaactgtcaaagattgtgatttttgtcaaataacataaaaattgaactacttttatcaatttttttttaactctaattagaattttgctcacaaattttgatatgtattaaataatactttatgaatttgtaaggccattaagaattccttaaattattagtggatttaaaattttttcaattttaataataaaaaaaatctaacatgaaaattgaaggaacataattatcacatgtcaaagttcgagaaatatgatttgatacatatacagtagagaaatttacatctagagccttaaggtggcttttaaaattatcaatattattgttttatttgtaccatttttaatttaattaaatcagatttctcctttttttcttttgatttttttcaaaatccatcacgtcaatctcagtatcattacataataaataaaggtctagagtaagagtttatttttctctttattactaatatctcttctttctttttttttt

SEQ ID NO: 326955 - DNA, 810 bp, Cannabis indica
acaagataagaaatcgggtatgtatgcaaaagaatcttaccataaaagaaaaaataatttgtcaactaacttgtcaaaaaaagagtttacacaattaaacatataatgatatgaaacgattaacataattatacatacaaacacaaatatgactcataaaattcatagatttaatttattattattttttgataaaaatattagaaaaaatgtatttttacgagattctttaataaagtatttattttgttttacatgattaaaagaataaaaatacttatttatttttaattgcttatacttgttataatcgcgtcattttcaagttaagtatgttaacctgaaaatgaacctttaataaacaagtccacctagatttgacatgaaaattaaatgtgtcacccaaatctctttatttcatattatttttaaattatgaaatcgtgttttgtcaccagttgcaaattttaatatttggaaagtaagtaggcttagagcatctctaactacgctctttaaacacatcatttagctaaaatagaaagtgagatttaaaaaaaataagctctaattatacaaaaaaaaaaatggctctctataaaagaaaatgaatatggagctattgttaggctatttttagcctacgttttgagtcgctttttctagttgtttttcttctttattattatttttaggaatagaattatgcttgttttctttgatttcaggtttctacgcttggaatgtatagattggaaaattttcaaaaaacagtaatctataaaatagagaaaattttgaaagagaata

SEQ ID NO: 326956 - DNA, 877 bp, Cannabis indica
cttttttatagtttaataggcaaagcacattcatgccagtattttagtttgtattttaaaaaaatatatatgtatattttattctctctctttgaaacaattgaattattattatttaataattgttggaggtaggacaacaaaatccgtaggaattgaagtatttatcgtaagttttggaccgttttgataatagagaaaggaggccaatagcttttgaatattatgatttagaccccgacgacatctgtgcgaaattacatctttacccttcctcatatctctttaaatttgcaccctcgtagttttgttaattgtaattctgagctttcttttgtggttttctgttatatcagcaaaaagagagctagccccaacctcaactagccaaaaagaaaaaactaaaatctttcatttttttttgagaaaaaaaataacttttaattgttaattatttttatatatttttgtgacattagacgtcacatttaaaaaggcatgagaaaaataatatttttttaaaaaagtagaaaaataataattcgacatcaaattagctctgtaaaaacgtatgagcgataatatttcagaaaagtagtattgtttaataaaagttttttttttcttttttgaaagagaataaaagttaaattttgttttataaaaattatcctttttttagtttttctgagggtggtataaaatttatccctattaattgcatattattgtttatttaagagcctatttgttctgttctacttttatttatttgaactatttattttattaaatgataaattaaattttatattttttaaaataatacaaaatagtattataagttgattttttatcaaaataaacttaataataa

SEQ ID NO: 326957 - DNA, 823 bp, Cannabis indica
acttaaataaaagtctaataaaattttttattttttaattttgggcctcaaaaaagtgctgtgggccctagacacagacttagcacgtctatacctagaaccagccctatatattgtatattttaattagttaccatatatatatttataataataaaaataatatttatatataatattaactttaatataatagttaaattaaattacatataaaataaatattatttttgtccttgctttaaaaaaaaataattacactctctcttatttgaaatattttgagtgtatatataataattataattaattaatagaatttctatatattataaatacaggtggtatacatatagaatccaatttgtaataagtatttatttatttattatatgtgatgaaatcattgatgacgaatagtgaagaggtggccacatatatgcatatgtatatatcttttaataagaatatttattaagacatatccttttcatatataaatatatttatttatataaataatattcagtcgacataataaaaagtaagatgtgctttggtagcaaggaaaatggactagcacctacaactcacattacatccatgattattatatataaattatttaaaatttttgtccttaaactattaattatatatgagaaattttatttttatacatacatatacttaatattttatccttaaactaatacatattaccattgaaaatatatgaccactttatctaaaacccaaaaatacctctctcaaattttctatacttttttttagtgcaaaaacataaaagaaaataaaaaaa

SEQ ID NO: 326958 - DNA, 517 bp, Cannabis indica
tgatagttgttgctagctatcctttccaaaatctcaaaagcttcattgtaagactttaaaagaatagctccattggctgaagcgtccaacaccatcctagaggcagcattgagaccattgtaaaatgtctttagttggatacaatgaggaatcccatggcatggaaacttcctcaacaactacttgaatatttcccatgcttcaccagtggtctcatcttccaattgcgaaaaggacatgatctcacttcgaaactttgcatttcttgttggagaaaaatactttctcaagaacttttcagcgaagtcattccaagttttcactgaattagggagaagggtattgagccatggtctaactcgatccctcaaagaaaatgggaacaacttcaaccttaaagcctcttcactcactccttatagcttgaaagaatcactcacctccaaaaatgagcgaatatggaggtgaggatctttcgttggctgcccactaaattgaccaactgtttggagcattt

SEQ ID NO: 326959 - DNA, 1323 bp, Cannabis indica
attttaaaggagtattatactattgttagcgaatcccaaaaaatatatttaaaggtgctagacactaatactacccaatagtaatgaaattttcattaggattttttcaattttacactttaaattaattttttgcatatttacgaaagaaattccatataaaaatcactatatcaaacaatttaaatcgcaatcaaaattcgtataaaccaattggcaatgggaggagtagcccattcatcttatatatcacaatttatttccacacattagcaatgtgggactaattttaatagaaattactaaaaataactcaaacagtaaattttaaaataaaaaaaaaaaaaaatttaatcgaataattttccttttcattactattccgtatactcgattgagtctactccgtgcacagagaaaatcatcagagactattaattatatattcaaaattaaattaaacattacactatattaaccattattcaaaagagttaatttaaaaataaaataaaataaaacagattaatctcccctccatgaactcgcccagtcccacattaaaaaaatttacatccctacttggaagatcacaacaatcttaaaaaaaaaaaagcttagcagataacacaagcattaggatcttcctcaacacttctgacgaaatattgtggttgtggacgtgaaaccatttgagcattctgatgagcaatccatatcttttgaagctcagtcaattcatctttctttggttcttgttttttaggttcttcttttttggcttcttctttcttcttctctgctgctttgggtggtcccactgaaagaatttcagcattacagagcttcctcaacttgcttaccaaactcactggatctatgtcccctgttaccgtcaatttcatgtctttagaatccatggaaattgaatcaatccctgaaaaagaaatgaattttattagatcgatctcatcattatgttttgtgaaacaataaaagagataaaattgaaacttgtcagaattggaacaatagtagcatacctgagtggccagaaactgtcttcataatcttcttcttggttctgtcatcgtgaaaatccaatttcaataccacttgctgctataacaaaacattcccatattagtttgatttgatgaggaaagaaacaaatcataagtgaaattggtgaaagtataagtagtagtagtaactaaccttcatgatgagtatgtaaagttttgcgagatctgagcatgaagtagttgttaataatagaacacttaacagtgttactaagaaattatgagagagagagagaga

SEQ ID NO: 326960 - DNA, 642 bp, Cannabis indica
ataaaactcaaatttgcgttccaagcagtattgagcttaaaaaagaaatcttagatgatgttcatacaactccctattcgttatatctcgataccaccaagatgtacaaggatttgaaaccttattatcaatggtgcggtatgaagaaggatgtggtaaattatatattcagatgcttgacttgtcagcagatcaaggataaacaacagaggcctacagggttgttacaacctttgcgactccttgagtggaaatgggaggatattactatagacttcgtggttggtttacctagaaccactagtatgttcaattccatatgggttattgttgatcagttcactaaattagcacacttcctaccggtgaaaataacgtatacagtagatccatatgcagagttgtatgttaaagagataatatatttgcatggggcttcgactttcattattttggatagggatccaaggttcacctctatgttttgggatagtctccaaagggccatgggtacaaagttgaagtttagtacaactttctaccccaaaatagatggccaggtcgataattcagatattggaggatatgttgtgtaaagcccgcttagttaatttggaaattatcagttaattatgattaatt

SEQ ID NO: 326961 - DNA, 628 bp, Cannabis indica
tttgacaacagctaatgagatattttgcatctctggaatagtctttagcttacttcaatattttgaaataattgtttcaattagatcaaaccttacttattcatccgtactaatttttctttttcttcttttcgctaagaatatatagttttttttttaagctgaaataaagtgataactaattcaaattttcgaaggtaaaagagaaacagcttttaatgcaattaatgaaaaacataaataacattgtccacttatacagtggaatattagttagcacttgtttatttatttattctatatgaaggagaaaaaataaattcattatactttaattagaaagcattgtggacaccacaaacggaaaattacatttttcttttaggaataaacaacttcattaaataatattcttttatcgtttagaatttttctctaaatatgtaagagttcaatagggtattttcatactttcattataatttttttttaataataaaaaccaaaccaaatcaataaatttctcaaaccaaaccaaactattaagaacgatttagtttagttcaaaactacaatttaagtataatttataattattcatattttctaagtaattgtactattttta

SEQ ID NO: 326962 - DNA, 1421 bp, Cannabis indica
gtgatttattcaattcatgtttgattcttgtgcatgcttgaacactatttacattcttgatgcttaaaagtggtaaacaccagctcgctagattggctagatgaataataaatttaagtaaataatttataaagacacacacaacttctagtagttcactctccatgttgtgatggtaatggagctatgtctacttagatattttatttctcatgagaattacaagaaaattggctaagtgtgaaagctttgatttttatagagagaaactagagagagatgctctgaccttatgagtacttttttttaatgtaaagaatgagtttacggagctctcattttataggaaaggaggtccaattaaaataaaaataaaaatatccaaaaaatatggaaaaactcaatgtaggatattttgactgtagacgatgatctaattatgaaattgactctagaggtcggttgtcaatttctggagcttaagtcgcatttgtgggaccaactttaggtaagctgtaccttaaattcataactctcttgaaggtgaaatttggagtccataaattcagatttgcgattggactgtgagacatgacttcataaaaaactgaaatagcttcgaaatgaaagttgaatcacataatttggataaatattgagtgagttaagaccgttttacttaaggttgttctattcttagcgcccaagttaacatcccagtgcccaggttgacattgagcgcccaagttgacatgtgatgtcaacacatgtcaacctggacgctgagtgagtacaaaaatgcaccaaaaatgtattttttgatgcctgagtgatattttgacataacttagcctatttctatattatggtgaagcttgccaccaattctcagaaatgttgttattctatagaaacataaactcaaaactacctgatttctaagaaaatcaccttgttgaaaaagtaaaaatatgaagttgtgaatttaactcttttgacttcatatctcttagtcactatgaaaatctagacaaacggtcgagactgaataaggatcggataggtagaacccagcgtacctggccacatgtcaaccttgacactgggcgcctattttggagcttctaggatgtcatttttatatctccaagggtcttgaacgtgaggacaaggactctcaaaccattctttttgaaattttggagtgaatgctaagagcaaaatttacattagagtgatcaaaaccagcgcaccaggttgattgtcaacctgagcgctgggcccattactaggtcaacctaagtgatgggctcaatttcgatgcccttaggattttcattttctccgcatgtttacttatatcttttttatttctgatgatggaaaaaaatgcctagaacactttccagaaaactaattag

SEQ ID NO: 326963 - DNA, 784 bp, Cannabis indica
cacaaatgaagtcgacatgagtgaagtttatgggatcactgttggtctaaaagttcctctttttcttaaaccgataccctacacgccttaattaattaatcttaatctgaatgtgatttgaaattaaatatgttgattaatggcgggtagctattatctgtattaatgccttcttgttttttagttgaaagaatattattatttttctccaataattaatggaattattattattattgttgtcctgaatttttgttgatacacgtggcttcctagcgaacaactagttgtccagtggggtccagtcgagaggtaactagtgactaattatgttggtgctcaagaacatatagctctgggaggaggatatcctctcgtaatgtcgtaccggtcctatgaatcatttggatataatttgaatatgattgaatctccgggaagggtcgaaacctcccagatccccttatcgcatttggtcctaacttgtgcagcgcattcctcggagtagtactgttgattgtcccatccgtacaagtgaaaaaataagtctacaaccaaaattaaatatttttgggtatttcccccactccttttctgacacgcacctttccaagacgtagacagacaactcacaccctcaactgtcccatccactatagacaggtagggtcttgtctcaccaaactgttaactcaaacttttagatctccttgttttgatgattaacaaatatttgattattatgtgttactaatgatttattgattttgtagcaaatttaaaa

SEQ ID NO: 326964 - DNA, 2053 bp, Cannabis indica
atttctaagtgcaattatgtctcgaatggggtttgctgaaaagtgggttgatcttatcatgacttgtgtctcttctgtccaatacaagattgttcatggaggtcacagccttgggcctattactccctcaagagggatccgacaaggcgatcctttgtctacttatctcttcattatatgtgcagaggggctgtcttctttaatccaacaattcgaaacaagaagagttatccaaggatgtcgtgtggctcaaagagcacctgcgattactcatatgttttttgccgacgacagctatcttttctgccaagcgacaattggtgctgctgatggtgttcggtcactgctacagatgtttgaagttgcctccggccagaaggtaaattgctctaaatcttcaatatttttcagccccaatactgaattatcaacccgagctcaaatttgttcaatcttcaatatggctgaagctactgaaggaagtctctacctcggtctccccaatattattggtcgaaataaaaagattattcttggcttcatcaaaaataaagtcatatctcgtatcaatagttgggaagggaagtttctatctcgggctggtaaagagatactcatcaaaactgttctccaatctctacctacttatgcaatgagtgtctttctccttccgattggaacttgtaatgaaattgaaactctaatggctaatttctggtggaagacaaaatcaagtaaaggccgtggtattacttggatgacttgggatcagcttgcttcttctaaagaagatggtggcatgggatttaggcatttgcatgattttaatcttgctatgcttgcaaagcaaggttggaggctgctttgtaacccaaactctttggtaggacgagtgttcaaggcgaaatattttcctaattcagatttcctttcagctgatattgggaataatcctagttttgtttggcgaagcgtttggggtgcacaagatttggtccgttcaggtgcttctcgggttgttggtgacggagctaatactaaaattattggtcacccttggctgccccaaccaagtaacagatttgtaagttctactcatccatctctcaaacataacaattgttgcttcactctttcaagttggaatccgtagatgggatagtgaagttatcaacgatttgttcttgcctaatgaagctgatttgattttgggaatgcctctctatgatactgatacatctgattgttggtcttgggctgaaaaccgaaatggtttattcactgttcgcagtgcttatttactgctacagcagcagcgtgacagatctcacggctccaacaactctggtttttggaggaaattatggcacctgaaaatccctccgaaggtcatcaattttctatggcgtgctatcaatggttgcctccctacttgccttaatcttgttggcaaacatgttccgatttctgttaaatgcccagtgtgtaagaatcatccagaatccaccactcacgcactcttgttttgtgattttgctaaagcctgctggaatgtattcggttctcctgtgaatgctaacaactcagcatcttttggtgcttgggtggatgcgctactacatattggtgatgctgatatgatatgtcgtgctactgttctctgttgggcagtatggaaagctcgcaatcaaaccgtgtgggataaagaattgctgccgtgaatgatgttataatttctgcttcaactactttgatcattggaaaaaggctcaggataaaacaacccttttatcattattagttgagaataatgaagaaggggctgagtattggataaaacccgaagaaaatcacatcaaaataaatgttgatgcagctctttttcatcaagaaggctcctatggctatgcgttggttgcacgagatagttcagcgaatctcattgaagctaaaacatgttttcaaggaggttattacactgctgagattgttgaggcattggggatcaaggaagcactgagctggataaagagagagaattggtctaatgtgc

SEQ ID NO: 326965 - DNA, 788 bp, Cannabis indica
aattaaaatataagggggtttcgccgcaaattgctctaaaagtaaaaataaatattaaagggcactaatggtgtctggtaccaccttatgtgtcaatatagctattggcttaactaagtatcaagtatataataacttttagagagtattgttaaccaatcgaaacgcactcgtctaaaaggcactactggtgcctaatagcaatgctctaaagaaaaatgctaaaaaatatctatataatatttttttacttgtcaatatagctattgatataattaagtatcgattcttatataatttaatgtaataatttttagagagtatagctaattaattataaggtgacacatctaaaaggtactagacagtacccaatagtaatactctatgctaaatatggtcttattcattttattatttattattttttttttgaggaaacttatttatcatttatttttataattcacaattggtgaaaattaatttcatattatatggtaaaatttctttcaattatataattttatttatttttattggtttctttacaaagagaaggtctcgagttcgaattttctctctttcgatataaaaaaaatattttcttttatatagagtgtaactacgagaagtgcatatttaattatgaataagactggccgacccaagtgatttgagagtttgagtaaaaaattaaaattggacattttattttaaaaaatatatattaatcaatacttcataaattttgttttcaaaaattaaaaaaaaatacttcataaatt

SEQ ID NO: 326966 - DNA, 2680 bp, Cannabis indica
cgcacttacaaaagtatgtcaaggccgactagaaccaaagggtcatccaagcaggcaataaccaaaaccagttgatgcctccactattggacgggaatttacatgtcatttttgggggacctacatcttgttagagactcaggcaaagctcaagaaaagtatgcccaagccttacagaatgaacaaaatgaaatagtcttggccgtggatgagagaaaaccaaaaataccacgagtaggggaaccaatagtaaccttcactaaagtcgatgccactcacgtccatttcctgcacaatgaccccttagtcgtagaagtgcaaattgcaaataagacagtggcatagactatgatagatgatggagcttcctcaaacatcctgtttaaaacaacttatgagaaaattggactccagctcaaagatttgatcccctgcacctagctcatgtatggttttcgtggccaggacattacacctctgggacaaacctgcctactcctcactgttggacaagctctgaggagcataactgtgattgaacaattcctgataattgatgttccatcagctttaatgtcatgttaggctgaccggccctatatgacttaaaagttgttacatcagtttttcacctatgtgtcaagttcccaacaaagaatgaggtggggtgtctcaggggaaaccaaagaattgcgtggcaatgctacaatgttgctctaactaaggtcaagaaggaaaataccttcggctagtgtttgggcaagggaaagagcattttccaataggaagtcacccaaggtagggacgaagacatgcatccccgacttggggaatcaaagacaaatgtaaggccagtggaagaagtggaaattgacccaaatatctcgaccaggaaacttaaaattaataagggtttgttgctcaaagtaaaattagctttgataaaaattctaagaggaaacctggatgttttttcctggtaacatgaggatatggtcggtattgaccctaccgtaatgtctcacaccctaaacattgacccgaactttcatctcgtctagcaaaagagaagagtactggacaaagaacaggggcaggccctaaaataagaggtagaaagactgcgtgaaattaagttcatcattgaagccttctactcgacatgggtagctaaccctgtactagtacccaagctgatcaaaaaatggcgagtatgtattgatttcaccgacctcaacaaggcgtgccccaaggactgttttccacttctaagaattgaccagcttgtggatgcaacagtcgggcatgaaatcctaagcttcatggatgcctattcggggtacaataaaataagaatgcatccaccagaccaagaacatacaagtttccaaacatatatgggtttgtattgttacaaggttatgccattcagtctgaagaatgatggagctacctaccagagaatggtaataaaatgtttaaagaccagatcgaacaaaatatggaggaatatgcggatgatatgctcgtcaaatctaggaatgctgggacgcacatggaggatctggatgaatgcttcaaaattctcaaaaaatacaacatgaaactcaatcctttaaagtgttccttcggggccagcttgggtaagtttctgagttttattgtcaattcttagggaatagaggctaacccagagaaaatactagtcctcctgggtatgaaattgtcaacaaagacaaaggaagtccaaagattaacttgttggatagtcgcactgaacaaattcatttcaaaatcatcagaaaagtgtgttcctttcttcaacatcctctgaggtaataagaagtttgaatggacagaggaatgcaagaacggtttccaagaattaacaagataacttgcaaagcctctcgtactcttaaaacccattgacggagaagaattaggattatacttggttgtcactaattatgttataagtgtcatgctaatcagagaagaaaacaatgtccaacatctattatactatatcagcaaaagactcctggaagctgaaggatgacatcctttaatagaaaagcgcactttctgtctgatcttagcaacaaggaagttaaggccctatttccaagctcaccctgttcgggtatacaccgacaaactattacgccaagtattgcaaaagcctgatgcctgtaggtggatacttaaatgggcaatagagttgggacagtacaaaataatcttttaaccccatacaacagtcaagggacaagccttggcaaactttgtgcttgagtgcataggaaaagacgaaagcaacatatgggacaacccgggaccagtacaagaatccctaccagaaaataacaaagagtgacctacctggaaattgcatgtagatggagcagccacagaccagctttctggtgcaggaatttcccttgtcacacatggggggcaacatctgcacggggtaatcaaatttgggctgaagacctccaacaacgaagtagaatatgaagctctcatagctacattaaagcttgctcgtgaggtgcatgccgaatacattgcggtctataatgatttgcagttggtagtgaatcgtgtttcaagagagtatgaggcccagggtgaaaaaatgatggcttatctaagcaagatacaagacatgctc

SEQ ID NO: 326967 - DNA, 514 bp, Cannabis indica
gaaaattcggttacggtctagtcggttacggtttatcggtttttatgaatacccctacctagaaacgtgatacaagtccgaaaaaaaagctcaatgccaagagctgacttggagatctcactctaaggagccaattaagtcttgactgaattaactactcagttgtttgaagccaccgcctttaagattcatatctcgatctataaatatagtcatcctcttcatttgatacaagacaaaaacaccaaatacagactagtgagcaagttctttaagagagagttttgattgagaggtagagagcgatatagagaagagaaaaggattagatcttgggttttgttaaggagatgcttctgtagatgaagaagcttctcagggaagagcgttagaaagaaaagagaatcaaaacagagaatcgctcgcaaatgtattgtacatgtattcttgttcaactaataaagaaatttaggtggtattctagaactggagtagagttctagatcaatctatc

SEQ ID NO: 326968 - DNA, 1575 bp, Cannabis indica
gaatccaatgtgttgtttttttttttttctaaaactcaaacatatacatcgtgttctttatgactcaatgagtcagaaatcacaataaaggccaaattgaatcttctcaagtaagaagtcacacattatacattcgaaaactatcatgaggatcaatataccaaaaagattacaaactatcatgagaatcaaaaagttactaaaagcttaaaaagcttgaaacttattaatggcaggtacaaagaagaaatatcaaaggagataagatgagaagtatatagagaaagaagatcagaagatctaaagatctaaaagcacaccatgcaaaaagccaacacttggctagacaagactactcgacagagactactacaaactagacgaaagctagaaagtccctatccgaccagatgttcaaacaaggaatttgggggaaaatgttatcctaaatttttttcacctgacgtggcatgtccatgtaagcgaagatagagtacatgtggaacacaaccttactaatatcaagacaagatctccatataaggtatggcaaaaccgtcaagcagtaagcaaaaggagtgaagcaagtcgtcaaggatctgtactagcatgtttggccagcaagggaggtctacaggacggccaggaagagcttatatggccgaccaggtcctgggcacaagttggccaaccaaaaggtgactttcagaccaagggagcttccattcgaccaagggaacttgagctctacaaggaaaatatgtacaaagctggcctccactttccaaaggctggcctccacatccaaaggctggcctcctcttggtagggctatcaggaacatgatctgtaggattctcgtaggcacgtgacctgccagatcttggtaggagcatggctggcaagacctcaacctgtacacatagcatggtcggccagatctcatcctgcaggtgtatggccgccagcttctccctggcaggacattgatgtgcaaccttcacccgtggacaaccctagaaacctaagtccctctaactctcatttaagcctctaaaaccttagtcttctcctctctctctctctcttctacacacccaaagggccctctctcttcctctctctcacacgcctccaaggccatatcacactctcattagagatctgcctattgattcatactttgtataccttaaaaaaagctatatcagatcctacatatagtgatctgaatagtattatctctcggtatcaatacaactaaaaagggagtaggaaaataaaacaataggggccaaaactggaataaaattcttgtcttatttattttattgttcttattgtgtaacatgtggcaaacatcagataaatccaatcctgcttttggttggtcattttttaaggtcaacaattctcatggagaagtaattcggcagagtttttaaaaggatagtttgatcaagtattcgtacctcatttgaatgttgttgtcttttatttataggcgagaaatgatgttgggttttgtgccctaaataaaacctatttcaacataatcagatttactagttaata

SEQ ID NO: 326969 - DNA, 1282 bp, Cannabis indica
atacatatacttgcattttaatttagatggcctttgttagaggcggaggcaagaaggcatgcggggtcatttacttttgctcatttttttacaaaataaattttatgtataaatttttaagtgttttatattttgatccataaaaataatttttttatatttatatctttacatatttttatttttaaccacataaatatatttctaatttgcatcccacataaaatttatatttttagcttttattcttttataatttttattttatttccacaaaatttatatttttccaataaaatttaagtaatactctttataagaaagaaatttttttttgccccactagaatattcggctggttctgccagtatttgctagtacttttattttttaatttttttggtgactaaaataaaagtaagtgttctacaactactttgttttttttaattgttttaaaaaaattatgttccaactacttttatttaattttaaaaacaaaaataaaaaatacatttataattatttttttacgggttcgggttcggggccgatggtcgggtctgagtttgggttcaaggaccaaggtctgggtttaggtttgggtccaggatcctggttcgggttcgggactaatgctgagttttggtctgggtttggggctaggatcgagtttgggtccgaatccgagtttgggtgttagggacgggtttgagttcgagttcgaggcccatggccatggtttgaatttgagttggagccaaggttctggttcgggctcagggccaaagtcaagtttaggttcgaatttggggccaagatctagtttgggtctgggccgaggttcggtcccaaaatattaatgattgaaaatgcaaatagattataattaaaaaaatgttaaaataaattttgaaatgattttttgtttttaaatttttaattctccattttaaaatagttacactaatttacactacttagcatgtaattaacacagttactttttcttgatatatatgactgtagatttcaaataatttgaaatctaaaatttattttttaaaactaaaaaaaataaatgttcctaaatagcaaattattaataaataatagagtaatttgcggtattaatatttaaatttaactctcagtacaaataaatatctaagtttaattttttgcgataataatacttaagttatatttttggaactttataagtacctagttattaaatgttaagtcattatatcaaagtgtcattttcttattggtatat

SEQ ID NO: 326970 - DNA, 739 bp, Cannabis indica
tacaattgaagtacattataggtctatattgtataaagttgaatagcctctttccaattggcttgtgtgattttatttatttatttgttttaagaaatatgaccgtacacattgtaaaggttgattctttttgaagaatgcaagccattactaataaagatttcttgaagattaaaccggttttgaatcacttagcacttgaattttatatttttggctgatttgattagttatttttgagtgtcaggcttgtgttttaacatgtgatctacaagtttttgccttttaacttggtctgtattgagattctcattttagtgtgaactttaaaatctttaaaagtgcaacttttattctaaaacactttattttgtggcatatcataactaaagttttgctatatgagttgttgagtattgactgcaatttcatcggctttggtattaaggtggttatagccattagtgcaattaaagttttgtaataattgttatcattctttgactttaatttgattggttttggtgatatgatatgatgatgagagccatgactacagagctcttggatatacaacctagtgaaactcaagtttaaatgtaagtgaaagttaaaagatctctctttcaattatttgtcattattttccttactaatttctcatttttaagtcatttgatcttgacatcctatttctttttgcctagttgagttgaagaaacaaagctctgtgcaatca

SEQ ID NO: 326971 - DNA, 895 bp, Cannabis indica
atataattatgagtctgcttgaaacacacttatacaatttttcgcacaaatatatataccaaaattttaaccatagatatagatttaaattgggatcgcatgcttcttaattttattaattacatattgttgtgtgtgtgtatatattaagtgtgttacattcattattctaaaattatatatgatggagggtagtgtaattagagttaacatgcgtttaatttctttacgagctatatatccaagataattttttgtgggccagtaagagtaagtatgtagtatgtatttatcacaaatatatattatgctttgttttattctgatcaatgtcatcaatttcttttctaatttattttttctttctaaactgcaaatccaattttgttattagggaactagctaaaggaatatcaaatcttcagggagattaattagtatatgcttcttgtatatatatatatatatatatgaattcctttgccttttgaatttaacccctcatcagttatatatatatatatatatatataaatatacggtatgaagacttgtttggctctctccatatgtatatatgagaatattactttcattatcttgattaatgatcaataatccatgtttaattctcatatgtgtgcattattaggtttatagagattgagcattattatttggaaataagaattgtataagttattaattcaataaaaaaaatgatgtttttccatactatttattcatcagagctagctaatactctgagcttcgatgaccacttttcatgtctatatatgaagataaaagttaatggtctatatattgatcaatcctagctaatcaatttctccatagtctttcaatcttgtatcatcatttcatttttcttttt

SEQ ID NO: 326972 - DNA, 783 bp, Cannabis indica
tgttaggaagcatgttagtagcctgatggtagaataggcgcatgtttttaatttccaaataagcggccattagtaagtttttacttgaccacgatctaaccacactagctcttggttacacatgatgttctaaatagtatggacgccaagtgaaacaccaggagctagggtatttctgttggatctagtggtggtcagggagctcagatctcccttaatatttgtggctgaggtagaggtcctagaggcaaggcacatggccggggtgatgctaacccgccacaagctgcccaggattaggaaaataggtttgcaaaaatccaagccaggattcatgaacaagatgaagagattctgcggttgaaacagcagggtgctcctgcaatccctactccagaaataccaatagctcctgcccctgttgtgcaggtggaacaagtggctgcagttaaccgaatggaacccctgtatgaaaggttccgtaagcaggcacctccagtgtttctgggaggtcccgatgtcatgaaagccgagcaatggctaactatgattaccagaatcttaaaccttatgggcatcactggcaatgatagagtggcctgtgccacattccaatttcaagaagacgttctggtatggtgggacacagtgtccctaactcaggatgtaattacgatgatttgggaaaagtttcaggagctatccaatctaagtattataatgaggcagttagaagtgaaaaaagaaaagaattcacccagttgactgttggaaattatttta

SEQ ID NO: 326973 - DNA, 651 bp, Cannabis indica
cctgaacgaaaattcgtattatggatgccttaagtcacatttatgtaaacgggtaaataaaataccaaaaaccttatccaggtaatccaaactcactactaagggttctgctattggtaattcttataacaataccctatttatcgaggaaataactaactaaggctcgaatcgacaaattgaattgttcgggaaacttgcccctgatccggttaaactggttaaccggtttgcaccaagttacccaaacaaattctaaaccttgcccaattcgtatccaaacttccccaatccttcaagatctcctaaaatagcatccaacaataaaattcaagcactaaaagcatcatacaaccacagaacctaattccacaatgaatgagtcaagtatgagttctcaagttcaaacttgctcaaaacactcacaaaccaacaataccagcaacaattaatcaaaatcaacttaaaataacctctagaaatacactagagaaaaacctaacctacacagccacaactccttaaaattgcatgacaaaacccaatttaatgcttaaacaacacaaaggtagtgttttagggtttacttttggcttgaactacttccaatcttgttgaaaccttgctcaattccaaaaaaaaaaaaactta

SEQ ID NO: 326974 - DNA, 749 bp, Cannabis indica
gagagagagagagaataacctctggcaatgctaccaccaatcaaggaacccgtcacttgcagagatgatcgaagaagacagtcacaacaatggctggtggcagattaatcttcagtttgctagggttagggtttgtggggcttcgcctatggctggaggagaaaagagataatttattgatatccaaagtagtggaatggaattataattccaccaaatgaaaataatcaaacaaaagaattaggcccttatataaccagtactgtgtgaatttattccatttccataaaaaaaaaaataattaaaatacaaacgcgtaccatagaaatacaaagtaagactagttagttgactccttgacttatatatcaacatccattcacttcaaaaaaaaaaaaatgtatatattaaattgctaaaaatatatatatatatataattcaatatattttttattattagtatttcatgatcatagaaattagtaatgttgttacgggtgtttattgcatcgcattcaattttttttaggtttatttagatccgatctaattatatgttagattttactatctgatcgatctaattaattttagtcattcgatccattagatgttgaattagattggtccttatctgttagatgtatttcatatatatttattggtttaatttgtgtttatttaatattttagacctagtattttttttaatcggatcggatccatctaatattttagatccagtat

SEQ ID NO: 326975 - DNA, 570 bp, Cannabis indica
ttacaaataaattaatagttgagaagattttaccgcaaattactcatacatttttaacaactatcaatatatgatgtgacatatacatcaatatggaatatcaaaaccttatgggctggcctcaccaaatcagtccaaatgttattatattgtttatgtttactgtattagtgaataagtacactagcattataaatataagaaaagttcttcatgtaaagagttggaatatcaataattgagaacttagacaaattttaaggctcataaacttgataatacacttgtataaatacttttttgtttgtttgtaacttaacattattattcttttgtttgtttactgactatattatattgaatgtaaataccttttttatattttttttttaaaaaaaaacctttttttcttctataaattgtgatgaagtgatcgtgtcaattagattcttaacttgcatttgaagaaaaatatgtgatgaagtctataactcaattgaaaagtgtattgagccctaaactagggctaggaggcttgcttaaagggtgtgatgatatatatatatatat

SEQ ID NO: 326976 - DNA, 814 bp, Cannabis indica
cttataattctgaataactaaaccaaatgatgaaatcaaaggagttgaagtaagactgcaaacacaactaagagaaaattcaacctcgtcgcttgatccaactaagtacctcatttactcttattgtctctgctcgccacctccgtggatcccaaccacatgtgtttttaagaccgtctccaatggcactttaaaaatctatttataatgtagttttttttcagaaaaatgcatcctagaaaatgtctgaaaaaacctgctacggaactaccgaaaagggtgaaaaaacctataagtataaatataatttcaactgtaatcagacaattggaaatcagacaatgacagagcacatctgtaactagaaaagctttattttgttttgttctcattcttcagttccttcttctcgcatccaaggggaacttctcatagttagaatctttttgcggtgggctgttcatataaactgaaaaatcgcagtttaaattcggaccacgacaatccaaatcactgtaaaccgtaaccgggaaaaatatttttggtggtttggtcaatccggaccatttacgacataatggttcggttgcggttagtaataaatagttaatggttgaaccggaccggaccgcaccatttataataaataattaatttatatatttgttatatatgactatatgtataattttgaacttttttgtgtgtcaagttttttattgcatgaattttgaatttttatgttatgtttgacttttgagaatattttttatcgttatttatatgttatagatctattacttatcatgttaaa

SEQ ID NO: 326977 - DNA, 755 bp, Cannabis indica
tagttacttaatttttttagtgatggtccctagaaaaaaaattatttttaggaccgtcgcgaattctgatatttgtagtagtgatgggacgataatttaatatattgtttgttatctctaagacatctccctagaaggactttgtcagctgcttgtaactaatcatagacttaatcattttatcaatatgcgattctgaaatttagaggatgtaaatttgatttcaattcaaagtttattgaaatgatctttttttttttaatgattgtatagttaaatcatgagaattagtagataattaaggagttaattattactttatgattacgtgctttttagcagaaattagggttaatatgtcagaaataggctttaaaaaatactttcttagttagggatatatttaaattctagtgtattttatatgttatatatatgaattttacagtagtggaatgcgataatttggtcattagagtcacttagatagggtctagtatcttagatttagcaggacaaaataattagatatttggtatgtcaagttttagcgtgattatagttttgaactattttatccttatgttaatagattacttcttggtgaagtaaaaggaaaaatagactttagccctatgatttacattaacaaattagtgaaagtatggttaatatatatatatatatatatatatactaggtgattgttacgtgccaagccacgtagtgttagttttatttaatattttagtttt

SEQ ID NO: 326978 - DNA, 724 bp, Cannabis indica
tcaacattacataatggacagttaaatccacatgaacattgtttagtgtgagtttgaccttttgtggaagacatcccaacatcgcacgccacaccaaatgatgcaccttagctgggatatgcatctgccagcaagtttctgcaccagacacgaccacgccccactttgatgctgcagcattttatacgcactactaaccgaatacacaccagattttttcctcagaccaaaaccaagtatccgtagtagcagagtcactgagttggattgataaaatacgcctgctttcttcctaaataaacatatcatacagtagctcctcatcccaagacttttcttcaattttcatcaagctatccaccgttctgccagctagatttggatgataggttgtaataaaattacatccagtcctaggtaaccacggctcatccagaatcatagtggatttcccatccccaatagctttcctagcccccatcctaataaagcttttagcctcccataagcttctccaaataaaactaggattcggacccaactcagcactaaagaagctcccattcgagtaatatcttgctttatagatctttgccaccagggaattatcattagtgactagcctccacccttgttttcccaagaaagccatattatagtcccttaagttacgaaaaccaagccccccaacatccttatgccgactcaacctttgccaactcat

SEQ ID NO: 326979 - DNA, 883 bp, Cannabis indica
aaagttttaatactaaaaaggttatcgaacctacaaggattgcttattaaattttactaattagaataaaataaaaaaagaaaatagtgtagctgttgtgaatcgaaccaaggtgagcgcaaccaaaaagtagcaactcaagcaacccattgccaccacaccaaagctatactatgatattatgttagtattattaaacttttatattcaaaaatgaaatgatttattttttcatggggccctaggtgtgtgcctaccccacctacccttaaaattggccatgctctggattcaaatatacggatatgaatgcctttgccattgaataactttttttcagccacatttaccattgaagaagtgcattactacaaagatgcagtttttaccttctcatatatgaatgagttggtttgttgaggttgttctataatactttgtaagagttgttcttgcagttatgccaccccgttgccaccacaccaaaactatatgatattatattaatattattgaattttcatataaaaaaaatgaaataatttattttttggggggccctaagcgcgtgcctaccctgcttacccttaaaaccgggcctactctacattcaaatctacggatatgtctgcctttattttttctcagccacatttaccattgagtggattactacaaagatacagattttacgttctcatatgaatgagttggtttgttaaggttgttctataaaactctacaagggttgttttcgcagtcatgcccaaatctatgtcaagactaagagatatggaagatgtaggtgttgagattttatgccctaactaaaacccattacaatctaatctgatttgttatcaataaaagattagaagtcatt

SEQ ID NO: 326980 - DNA, 601 bp, Cannabis indica
attttgatctaaacaaaagtcaaatcgggaagtagcagttgaagctataaaatcacacacctggtaattcttctggctcgaatttgtagacatcagtctcgccaataacattcaacctcaatttcttaccacaaatttttcttttcagataataaagcaccaattcctcgtcggtcggataaaacctaaacccaggtggacaatcatgatcgtcggaaaacaccatcgctcaaaacccaaaagaaaaatcacaatccctttgttaggttcgtgatcaaagggaaatttgaaagaaataatggaggtgaaagagaagaagaagaagaagtacgtgatttagagagagaaaggggtttttctgaaaacagaggagagagagagagagaagagtgtctgtatcgtaactactgaaattctgttatttatattcgaccgcctttctcaatagtcaacggtcaacggcgagcccgtgcttttactgtattggatcattttcacccgttttttcttacagtattgctattgggtatcgggtggtggtctcgagcaactttacgacgtgtcactttgtaattagttagcaatactctttaaaaattat

SEQ ID NO: 326981 - DNA, 2026 bp, Cannabis indica
attatatttttcaattatttttattatataaattatttttaatatatataaatataattggattggatcggtttttaattggattttgagattgacatccaataaccgatccaatccaattagaatctaacttttaacatccaatccaatccaattgtaattggatatccaactttttgtaattggattggattggatcggttcagttcaattggattggattggatgatgcccacccctaattccaagttccaaaacccatgaagtacgatcgagccaagagagatgccttaagatattatcaataccataaggacattgaacacacaaccaatgagtgccgaaacctcaaagatgaaaatgagactctagtccttaatgggacacttacccattgcacaacacaattttcaaggaagacatgtcaactaactaaaactccaccaatggagtgagaaggcatttaacatttcttaagtttttataccttgttttttttgcaaagacaccttttgtgtaatttttagttattagactaccacctttattttctagaatgtaagtagctaaactcacatttataagagtgctacaataactagatcttttactctatgccaaacccaccaaagagtaaaataggaaaaatacttaacctatgaacacttggggcaaaaaagtgtagatataatagcgctcgcaacaaaaaatatatatctcaaagtcattattgatacatcactttaagtgcgtggaatttcaaagttttttgctatgaatatttttttttaatatttcacctcggacaaggggaaaagttggtaacaagtgagggcgctccaaggagccataactcataaaattttgcttaataaagacatcttgaatgacctacagtttagactttgacaagtgggtcgtgtgctaaaatcgagtacccaaagagttaaggcccataccgacaacttgctcgaactagaaaaaatgcaagccaccattggcaataattaatgttatctttaaaatcccatgttacaaagataataagcatcagaatgaaataagcgcaataaaatattaaacttaagttccaaagttgccaagatatgaaataaactaagttatatatgcttaaaaagttttaaagatgtgaaaaaaagcttgttagttttaactagcgagcactccacaccaagtggacgcatacaaatccacacatgtgggtcccaatgtcaatgcacaattaaaagtgcataagaagaataagagaatttaactctgttcgtggtagaccttacttaccaaccaacttgagcaagagatttaactccactcaaggatgagtttgagaaaaggatataactctactcaacgctcaaaacttaagcaagagatttcaaaactccataaaagtttcaaatttaaaaaagagatataactttactctaagttaaaaaacttaagcaaaaagttttaaaccttgcagaagtctaaaaatcgagcaagaaatataactctacttgactaccacatgagatatgagatataacttggctcacattctaaaaagaagccacgtgctttaagaactccacacatacaagtacaaggacattggtcgtgccatgcacacctattcacaataattactgacattagtcgcgcccatgcacacatctcttgaagagaagtaacattcatgcactctacaaagaagtatttttttttttttggcgcaagccttcagaaaagtgcaaaagcattacttgaaggcttacaagcaaataattttggaggaaaatataatacccaatttttacaaaaaaataaaatagcttctcttgcacaagagcccacatgccaagagtaccttgaagacactaaagtcaaccttgcaattctgaccaagacttataaatgtaaaatgagttaagacatccttcttgagggcctcatggcacttctagcggactcaagaacattaaccaactatttggtgttgggactctcacacccaagtgtgccc

SEQ ID NO: 326982 - DNA, 2083 bp, Cannabis indica
ggcacaaagcccaacaagaagatactagctttctaaactctccttattcgcttgcaaaagaacaaggcatgaggattagattcctcctctagtacaaagctcacaaacaggggagtgggtaatctttctaatgaaaagttattgtttagtggggagagttgatgaggaggctctataggtgaagtgcttcaattagacggggtaccaagatgccaaaagaatttccatcagggggaaagggaagacgaggaagggatatctggtggtgagtggtgggagaaccttaatagatatccaattttgatagagtaggttcctgacttcgtaaacttccatatgggtttgtcctccatagggtgaagagggagagggatagaaaggacatcagcaaccatatggggggagtgagtggtttaggcgaggtatatcccaagtcatgtcatcagatatatagaaagcaacaatgttgggaacatgggcctgagggtgaatgttcttgtaggaaggtatccagtaatcatgaattggagaggtattcttactgttgccaatcttcatgatgagagctttgtgcagtaattctcttccccattaaaagctacgccagacaaaagatggagagtggcccaggctgcaattcaagaaagaagatcatgggtggtatctggcagcaaagattttttccacaagaaagtttggatgttgaaggattcgccaagcttgcttagcaagcataacttgattaaagtgaacaagtgaacgaaaacccagaccgtcgtttctcttggattgacagagcttttgccatttttgctagtgagttgaggggttattattggaattaaacccccaccaaaaatttgccatgatagattccaaggagtggcatgtggcataagggagacgaaaacaagccatgttgtaagtggggatggcttggataacaaatttaagcaaaatttccttgtcgcctttcgaaaaattcttgtgcttccacgcattgagatgcttatagattttgtctttgaggtagtggaaggcatgtttttttgagcagccaatatgctaggggagacctagatatttctcaaaagtatctttcataaggatacccatgtaatcagagataagatgtttatccctgaggttcgtgttgggagagaaattaagtgacaatttttggagattaacttgttggcatgtggctttttcgtagtaatgaaggacatctttgattgcattgcaagaagtgatggtagtgtgggcaaaaaggatactatcatcagcaaagaaaagatgcgaggttgtaggggaagtcctggaaactctctatccactgaggatctaagatctaccatggtaacgaagtagagatgagaaaccttcaaagcacaataaaaagatataaggcaagagagggtcgccctgccggattcctcttgaaggtgtgacttttccaacaatttgaccattcacattaaattgaaaggtgaccgaggtgagacaatcgagaaacaggttggtgaatatcgtggggaacttgaacttatccataatggccctaatgaaactccattcaactttatcaaaagcttttgccatatccagctttaaggccatccagcctatatgccacacaatttgagttttatggagtgagtaatttcctgagccacaatgatattatctaagatgaggcatccatgggaaaaagcactttaattgggagatatcagcttattaagaactaatttaagcctattagcaattgttttcgatgggattttataagtgacattacaaagacttataggttggaaatccttaactaagatgggttgtttgaccttaggaatgagagtgatgagagtttaattaagctggctccattgagagcctgaagaatggtagccaccacatcctgtttgacaaaagaccaattcttacagtagaaattggtattaaaccgtcaaggctcggggcttcgtctaggggaagttggaagaaagcttttccacttcatctgcagtgtaggtttcctaaagcatttgtatgtcattctctgaaagagtggcaacatacc

SEQ ID NO: 326983 - DNA, 771 bp, Cannabis indica
tatattggtaattaactagtaaaaaaaaatggatgtcaccttaaatttgcaagcaatttagtagtttggagggttctactgtcaaaatttgagcttagagagttaagtacaagtggaataataattgagaggatttagctgcaaaaaactctttaaaataaataattaatagcaattgtgttgtggaaatatttacacacaaaaattgtttaaacaaaaatacaataaatttaaatagtttaaaaataaaagaatcatataaaaataaataacacaggaaattataagtgatatatcaacgattcttagagattgttaccactcaacaagactatacctaaaaaataaaatttatacaaaactaaattgaattatacaaataaagactcactcttaaatttatcacaattgttataattttaaacttctaattaaatttttgaagcattaagaccttgaactcccttcaatcataatacttgcactcttctttcttaaaagtgtctcatgaacaaaacttccctcaaagcttaatgaagcgtctaagggtttgtttggcataacttatacttttacttttaaacactagaaaaagagaagtaaaagtttaagcttttcatttagtgtttggatttcaatttcaaatgaacttcttttctatttgaagagcttttataagtgtttggtagtagaatataaaagctcttacaaataatatatttttatatatatcaaatttgttaataatgataatataattctttttttttt

SEQ ID NO: 326984 - DNA, 696 bp, Cannabis indica
aaatgaaaaaaaaaaacttacataatcatcattcaattgatgcataaactgcatatttgtaacatatcaatctagaactccaccaatatatgtatcataatttgcatatgtatcagtctaacttattatttagagaaatttctcacttgaagaaactaatgagagtgaattttctctaactcctttggaaaatttttcaaagattaaaaacttgttaagttctacattaccttttcttttctaaccataattctaattctttataaaaattatatgcattatttattattgaaattatgaatatataacaatgaagatagctattaaaattaagattgacacacgtaatacttcaatcaataatattatcaatatagaaattcaaattataaacataaataaaattgtgatcatatataatttatggttgatatatatatatataaaaaataaataaacttacttaagccctttttaaagaatgtgaaacttttatctctctattgcataaacaatacgtagatgatgctaatttatttgagaaatctacaaaataaatgaaatcaaacatttaaataagagagttaataaataataattaattttagtgtagtgtaagtcatatacaatggttaatttagtttttaagcatcatatctattctatataaagtgtgcctatataactaaaattctt

SEQ ID NO: 326985 - DNA, 583 bp, Cannabis indica
atctctaaattgttgataattgaagataacatcaatataataattgtacaaaataaagatactcttaatggttatgtttttttttttttttttttttacttcggtagaggcaacaatataatgcttgtatttttcagttttcattctatttgggttcgtatataattggattatttattttttttgtagataatttgtatatggtagttttgaggaaattgcggtatttctgtgtaaatttattgttttttatttaaaataataatttgtagtgtaaataattaatttaataaagaaaagtcaacctatgatgggtaaatacttttaatttagaagtatgaattgtacttggtacttgaattattttgctctcagaaattctatacatattagtcgtgaccataaattatctcaagcttccatcacaagacgacaaacatgcatgtaataaggctccaaaaatctaacaaaacttataaccagaaaataataatatatttagtttcatacataaaaaaatatagtaaggtgctgtttggtaaaacttttattttttaatttttaatcacaaaatgaaaataaa

SEQ ID NO: 326986 - DNA, 835 bp, Cannabis indica
tttccttggacagctatgtcgttcgccacaatgtggttagaactcattggattttcccatgagaaaacggctttgctttggactatctacattgtttcttgttctttaggggccctttttggtggtaaaatgggagatgttatggcaaaacgatttcccaattgtggaagaattgttcttgctcagataagctcgagttcgaccattcctttagcagcgattttgctactcgcattgcctgatgatccatctacaacattcatccatggactaatgttgttcatcatgggatgttggatttcttggaatggtccagctactaacaagtacgtatatatatatatatatacatattaattgttttgaaaaaacctctatgccttctttggaactaatttagagcaagaaaataattttatgatatattttgcattaatttttgataattataaaatttaatgtttaattactatttgtattaaaaataaaaaaaaataataacttttcagtaattttattattattttaggggagttctattgataaatatactttattattaaaaaaaaatatcaactcaaataatttttaaaaattactcttaatttatttttaaaacttttttctcatttatttttatgttaatttcatttcttattttgattttattttctataatttttctaacttatgtatatatattttttatttttttttttaagtaaaatttctatataattttttatttttaatttttttgttctataatatttaaaatataatttattttatttcgataagtatatttttaagtaatatgaattggaagaaaaag

SEQ ID NO: 326987 - DNA, 899 bp, Cannabis indica
gttttatccattggatgtatttcatgtataattattagtttaattcgagtttatctaatatttcagacctattatttttttggatcagatcagattcattcaatattttagaatccaatattaataagattggattgaacttcaattcaaaaaacatgagtaagtaaaatttcatatatacacatatattttacgtataacaacataaaatttaattactcatctaaattttaaaaaaatacttataagttcgaatggatgttggatgtaattgaatttttagacatcacatccaacgtctgatccaatttaattaaatatccaatatttaatggtcggttgtagcttgatcaattggttcttttctagttggaatgatttatcgtcttccctactttgtaagagtaataccataatagtgatcaccacgtataatcaactgaatttttttatttttactagctaatgtggtgactgtaacatcttaattctaaacagcacatctaaaaagtaaacataacttaagtatattattattaaataaacataatataaaaaggcaaacgtaacttaagttgattgttataaaataaaaataagaatatatggaatgatatttattttaaaaattaattaataatataatctagttatcttttattgtagaagttaaagttagttttgtaaataaaagtgtattttttttttttttaataatgtaggttgaaaatggataaaatatttagggaaattacttcttatactatattttaacttttttttttttttctaaatttaccgtttgtagttgctccggtggtttctatgtgcgttgctatacagattttagtttccaatttaggtttgctctgagtttttgttgtagaattccgtaaaaa

SEQ ID NO: 326988 - DNA, 1459 bp, Cannabis indica
agagagagagagagagagccaagaatgagtttgacgatgaagtgaaacccatttggttatagttgggcttgggcttctcctattgggcctactcaactaaatcattttttggggtatattttacatttttactgcctttaattctcttttcataaatacctgctgatgatttcaaaaatgctaattttcagtttatatattctattgttttttaaaaaataaaaattaaataataatattgtgtatctattgcttaaaagaatgtaatgaaaaatgatttcatttcgacttagtattgattttgattcgatttttagaaaactaacaaaaaaatgacgaggaggagtatgtcttttgtacttgaactttttaggagaatataatacacaatgcttgtaatattacacttaaagcaattaatctaatctctttgggttgttgggaattttaatacattgagaaaatgtcgtttagctaaattcccacaccatttatgattttacactatagtatttgtagtagatataaaggaagagaatggtgattatataaatgtttctcaagtaagaaatatctaatgatttgggaatattgtacctacattataattgggctaactcaattactaacaattgatctattgacttcagttttggccttggatctcctattataattgggctaaatcaaacaataggtctacattttgaaaaaaaaaaatacttttttaatgggaaaatcatctttatcaatcaataacttccgttacctagatgaaaaatgaaaatcaattagaagaacagactccaaacttaagctataaccagaatataaaataacagctctagcaaagttatgaactactatattagctaatcatttgacaaaataaacagaaacattactcaaactagcaagcaaatatttacaatctttaatgacggagctaaacaaagaaatcatattaatagagctctgtaatgcttgcacaacccctaaacaatcagtctcctttgtaacattcaaccacttatggtccttgatccaactaagggtctcacttatacccagcttcagtaagatttgggtcaaccacaccaggggaaaaaattgtgcacccttcaatgaggaaaccattggagtttctagctacaaaacgcaaaccaaagctctaattaccaccggtccaccgccgaacaaagtcgcgtctatatttaccttgatactaccaaactatggaggagtctaaaattccagaaaaagttaaaaattataggaaaaccaattgtatggtattgattcacattctcattcatttgtttactaaattttataatgagagaatctagtcatacttaaattagagagaaaaaaaaagagaaaactactacaaatattagaattcgcgacggtcctaaaaataatttttttcggggaccgtcgctacaaaaattaagta

SEQ ID NO: 326989 - DNA, 1109 bp, Cannabis indica
ttctgtttttaaaaacaaaaaacagttttttagttatgatgtcaaacatgcacttaattttcacaggaattattattaaaataaaattgacgctctttctctccttctccttgtgcattgaaccctagttaaacacacacaagtttgtgtcttcttcattccactcaaaatagcaaactcatatgcgttcagatacaaaaagtgtgatctaattttactattgaaaaattagagtactcatcccctttctttatgcaagacatagcttaggaaataagtggtcataggagcttttgttctaaatgcagacgacaagaatattacattagttgttattctatgaataaaataaaaaaaagtataattacataaactactattttctgtaaaaaaaaaaaattatatttttacgtttattttttatgtatatattttttacagttttttatagaaataacaagaaaactacataaaagtaacataaaaataacatcgaaataacatgaaaataacaacaaaaaataatatacaaataacaaaaaattaaccaataaattaataagagtacaacgtaaaaaaaattatgtattttctataaacgaaatcaaaaaaaaatcataaaaatatttaaaattctatgaaattgtatttttgtaattttgtttgttattcttgtgtatttgtcaaataatccttaattttaatgggttggagctttagtcttggccgtatatgtggtctttactttccatataaagaaaattaatgggctgaaattttttgggcccaaattctctgtttttctttttttggggggggggggggaatttttaatgggaattttacaaaaatactgtttttggaccaaaactttacaattatactgggacacggcaaaaataacatttttactgccccagcccaatttcattacttttgtactgcccaagcccaacagcataacatttatactgtgtgtgtggggaaacaacgttcttcgtgtgtggggagacgccggagacggaaatcaccaagaaaaaaccattaaaaccggcaagaataaacaaaagcagtaaaatcgacgtcaataaataatcatggcaaaacaa

SEQ ID NO: 326990 - DNA, 703 bp, Cannabis indica
ttttttttatattaattaattaaagttttaaagaattaaataattattttttatataaatatttatttaatttaaaataaacgttatttaattaactaattatattttataattaacatttaaaatatttaaatttatttacttattttatagtaattaattagatataatcttttaaatttatttaaattaaattttaggtatttaaaaaatataatagaattgtattaaatttaattttattattattatttaaattaataaagaagtaataacaactctgatacttatacaactgtaagtaaaaatatacattacatgttactaataccaaggatatatattgcatatttacattttttttttaaagattttatttacatttttatgaaaacaacgttgttttcatattacaacaacatagtataatgtagcaacaacgtgaaaataacgtaaaatcaatagttcatatttttgtaaaaaaaaaaaacaaaagagtaattagcttttttgcccattgaattttttaaactaccaagttgtgccccttatattttatgactcgttaaaaatacctctcaaaatataacttttataatagcgtggtccttccatcatattctattcatttttttattgtgaaataagtggcggtagatagtagttgataaatagatgcaaattaaatacctttcaccatttt

SEQ ID NO: 326991 - DNA, 777 bp, Cannabis indica
gcctgatgtgtattaatctagcaaagagtgaaagccatatttagaagataagtaaaagataattggattggacaagcaaaaattgaattattcttgcattatcaatactttaagacaccagtgcctttcttctggtatgaatatttctaactataaaaattgtggaacaccctgattggctaattgacagagtggaaattgtttgagttggtccacatttaatagtaatgcatgaacaagaaaaatagtctataaattacttttcttatatataagtgatagtgaatgtgagtttaggaaaagcattcggtcatctttcaactttgtattcctattgatgctctgcttggagtatctcctttttagcacatagaatgaattttcctatactttatcaagtgtttgtaacttaggaaacgaattacagaagcatttattcagagcaaataatccgacatatataggttaccaagaggtataatttatgtagagcatacacattaaaaaaaaaatctaccattaagtattacaaattgaaattcaaaaagcagctaccacataatatatacgcatcctaaaaaatatagatttagatgttattagttccgttgaaggaataaaaaatgtaaataaggaaaaaaaattaatgtatataaatgaaaagtaaatacaagatattgctaaatattggatgcaatgaaagaattgggaatacatgaaatgaaagaaaggaaacaagtaaatcaatgttgattgtggttctctggatgctgatga

SEQ ID NO: 326992 - DNA, 1354 bp, Cannabis indica
aaatgcaattttgagatttttcctaatcctaatcctaatcatattacaattttatttttttgacaaacctaatcaatgtaattatattacaattaggacattttcggctctataaataactagtatggcaactcccaccataatcaaaaatagagagcaagaaaaacttttaagcaagacaatctacattattatcattataaatctatatttaactatatagtactctactagtgaagaaaaagtcattgaggtactcgtcttcttacttttaatctctaatatgaattccattcattacattttattattgaatcaaatttttctcctttttggcaaataatgtagtttaaaaaaagagtatataaaataatacatacactctcagattaatttacacattatgtatatatattatgatatgtttataataaaaaatgtatgcgtctccatttaaaattaattataattaacattaaatgcacaccatagtgtgtatgtgtaattatagtaggtaaaatctgattgtgacacacttaatttaatctcaaatgtatgtaattatctttaaggaaatttatatttaccaataattttttaggaagtttacgacagtaacataaaattattaattgcgataaacctcttaattaaattcaaagtaagaatattaatcacacctgatattgcttcacattcatttaataaattaaaactattcaaatatatagtttggttagattttataaacacatatttctcccatcttttctatttgtgttcttgcatgctttatcagttttgtgctaagaaaaggtatcatagtaacaagaacaactttacactaatttaccattccaattatctttaacttaattaataatgttaatctcagacaggaaactcatcagtggtggaaagtagcttggttttaaagatttgcatgaaatggaaggaggctatcacaaagcagataagacagaattttcagaatgctggagaatctcctggagaactccctatattatgcgtctttcactcactgccggaattggaggacttctttttggatatgacactggtaagtggattggatccctcctaattaataacaatgcatgtccttgtcaacaatttggtatagaataattatttacataatttagtaacaatgtatacatatgagtgttcctaacctatgcattgtgaaaatgaagactcttatccaagtaaatatattctaaaatgattctttgtattgtggggatgttgcaggagtgatttctggagctctcctttatattagagaggaatttgtagaagtagataagaaagcatggttgcaggtgagctt

SEQ ID NO: 326993 - DNA, 1398 bp, Cannabis indica
gctggtactctctatgccgcaacgaaaggtatgaatatatatctatatatatgtaatgccttgattttccgaaacgtcacactcgctaatccgtttaaaaccatttataataaagacaataaactaatttattgaaaataatcaaagcataagatatcattattttagaacagaaaatatatatgcaccaaaatacacatagtcacatgaatattcacatatccatgcatataattttggttaattaacataggaaatatcacattttaaataattactcttacatattgatattgagtgtaatatattagtgtatattttgtatatatgtatgcacatattatattaccctataaatataaagtagtgtatattcgtgtgactagtagaattaataaaattttttgttgtattattttcaagcaatagttttaataacatgcgcaggagcaattaatcaaatgacaaagaatttggcatgtgaatgggcgaaggacaacattcgtgcaaacacagttgctccagggcttactagaacctcaatgttggagaattattcggtagggatttattgtcttccttttcttataaaattttgagtaatttgcggcataaatatttaagtttaactctcaaatattatagataaatacttaagtttaattttttttaaggtaataatacataagttataattttgaaatttttgtaagtaactggtaagtaaattgccacgtgacaattcctaattgttcaaagttagtacatttttattttttaaaaaaacttaattaaaatatattaataagaaaatgatacgtggataatgacttaacatttaacgatcaggtacctataaagttctaaaaatataacttatgtattattatcacgaaaaaattaacgtcattgtgatatttggtgtaatttggtgcacatattttactctttttaaaatagtaaataggcatgcatgagctaattaaatattcaatttggtaatgcaaattatttctaagaaatgtgacaattagtttgtaatttaaagttcttaaaagtttgatttgtgattggatagtaatagagttattaataaaatgaatgattttgattacttaaaactatatatatgcaatttgccttcattttcttgtttaaaatacaactttagtggattctaatgtataagtttacaaatgtgtgttgtcaaaccagttggggtaaaacttttcatattctcacacaaaagactcgtttgaaaagattcacataatgaaattgctttatattaatattgcatatcactttaaagtattttataaataccatatatatttgtggttccttatttattattattttttacttattttataactcatatttagttatcattaa

SEQ ID NO: 326994 - DNA, 784 bp, Cannabis indica
ctttttgtacaaaaaaaaaaaaaatatttaagaatcactttaaaataaaaataaaaagttagaaggatgtgaacacatataacttttttatgaatttttttcaaaatgtatagttagaatttcaatatgaacacacaaactataacaggctcaactttaaaagacaaatattattctcataattaaatgtataaaattggcaaagggcataattgtaatttagtaataataatgttcctcaagcatattattaaaacaaaaatgatttaatgaactatatataaatctgacaaccagacaaatttagcttgtgtccatttatttttcctatatataaatagctataatttattttctaattattataagctccaccgacagtacccagtaaaacaaaattagctagcattttatttaaataaacaaaacttaccatttcatgtaatttgtcaatcaaaaaaataaaatcataattattttattatattgtaataaaaaaataaaaaaataaattagtaatttgtgacgtaaatatttaagtttaactttcaataatactcaagttcaaattttaatcgtaataatacctaaattatatttttgaaactcgcgtatgtcagacgacgagtaaaaaaattatttacatgacatgtcattttttttaatggtatatttaaattaacttttaaactgatcgttactgtcacataattattgattttatatttaattggtagtatgctactgaaattcttgagtattattaacgttaaaaattaaattt

SEQ ID NO: 326995 - DNA, 1088 bp, Cannabis indica
gaataattgtttatagagaagaattaaatagtgatttaatctaaatacaaactttcaatatttgtaataatggttggttttaaaattatataaaaatataaaataattactaatatatcatcattcaataactataataatgagtgataataaatcaaataatcaaatactaccatttatatattgtataataaattgaaaataattttcttcataatagataaaatgtatgattatatgaaaataaattattttgcacatatattgtaataaaattatataatgtatacattagtgtaaattgcccaaagaaatattagaatatcagagaaagatgtttttgattgatgatttgttgaagattaaattctcatgtctctatctgacctttttttttttcccaatgttttgttcaattgtaaaaacccaccttctttgatgtatctttattggcttgaagccaatttcatagcaaggaattcatgttgtgcccttgaattcactttcacttttaagtgattcttcacaagatctatgtacataactttactatatatgtatcttagacctcaattatctaaaatgttgttaaaaatatgataaatttactatatatatgaaattaattcacttggttttttcttactatcttcctatttcatatcttattattgttaaaagagaaattttgttaaaaggcaccatatattattattatttttattttggttataaaatatatatttttaatttattttttttttattattaatattaaggtggatttataatttttaaggagactccccatataaaaatgacttatttgtattgattttcatgactatttacccttccaaagtttattgatatttagtttggtgtaatagaatagtaataataataataatggtaatgtaatagaataagaatggtaataggaattgattaaaatgtttggtttgtagttagaatgaacattgtaatcataattattgtgtttggtttggtatgagaatataatgaaataaaatttatattaaccaaaataaccttattgcttttattttataattataaaatattca

SEQ ID NO: 326996 - DNA, 803 bp, Cannabis indica
caggattggtttttctatctaaatgccattgcaggaaatagattcacacatctgatgtttcttatgaaatttatacaaaagatcatgaaacgttttttctattttgaagcaattagatatgaaaaagacatcaaagaaaaattacaggggaggattacagacttagaagctgaattgaagaaatgcaaagagaaacttgacatgttcaacactcatatggctcagactatggagaaaataaaagatcccattaatgatgctttgagtttcaaagagaaaactgtcgatcaaataattagttttgatgaacttcttcattgagaatatcggtatgtgtggaatttactttgacttctcaatcactataactatacaatatatatatatatataaatatttatgtgtgatgacctaaataatatgtctgtaccttattgttggctcaattatataaatttattagcttaaagctttctcttttttttttctgctaataaaatgaatgttgaacactactttatggaatgaccgtagatattaattaattaactaactacatatttttacaccaaaaatttcataataatacatgttataagaaaaatagcacgagaaaactgaaatggataaaactaataatttgatttttttttttaataattaattttataaaataccattttccatctataattttatttttttattttttttgattggaacttgaagcttcattgatagaaaaagaagtacaaagcaaacaagtccttacaaggaaggtaaagaaccattccataataact

SEQ ID NO: 326997 - DNA, 696 bp, Cannabis indica
aaaaaacgacggagatgggctctgaatggagctatacccgtcccagtagccacaaatatgtgagttgccttagggttaaaattcccgagaagcattgcctcgccagaaggacctagggttttgaatttcatcattagggatcgatcgatacatgtattatataaaataagttaattaaggcgtcacataataaattacctgtgagttgaattttatctccgggctttgatttgatcaaaacttcactagtgctgccaaccgaaagacttacacataagcttgccgttctaccattaaacatatctccatatctagaagaagcactagtaaagtatctaagttgtgaggagtttcctactgtgaaaggattttctggctgcgaaaaaacacaaaatttagtttagttatggttcgattagagagaaatcattgagaataattctcttttcttagtgttatattttgcaaaattgtaaacacatttattgaaaagaatgtccaaaataaatgtgcataaaaaaaatacaataaaaaaggtaattttactaaaactttatcatggggtttcaaaattcatcatgagaagaaaaatcctatttccttctaaaataatcattataataatagttgaattgatcaaacaattattaatcattttaatgaaaaaaaatgtacataaaaatttatccaaaatac

SEQ ID NO: 326998 - DNA, 639 bp, Cannabis indica
ttatctacacattcttgagaacataattctagtgtgtcgaatccaattaataaaaataaagtagacgtagccccattaccatcgcgatatgggggtgaactactataaatccctgatgtcctttttatttatcgtggttttatttagctaaattaatttatcacagtcctcttatttttatgatcttcttagatcagttgacaaaaagtcgcgtcaacattaaaaataatgaaatttactattgatcacattatatatatttcaaaaataattttaccatgtagaagagaagaatgctgaattgacttttttttatatattaaaatataggctatcactttataccctatgctatgtaaaaattatcaatcattattctgttaaatgacaaattagaccttatattttatgaaatggtatatagaataccctaagcttaattttattcattttttttaaattgactaaaaaatatataatcaatctaaatcgagtttctagtacaaaagagatgtcaaaaatataactaatcttgtcataacacttccaactcggggtattattatgttctattttgaaaaatacagggcatgagttgtcatttaacaaaatagagagtccaatcagtaacttttacaa

SEQ ID NO: 326999 - DNA, 1827 bp, Cannabis indica
acatatgggctaaagtcccctccgtccttgtataggaatatccacaacaccagcaactatatgttagagatattaaattatgaaaaaattgccaaattaacaatgtaaaatagtaaaatttacaaaataatcacactcagtttattttatgcaatcatgcatgatgactgtacaaatgtaaatcaatagttacaaaatgactatttatgatcgcacaatataattttcggttatttataccatcatacatggttattttattaataaacttttttataaagttattttgctaataattttttcataaactgctcttaaaattttaatggaatggaaacctaaaattacaactcaataacatgaatgttataactctataacaaaagttacacatgcttgtagaaaatggagaagaataagaagtaacacataaatgagagaagaaaaaaataaaaccctcttactctcatcatctcaagtaacgtggggatcaccgaaacttgaataaggtcaattttatacctttgtcgaaacttattttcctttatctatatgcactaaggaaactttcaataaactatgagaatagaagaagcttttagttgggcttaaagtcaaaataatatgctcaccatccaaggagttcaaaataatcaagctataagctctctttttgggttgattattcatgattgtaaattttttattttctcttacaaaatgttaatttacgttttattaaacgatcagcaaattgagtagcacatattatggctaaatactctcgatttctctgtgatcataacattttgagcataatgttcaggttgatttacaagctcttttgtagtaagaatgctaaagttaaatagagtcgctatttaatacaaaaaaaaacttaaaaaaataactttcggaatgatcaaaccttgtgtttggttaataaaaagccaatgttgcgcgtttgagcatttatatagtgtgaataatcaaaccttgtgttcggttaataaaagccaatggtgttgtaccttttaaggttgtttgaatttgttttctggagttaaattaaggttattcatgttgttttgagctggttttagggttgtttgtgttgtttgagcaaggtttaagtttatgaactcaaactttcctttccaatggtgattcttgattctgtgcatgttaggttgttgtattgccttatttttgttctttgggggtataatgaacagatctggaaggtttggttgagtttggggttaaattgagagagtagtgtaattttgaagtttttctgcactgaaccagtcgaccggttggtccccatgaaaccccactgaaccagaatttcggttggcgaaccggtctatcggttggagcattttgggaaccctagttttcccctttttgcgatatttagggtattatttatcgattggaaaagttttagtttcaaatttaagtctccagaaagtgatttagcgtgtcactcaccagttttgcgaataatgtgatttaggggcatgtaattcatcgagcagctgttctactcaggttggccggcacacctgaattcggtaacgaggtaagattagtataatagttgcatatgtttatacatgtttagcgtacatgttagttgccgtcagaataggcaaatctatagccatcagattagcatatcagggcatcgatgaggtgtacatagagttgtaccaagatgccaacagatatatgctaggctatcagatagtatgcgttatctgctaccacatcagtacgactagagtactgagtataggctggattcgcagtaagtcatac

SEQ ID NO: 327000 - DNA, 1470 bp, Cannabis indica
caagtcaatattcaatcatagtgtggaaaattgtaaataattccatcacttgaaggagatccagatccaaatcttagtaatactctgcgacaaaaaggaacaagggttagagatctgaatggaaggagacattatattctgctgccactaatgtaaggttttctacaactttatatatgtttattttattattttatgaaattcatgtttagaatattagattatagattataatcaagcacatacatgttagtaaatctaaatcctagtaaaacaagctccaacatgaactacattggaaaaggcatccgatctctcttttatggaaagcttttctcgtatctaacttatccaaattacccttcctaatcagacaatcaggtgaatcatctaatcttgaaataggccatcttgactatctcaatcttttatcattcataagtcatattcacacccagtagttgaagctactaccaaaatttgctggacttctaatggtgtcatcccaactcttttggcgatcacatatgagatgtgggatcaaccccgcgagcccttcctatttctacatcccaacttctttgacaaggcctaagtaaatatattgttctttaaagaagctttcaatgtactttaaaaaattatagttttatcattctataaatatatttataacataaacattattattttgttttttgttgaaattttaatttttataattactaagtgaattttataaacaatttatttaaagtgagcctgtgaaaaattgttggaacagacaaaaatcctaattcaacagattagacatacattgaatcaaaaactaaagaagagtaataaaaatatgaataaaataaaatcacacacaataatttttatttggtgtcaatatcctatggatattcctattcaatgaggtcatgcccacaaaataaaatttattagaaaaagtctcaaagttacaaaagtacttgatttatacaaaaataagatttcctcttgtaataggagtgtaaatgggtcgggtcggatctaattcggctataatccaacctaatccagatcatgtaaggatctgctctgccccgctagatcatatactcggatggatcagatccgaccctacttattcggatcagaactgatccgactcaagtcatttttttaagaattttaatattaacttataattttatatctattttaattttgtattagtattacttaatacaataatatgtttggtattgccatgtattaatagattgtgtaaagataatatattttcaataaactctaccccaacaccaactacgggtcgggttcgggtcaaagttagggtccgagtcagggttctaggtccgggttcgggcctcagtccgggtctgggttcgggtccaagtttgggtccggatctgagtctgggtccgagtccgagtctcggttcaggtccgggttcgggtt

SEQ ID NO: 327001 - DNA, 1914 bp, Cannabis indica
agtaaagcaaacattgtataatttgattctattaccattcccattacaacaaactaaacatgccataaggtttcgtttgtttccatgttatagtattttgttattaatgtatttatttatatcttgagaaactattccatttaccaaccaaaaactataatttaacatttgaaaataccaaatttattataagtcaaaaagtataaaaataagattatcaccaaatgattttttttttatcttcaataaaaacaaaacaatatcaaatcaaatactttagattcacctttgtgtaaataagtcataaaccttccaaactaccatcaactaacccatgtgcatagagttgagttggttaccatctagcttttattttttactattaccataaagtattaccaaattcaccaaactatgtaatttttaaaaggagttggttaagatctatctgtatgtaacactagtgattatttaattattttttatatattttttttgtacattgaaaagttaaaatttggattttttttttctttaatatgtagttatagaaaatattcataattttttataaaattttaaataatttaagatatgcaactcgtgatttaaataaattattgtacacgaataatatattgaaataaccataattgcaataagttacttgaatattgattttagtatgctaaattaattttttttaaaaataaaataaaatgagcgatctcatctaactatattatacacaatcatgttaaatatatatagggtttatatatagactttgtttatgctaaagtactacaaatacttataaatagagattaaaaataatcactataacaattttagctaaaaaaatagtgatttgagttcacttattttaggcttttagtccaagttaaattattattttacaattattaatattgtctttagtatttcaaagacaacaacaataataataattcaagtacatatcatgtaaccaagtaatctgaatttgataattcattcaattaatcacacaaaaatacacatttattattttttttttaatttttttcagaaaaaaaaaaaagaataacaaaacaatgaatttaaatgacttcaaaacatggtacttgtctcactttaaataatatatatcttgggaagaaaaaaaacaaaattttattaaataagaaattgttaaatggatatatttatattttgtttatctagatctaattacattttttatatatgcttttctcttctggggataaactttaatttcacctattattatggaaataataataattgccaatcaacacattttttttcttttaaatcctaaatatcttaacaaatataacttcaataatgtgaaatcttagatactaattagcaaattaaatatattaaattcacataaaattaaaattataattaatgtctgaaaaaacatgtcttgtacaaagaatgtttttttatatctatatttataaaaatttaaaagaaagtgataagattaagattattgaaatttgaatcctatgatatcatttattaattttatgatctttgctaatttctacacaacattagataatattataatttatcttgtttgattattttattttttaatggattagaaaaaatcaaaatctacaacaatattttatttgctatttcaagaaatattcatgcatggtctcaaaaacatgccttccaaacaaaaatttattacaaacaaaagaattagtaccaaaaataaaaagaacaagaaaattattaattttttttaaaaaaaatatccttaaaaccatttaactaaacatttacaaacaagaccaaaccatacatttttctattatttaaaaaaaaaaaaaaaaacaaaaaaaaaaaaacctaaacaataaa

SEQ ID NO: 327002 - DNA, 615 bp, Cannabis indica
aatattcaatccgcacaagtgcggattttgaatttttcaatccaattcaatctgcacaagtgtggatgtccgcactttgcggattgaattggattgaatctgctattttatgaacacctctattgagactacaaaattttattattatttttttaggtgctaagtgcatatttactcttataaataattattatgtatactatatattataaaaataataataaaacattttaatataaggagtcttgtataaaagtctaaactgctatatgattgggttggcctgagcgtaaaataccccattagcatcactataaacgaaaaaaaattacaagtaccattataaaattactccttaaaaaaaaaatatatatattactcttttagaacaaataatgaatgggactagaatttatcttcttaatcttcttcttcaaaaaaatcatatcttcttatatgtaattattttttacaaaaaaatagtacattatcaaaaaagaaagaacaaaaactaaataggtagtcaatttttcttaaaaggaaattaaaaagttaccttattaacattaattagtcatatttttttttttacttttccacatagcatgcaatcta

SEQ ID NO: 327003 - DNA, 1365 bp, Cannabis indica
atatggaataaaaaaaagataaattaccttattttaaaccctatggtcgaaatctttagtggacccattgggtttcaattttgccacttttattaaaacttatctttcttttctcaattgctatttttcaattatatctctataaatgtcatttctatttatttaataattaattaattattaaataaaattatcttttaacttatttattaattaaacattttaaagtctcttaattaataaataaaccctaaaatactcttttcttttcaaataagctcttacttattgaaaactcataaataatacatagtctattttagatttctaaatgattaagtaaaatcaattcactgagtctataagacaatattatctcaattagtgtaggggccatggacctatataattaagctccaggccaataaatagttctagaataaactgagtaacacatagttccttattttttataagtatttcagaatatgcttaactatcatccaatgttcctttcctgggatggagtgatacctgctcacaattctcactgcatatcaaatgtcttgtctagtgcatagcatatcatacatcagacttccaactactaaagcataaggaatttttctcatgtcttctatctcttggggatcagtgggagaatgttccttagatagtcccaaaccatgtctagaaggcataatttcccctttggtattggtcattgagaaacgctctagcaccttatcaatgtaagctgcttgcgagagagcaagtgatctattcttttggtctctaataatttggatcccaagaacataattagtttcactcaagtctttcattttgaactgggtgcttagccactcctttacatcagtcatcttcctgacattattgcaatgagtaagatgtcatcaacataaaggactaaaaatactaccacttaattatccttgaggctgtaaatacaaggttcatcttcattttggtgaaagtcgtaggttttgattatttgatcgaaccttttgttccatgagcaagaagcctgcttaagtccataatggacatattcaacttgcaaactttctcttcttgtcctagaagtttataaccttctggttgctccatatagattttcttgttaagaatttcgttaaaaagttgtcttgacatccattttccaaatctcataatcaagagcagttgttgctatggagagaagtattatgatggatttgtggcaacttgactgaaaaaccgtatttttgcaaatgtcaattgtatatatgaaaatataaaaactgtacgcgtttgcagcagcagaaagtaattctgctacagaaaaataaataacttgacaca

SEQ ID NO: 327004 - DNA, 873 bp, Cannabis indica
ttcttaattaaatataacaacaacaaacaagatttaaaaaaaaaaattaattacttacccattgatggagcttgtagtgtgttctagattctaatgtggtggattagtgcggtggcttgtagtgtggaaggttgtagcttctagtgtattaatgagtgaagagaagaaaaaaaaaactttggtggttatggaagataggctttcaggtggggaaggatcatgtgaaattgatgagaaaaatggattgtagtgggtagatgtaattggggagggtattatggggaaaacaaaaaaagtgtcatacataactaattatgttaagtataagtttaggggaaaaattataagataatgtaagtatattaattcaaatttcccttatggcaccctttctaacttatttaattatatcattataatatattcgttgtatattagttgtagaaattaaaattataattacttagttttttattttctctctagtttcttatttagtctctttagctttgtatataaatacatgctgatttatttaacaaaatacataattcattcatcctattttacatggtattaaagccaactttgggattggggattcaaaattttaaattagaattcatcagaaattgggatttcattttatttcacttttaaaagggttatttttttagaaaccatatttagagtgatcatttgttctcatcgcccactcagaaagattgcctgattgctaatctgccaaaccccaacgtccggtcaccgatttcctcacgcatgtggctgatgtgctgcctgtttttaggggtgaacattcaaaccgcaaaaccgacaccgaccagtaaaccgactagtaaaaaaccaaaaaaa

SEQ ID NO: 327005 - DNA, 651 bp, Cannabis indica
caacacaataagccactccttcatgggctgctcaagagaactaaaggcccaagttctagaatgagcctcaaataataacaatatttgtggtcttctaattgtacaaaccaaattaattagggattcttacaaaaattttagatttggggtaaaaatttacaattttacagtcatataatttttttttaaaaaaatactatctttttataaaacaaccgtaaaccaacaaaatagaataattaaaacaacagtgggacaattgaaaaacaatcgtgaaaacttaacaatactaacagttgttggcggttccgtcatatttctaccctcaacaatactatattgtataatacgatataacacggtgtaccaaattgaatgaaagttttagttttgtttctaaacttagtgctaggggtgttcattcgatccaatacgcacttttttggtcaaacaacatctaatccgcactaagtgcggatttcatattttggatccaatccgatccgcataagagtttaaatccaatccaatccaatccgcaatagtgcggattggatcggttatttttttaataataaattatttaatatttcatagaatttttttttaaaaaaaactattgtttcttaatctccaataataatatatttc

SEQ ID NO: 327006 - DNA, 497 bp, Cannabis indica
aaaaaaaaaaaaccaaacaaaacaaaacaaaaccaaaaaaaagtattgctaataagtggttggtagttatttttataggggtaaatactattttgattttgtaaatttaatttagatcctgtattttttaaaattgtataaaataataatctaacctctaaatcagattattaatatattatatgttgacgaaaattaagccttaaatattattttttactattttaaaaaatataaaaatcaaattatcatttaacaaaactaaaattctgtaaatttatcactgtacatctattaaatgtgaattcataatcttttttggcataataataaataattatttaaaaaaaattaggggaattaccccatatactatttttttattttttcttttcaaatttacagtttgggtttctaaagtggttgcagcgctagttgcaataggagtttctatacgattttttggtgcaatttaggttgcaacgctagttgcaata

SEQ ID NO: 327007 - DNA, 602 bp, Cannabis indica
gattattaatatattaattattaaaattagatttcggatttattattataaaatacgggtgttacaaatagaacacctacgtacaaaataaaggaaaaaaattaatcagtattaaatatttaataaaatatgaaattttatataaatattgtcactcataattctctaatgtaaagacaaggactaatctgtgctcgtctccattgctgaaagtatctacaatatgcctgatgttttttattagatcatactgaccttactaaaccaaaatcagttatactagccttataaaaccaaaactagccatactagtgttcttggaaattcactaagtatatttttggaaatgtttaagctaatcggagataagtcccctacaatacactttgaaggtatatgggcaagaaaatgggaggccaactaccaaggtgggacaccacgcgagaggaaaggccaacacgaggaggggccaagtgttgggttttgtgcccaaaataaaactcatttcaatataatcagatttactaattaataaagatcacaaatcgcattttatgttgcatggttcacatgatttatttcatgattatgtttaatgtata

SEQ ID NO: 327008 - DNA, 870 bp, Cannabis indica
cacatcctcagttttcagggattgtttccaaggtctggcagaagcctattaaaggtactcagatgtttcaactggttactcgactaaaaaagcttaaaggggaattgaagaagttgaataaagagtccttctcggacattgtggcaaaataagtagacatgaaaaagctacttactgtctatcaagaaaaattgcaaaaggatccttttaataatgatttgcagcttaaagagaaggaagcgaaggaaacttacattaaaacacagaaggaaatgtatttatttttgcagaaaaaagttaaactcagttgggttagagggggtgatgacaacactactctattctacactagtatcaaagataggagaagacaaaaccagatcttatccattgaatctaaagaaggaaccagatgtgaagatccagaacaagtgactgaagcctttcttgcttactataaaagtttgctaggagggaaaatgagcaatagaagacatgtgaagagaagtgtcatggctcaggggccactggttacaaatgaacaagttgtactgctgcttagggatattacaaaggaagaagttagagaagctttatttggaatccctgaagttaaaagatgcttggagtgttggagtgtgttgagtgtataggtagggtcggccctaggctaaggcgggctaagcttgcgcctagggtctactcattttaggggcccaaataaaaaaatatattctaaataatatacatatttttttttaataattttttaaaaaatacaaatttattttttatagtaagggcctgaaatttttttcttgtcctatgactcatttcaattggacctgtatacgataaaaaaaaataaaa

SEQ ID NO: 327009 - DNA, 669 bp, Cannabis indica
tttttgtaaaaaaatagcaaaaattagtatatcgtgtaaatttttataaacttaaaaaatctttcataatatttttagtccataaacttaccattagaaaattgatttgtatcaacaacttcactgtttctggttaaaactaaaaggtaaagaagtaactcagaccatgttttttaggtctaatcttcggcataagtaggccaagtgtgtgcgtaaggctccctcaccaagaggtttccaaatttggaaaaatacaatctttcacaattcacaacacaaaggctttcaaaattttgaaaattatcattttagatataaacatttgaaaaataacatatttgtggtcttccagtactcatgaccgggcctgaatcttgttggcccactcacaccccaaaattacactgaggaacattttcaatattcataactttttccttaaaatttcattttcacatgatttaatccaattgtggcataccatacaccaaaatatttcaattttaggattaaatattaataaatctccaagactccacttgcaaactatatatatatatatatctattctatataaagtgtacctatataactgaattcttgtgtttatgagaaattcatggataactttttttaaaataattttctattcaaaaataatattttttt

SEQ ID NO: 327010 - DNA, 1467 bp, Cannabis indica
agcccccacatcaacactactaggtctatcactgtatatatattggtttcgtacaagtattacctttggtgaagaaaaaatatataaaagtaaataataaaataattaagtctccaaattaatatatataagcactactactaccactacttctacttgtattgtataaactcttccaattcatgctgtatgtatcaattgtttataataatattatatttgttatccaattaattataaaaataaatgaacaatatatttatttatatatataaatttaattatttagaggaagaacaaaattaaataattagtgaaagtggcttcccattacatcccacgatcgatcgtttacgtcatgtatttaaagttatatataatcaaaacgcgcacatatgttatatatatataactagcattaataatctttagatttggactaatatactaatatatatataatgaaagaagtgtcttaatatttagggtataataatttctgaagctgaaattgatcataaaagtgatcaatatgaataataataataatagtgttgttgtagtgattatgtattatggtttattggcgttattatgcttaatgatgatgattagtactaatactactacaacagctacaaccaccgcggattgtatctatcgtaattcaccaccgtctctgccgccatctgaagccggagtagtacttctactaaggcggctgatgagtactagtacaagtactgtaccaatggctcctcatgacttgtatcaatcatctttatactactacaagtctcctccacctcccaaatatcctcataataattactaactaattcattattatatttattctcttcatcacattcatttacttccactaattatatatacatatatacttgtacgtgtatttatagatgattttcttcttcttcttcttcttatattatgtatatatatatatacatattgaattatctataataaaatggtattggatgaagaacatgaattaattaaccagttcaagatcaatccatgcatttacgataattactcaattttgtatataaatctacactagctaatctatgtaactttagtattcgatacttcatccctaataataatttatatacagtttttaatcgtatgagtgttaatattattatcattacaatacttcatcatcttattcatcatggagtttgtaaatacagattaatttgcggtaaaatccttcaattatcaatttacttgcaaaaaaaacatccaacttcatcttttggtagaaaaatcctctaaagtactgttgcatttatatttttaaggtgtcgtctgtccagcctcattaagtcctaattttgcccacgtgacaatgacaagtcactaaaaaattatcctacgtggccatatattacaaaataaaaattaaaatgagtaattaaaataaaaataaaa

SEQ ID NO: 327011 - DNA, 799 bp, Cannabis indica
cgaaagtcttcctaacaaaagtaatggtcaggtcggcaagttcccttggtgatagcggcgacataaggtagtttcgctgaaggggaggccacaagtatgtggtccttggtttgaggggaggatcgttggggtagcaacccaagtcccacattgactaggaatgagaagaattatgggtatataaggatggaccctactccattagagtatgagaccttttgggaaggtgcccaaaaacaaaaccgtgagggcttaggcccaaagcggacaatatcatactaatgtgggagtcaaggtgaggtagcggcccgacaaggtaaaagaacggggcccaactgatgctataaaaaagtattgtcagtgcaaaactgatacaacaaaatctgtactacgggttgaatgtacattctccctataggatggcaccccacaaggacccctccccctaatcaggtcaaccttgagtataggcagactaggcttgtacttagggtccacctagctcaaggactcaaacaaatttgttcccttttaaaagtacacattttgtttttattgattttaaaaaaaaaactatatttttttctaattaagggtgcgattctttttttctataacccactaaattttagatgggtctggagttctccatctaaatagaagaataaagcaggaatgaagatcaatttttatcctaaatagggcagggacggagatcactccctatatctgtatgtattttatttgggtaaatactattttggaccttgtgatttgcaaaagttaccgattggacctt

SEQ ID NO: 327012 - DNA, 752 bp, Cannabis indica
tgtcaaatataaaaggtaaattaaataactaaataaaaacaattctatttgtgagtggtattcacatttttattattgagcattgttattaagtattaatgatgttcaaactactacggtgccttataaatagttaacgatattgtaatagacaatacaaacaagtagatttggataagtttatagtacacttcttaaagtggtgtttcggtagatcgaccccctatttattttggcttttactaaagctgattaatccatctttttttcatgatcgtatacattatagttatttaggatcacctgtaagtttttagaaaattccgagtagtttacaattaatgccaaaaacaagatttaaatcttttgttgcacgtgcggatattattttttacacacattgtaagtaactgtttgaaccttagttttggcattgtaaactatttagaatattttaaaaatttataggtgatcccaaatagctataacatacacgatcataaaaaaattaactaaatttttttttagatgtcaaaatagatagaaggtctaccaaaacccttttaggaaaggtgcactacagaaatttctaatagaattcatcatatcaaattaacacagaaaaagagaaaagaaaaatattttgaaatatttttagtacctccttaaaatattatttcggtagactccattatctgtttcgatatccagaagaattttttattttttttctatgatcatgtacattgtag

SEQ ID NO: 327013 - DNA, 911 bp, Cannabis indica
gaataggtcaaccttaattcaggttataaaaaaatgcttctccattaattaacatattaatcatattaattttgaatttgaaaataatagataaataggaccgtccaaaattaaaaccatatataatagtccaaaattaaatctatatagatatatatatatatatttggtaaaatattcaaaattttatgaaaatttacttatagtcttaactaattagtgttaggaaaaaaaattaaactaaaaatttttttgaatgctaaaataaataagaagtataaataatttaaaggtgtccactataaatttttcatataatattatgtttaattgtttatatatgagtattattattagtattagtagtgtctaatactttttataactgtcgtcttagaattggttaataatattttttaaaattgatttttttttaaattatatgagacctaataattaattatagtaataacagtatgacaccgagaagagtattaggccaatataccttatagcaattatcttaatacatataagactcgtttgtaacgccgtattaggtcgtattgtattgtattgtattatattgaattatattttatgtaaaacgtattaacttttatggacacctaaatatataatattttagtataaattaaagtttaacatagtattatataaaaatatgatatataatccaattcaatataatacaatacgacttaatacgacattccaaacgagtccatacactcttaattaatgtggaacctcgtattaatgaaataagagcattgctattgcacaccaatagtgtctagcatctcttgacacgtcgccttgcgattgattaacaatattctttaaaaattattatattaaactctagggacccgatacttaattgaact

SEQ ID NO: 327014 - DNA, 609 bp, Cannabis indica
cacattaccattacctctgctactattaacccattccaatagtccctaaagtattgagctaattctttattttgtctagccattaactataaatataacaaatacatgagttaaaaatgaaagacacgtcacaacacaatatacatgaggaagtatattaaagctgttatataatatatgtgataaaatactaacttcactttgtacttattattatttgagtcacaaactaatattccaccttataatggtaaaaaatcttcaacttttgactaaatatttttttaataatgtcagctcaacgaaaataataaatttgaaaaaaaaaaaattatttgaatttattaggtaagaactccaaattatatctatttagttatatattttaataaaatcgaattaaaatattaattttatatactttatattataaagaaaaattaaaaaaaaataaatattaatatttatatatttatatatttattaaacaaacagtactatttattaggagtgttcatcaaaccgcccaaaccgcccgcaccgcaaaaaaatagcggtttgaaattctttgcggtgcggtcgcagtttgaatttttcctaaaccgcgcg

SEQ ID NO: 327015 - DNA, 659 bp, Cannabis indica
tttaattataatttgatctaaaaagtgctatgacaaaaattgtttacattttttgtatctgttcgtattaagtattgtcttcaagttggttgtattaaaaaaaaattgtcaaaaattaagctcaggtcctatttttactattttagaaaatacagggtccattttgtcatttaacaaaatagaaggtccaatctgtaacttttgcaaaacacaggatccaaaatagtatttacccaacaattaattatactaataattaaattgggttataattataattaattaacgtaagaaacagcattaaaattcgtcatatatgttgcgttagtgtatatcatcatattctatacttctttttgtttctttgcagcaatattttattcttataaactaaattagagtataattgtcattattattattttcgcccaaaaaattgtgcaaaagatgacaatttagaaatattcctataaataccatggcatcattatattgacaatttaggattctaattgaagactttgagtcaaaatgtgacatttaaaaatgtaggtccaaacctattcattattcatcttaaaaaaatacattcataaatcatttaaagcatttggtaaatttctctactctattctttaaaatatattattaaaatttta

SEQ ID NO: 327016 - DNA, 785 bp, Cannabis indica
accttctctgcaatctccaacaatggcttcaggttagtgcttccgctgatcttttatcatcatattcttctttaatttaacaaaggttttatagatttatgatttagggttttctatattaaagcactttatgaatatgtttagatctgtgatttatatatatattttaagtgttttataaaccctaacaaacacatcaaaagttacaatatcttttacctagaatatataaaaggatccaaatgtctacaaaataactgaaactttcaagtccattcacgaagataagttgcagtaatgtaagaattcactctctcaagtcgcaagcacatcaacaaatgcattctgagctgtataaacttcatacaatcttgaaccaagcaacagaagatacctcattgcaaatacaagttcacatgctacaaaaatcatccaaacttgcttatcaacatccctaccactaatcacagtaaccaccatcaaattattaaagaccgtaaaatatatatagcacagactgtctgtaaactactgacataaaaaccatcctttgctccaagtaaaaaacttccatctttaacatctaataaaaaaaattgttttaaaaatactaattagtaattagcttttattataaattaccaaaaaaaaattagcttttattatataaatttaaatctatatatttaggaaaaatatgagaagtgacatgaaactctaaaactttaaaaactgtatttaaaaatgagtatttaattagcattcttgagtatttaattttttat

SEQ ID NO: 327017 - DNA, 1322 bp, Cannabis indica
agactttaaaaaagagggtaaaaataaaagaggacaatataaaaaaggtatagagtgtaatttcctcaaaatattattctcatgtattttcttccttgtctaggcccatgggcctctcagcacaatcgggagtgaagaccaaatgtcatttgttatagtgaaattaaacaatttatgaatttttatgtgtaagaatattgcctattttttaaatttttttttaaggataattgttgtaggttagagttatagattagagaaaaagcaaaaaggtaaagtgaagagattttttttatttataaaagtttactgtctatggtaagatcatgttaaactaatctatgagctacaatattaactttacaacttttttacatcctttggaaaactagattcaaggtacaaaataagtctcaaaattacacgcaatcaaactactagattcaaggtacaaaataatcttcaataggcatcaaatagaattaaaccacaaatggcgatggaatcttctcgaaccaagatagctcatcatctaactgcaagacatattttaccaaaccatgaactacaaaattcttatcatgagccacatgggacacaactgtccttaaaaatttagacaataaaactataacgtcttcaaataataccccatcacattaaaaaaacacattcacattattataattgttgccagagctagcgaaactaaaaaaatatcgcaacaccaaactaaaaaatatagttatattagaatgacaatcttcaaaataaaaataatgtacaaatttagaattaaacacacaacacatatgactagcttgacattactaacaaactaaaaaatcaacaaaatttctaagaataactagccaaaggtattattctttagctagtaacaacatacaagcatcttaatttaaaactgttcaaagtcaatatcaaacagattatattaaaattaaacttatcggtaaattctctgtaattgtaggccctccacaaaataacctacaaaataacaaaaataaaactctattaccacacaatataatgaaaaaattaatgtgaaagaacgatggaattggtcagccctaccatacgatctgtcaggcaagacctatccatcatcgggctgataagatggccttatttgcgacgtgcgtggcccttttggccttgaggtctacccatgatcccttaggaactaagttccttctagaacacagggactttttgttgggttttgtgccctaaataaaacgcatttcaatataatcagatttacttataaataaagatcagaaataacattttatgtt

SEQ ID NO: 327018 - DNA, 2085 bp, Cannabis indica
ccttctccaaatcatgctggaacaggtctgctgtagctttacctccattgacattagctgacttccacaactgatttactgaagtttggtcacgacacaagggtgatgtcgtttgtaataccctaagattaaggaatcagattagcaaatcctaactagttagatatctattaatgtggaattatattattatataattttgatataatttaatatatatgaattatactgataaatgacatgttaagatcccattggtgagccaagggtatttttgtcattttgaccttgagaagggtaaaccgtaattttaatattatagcgtgcttatggactatattagtatatagtatatttattttgtctttctgtaggtattttctgacaagtcgacatggtcacaaccgggtattttgggccgacccgagttcggggcctgaaatacatttttaagattttattttggcattttataaataattgaataatctaaaatttatttaagtttgttgcgttgtgaaatgacaattttgcccttgttgtatgcatatgtggtatattggccctagtggcattttggtcatttgactatttgactttattttcaacaaaatggatttttagagaaaatgacaaaagtatttctgattttccttgctctaaccaaaccccctatctctctttctccatttctcactttgttgtttctcttcaattgaattttggtgattgtgcttggtgattgaagattgtggtgctagtgattgaagagcttgaggtagtttttttaccttttttattttgagtttttgtttctgaatattatgatgatttgaggtattttagtgtttttggtacttaaatgcatgtttgtgagaatagaggtgatttgggtggtttgtctgttgataaagcttgagagttatgtgattcgcacacttggattttcttgtgtgattattaggttgaaatttggggttttaaaatattgaaattgaagcttggttcttggagtagtatgctgaaattttgggttcataattgagatttgggtgtgagttttcaagcttgaaaagggaaatttgatgcttgatgagctgtgtaataattgcatatattgttgtagattaaagtttgaatttgtgtttttaatttcttattgggataactataatatgtgaataatggatttgagtctaagcatgttttcggttgagtttggtgtgatttgggcttgattttagttgttgaaaaatggtattttctaggtttggaacccaggtgtcgcggcccgccccttgaaatcctaggtttctcaacctaggtgtcgcggctcgcttagggagtgtcgcggcccgcctaggggtttctgggcagtttgaatgttgagtttgtttcgtgcataacttttcgatctggactccgatttgggtgtttcgaatatcattggaaatctcattccgagcgctgtatgtttattgtgttttgaatgccaattatataattatgtagaagtggatttagggattaaccttatttgtgaatctcgagaattgtgactaggattatcgaaactttcttaggagcacccggggaggagcacccggggattgggaatcttcacgtacttgggacatcaggtaagacagtagttagcacatagagttaagcgcgttggcagtcatgtttgatgttataattgtgattaaatgagaactgggattagggttattaccctaaagtgagtggttatatggcctagggttattaccctagttactaaatgattttaaatgtatgccatgctatatatgttaaaagtaaagaaattatgcgtcaattcaatgcataatttggttagacaaggtaattagaaccgaatataaatcgttctaaggtcttattgtaattagacatgtgagtgtaatacgtagatctatgccatatagacataaataggcatgtgagcgtaacatggaggtctatatcaaatagataataagtgtaatggaatttatatatatatgtgatatgttttattgtgtatgttgatatttatactgtcttgctgggcttggctcacag

SEQ ID NO: 327019 - DNA, 1397 bp, Cannabis indica
aagcctattaaggaaaatatcccataataatattaccccacaagggcacaacccatccaattattaattataaataataatgttttattattttaataaattattatatttttaaaataatttttatatatatatggtacaaaacaaacaactaacacctcccccattgaattatgggtgtccaaccttgttttgacgtttcttgcctttttttaaaaaaattaagagtccatcgtttcattttataattaaaataaaatatttcaaatttgtaatatttaaatcatatgtatattaaaaaaaaaaagtaaataccatgttagatcccgtattttgtaaaagttaccgattggactctatgttttgttaaataataaaatagactatatattttctaaaatagtaaaaatagaaccataagtttaattttcgataactttttttttaataaccaacttaaagacaattcctaacataaacagatacaaaaaatataaatagttttatcataacacttttagatcggattattattaaattttattttaacaaaaaatcaatacttcaaggtcctatttgtgccattttaaaaaatacagagttcaattagtaacttttacaaaacacatagtccaaaataacaccctttaaaaacttatgaaagaccttcattcattaattaggtgcatttagaaaatggcttgtcttgcctaacggcttaactatatcacaagaaggtaaaatcctaatctaattagcactcatttaatttgttgacactaaaaaaaaattaaattaaatatttttgttcacactaacaaatttaataattttttgttagtttgattattaatgagttctctaagtatttttctttttaaattacaaatagtctaagaaaaatgttaaaggacatttataatacgagtactatggtgctaatattcagagtcgtccctagtattgatgagtccaataattttttttgttttatctaaagtgaagtttaagagtaactccaaggagattgcaaattagtagtatggtgtgtatatatgttctaaggaggttgcatatcatatcattttataattttatctacagtgcactgtagtcacgacatcctttttttttaattgtttttataatttaattaatatttatatatatttatattattgttgtaaaattaagaattattttttgagaaattttacaatacacaattttaaaagtgatgtacgaatctactcctatttatttcggcacccgacaaactttagtctattttttttttatataatagtgtatattataattatttaagacaacatcctgtaaaatttagaaaaatttaaaaaaaaattaacacgccgaaaataatgcacttctttaaa

SEQ ID NO: 327020 - DNA, 567 bp, Cannabis indica
taattattttgtattggcacattctggagggagaccctgggaaaatctcttcttatcagtacaataattatagattctataattcttttggacccattccagtttctttttgtcggtaccgtcgagattctgattgagccaatttttgggcctagattttgaacccaatgggccacatgaagaatggcctgaggcccataaacaagcctgagtagcattgaaattcctgtaagaagcagtaaatggggcctgagtccaatctgtcttcactaaaccacctcttgtggcccaatcatctgcattccaaagacttgaatggattttcattgattgattctttgggaatggtattccacttgattccatgtttttgaactctcttattggaactttatctacataaaatctacaatcataaataaaatatataattagtacatatatatatataaggatatgattttgtctcgtgatgtactttcacggaatgtattctgtggtacattagatgggtctcagtgtacattaaatgagtatcagggtacgtttctactttttaaccctaat

SEQ ID NO: 327021 - DNA, 762 bp, Cannabis indica
aaggcttagagagttgcccaattgccgcagaaacaccagctgctatcaaaacctttagaaagaaagaattaatggattcagtacaaatacataacataaatcacaccaaacaagttgtaacgaaagaaaaaaaagaaaataaggaatacccagtataattcttgaccttgttatggaaaagctgagggatttcatccaagaaatgagctttgagagctgttgtgggtcttggcttggggaagaagaagaatggtttggataaaaggacattgggagggtttcttggattgaagaaaggcaaattaggagtcatagattgaaaagaagaaggtgtagaagcagtggaagttgtccaacaatgcagcatcatgattttgccaaccaatgcaaacgttactggtgtagaaaccaagatccattattcataatcatatgagtgaaacaacattgtttttaggcctctcgtttgggagaaaaaataagatgttaaaggcggaaagatgccaaattaggggcacatttgattaaaacgacaataaaacgtaacccaattacaagagcacaccacattgcacatgccgtccaagcaataaatatatcatttaatataggttgattaggatttttttccctaaattttgacatgtaccaaatcatgatccctgaacttttttgattgttaaaaattctctctgaactattgagattgttaaatttaaagtttaattttattcaattttactgtttcagtgattgtttatg

SEQ ID NO: 327022 - DNA, 2408 bp, Cannabis indica
caattttggcctgaattgagttatttgacaaatactctcttctctttcttgttatattacttacattaggttttaggttttattaaatggaccaaataaaagacaattgggctgaaaataacccttatggctaaaatccacttatggaggcctatattaaatttttgctattttattttaatcaagccttgaatgaaataattttatctttttttccaatttaccattaattaaatctaaactatttaaattccaattttaatttagtaattataaataattatcaaataaaatatattttaaatatatttataatttgacctacaaagtgtcataattaataaataaaatcttatttatcttttctcttcaatatagcccaatcttcgtaaaaattctcaaattagacataattaattttttaattttaactaattaaataaatcaattaattgagtcatcaagatgatatatatcctaggtaatttgaggactatgggcatatgaaatcaagctcctaataagttgacttgaaatttacggagtaaatttcctaacttattaatttatcatgactcaattatatactcataattgcactattgatttcatagaacactctatatatattcaatatagatacgttatgaattatctattgtttcaattaaagtaattaattatcctttatagacggtttttattgaatagggacaaattactgttttatcctttcttatccttgtttttggacgcatgacacgtgtattttcaaggcccaagaactagatgcacaagcccattcgtcgggcccaaacaaagctgtgggtcagcccacaagcggagttggaccatagcttcgggttcaaatatgaccccacctcgacaaagcaagaccttcttggtcctggaagtatgactctcgtccaaagagatgaagatttaaagagacacatccggatacccttcaggggtatctcagaagcgtaatcgaggaggcgtccaggtgttatcctacatgacacccctccgacaccaaatcccacagaatcaggagtttttcccttgtgttagacttgggaaaggtgcacaacacccaaaagcaacatacctttttgtccaacctccgttatcctaacatttaaatgtacataattgacgacgcattgacacctttcaccatcaagttatgcaattccgtactggcaaaggtaagcctcctctttgggcctcacctactcgagccaaagtcaatattataatgtattttacccatcaacgggcttattttcatgtacaaaactctaacagttgtaagctgtgttcagggagagttattgtctatcgttgacctctatggtagaatcagtcgggggcctaagatgcagtggtttaccctagatttacccgataacacgatttcagcctataaatagggttttatcccttcatgcaaagggttacgaattttgactagaaactctgcaaaaatttagcaagaacactcttgtgtaaaatactctatagccaaagagtttaataatattgacttgtggactaaggctaattaacgctttaaccacgtaaaaatcttcttcttctttatttctaaaacattattccttagcttaatttattattagttcaattttcaaaaatctcagtaaacacccttcaatgcattttatccttaaaatactttgctcgttgtaaataatatttcagtaaataatataattactaaaatgagtactccactatttaactcgtttagccaagctcaaagaaaactatcattttacttttaaaaaatcatagaagctatagatgtccatatctatgattaacgttctcattgaattgcactactgagtttctaagatgtaagtatgggctagaccaataggtaagtcggtaacgaataagtcaaagaactctaatactaaaactgacaaaagcttaatcatcttaggattaagatcaatcgatctatgatcaattaagtgatattggcttagaaaagatataacggtaagtttatgatttctttttcactgacaatattgatccagtctgatgtaaaccctatacatacaatataagtttactttgctaatgctttgaaaaagatactccacttagccaaggtgtaagtaaaccacatcgataattatcacgtcagtgtaaatctattgcactgataaatcatgggactaaatattttgaaacatataatcacgataattttctactgtggtgacaacactataatcgtgaataactatatgttcaggatttagtagaatttatatattaattaaataattatgaaaataacatgtgaaccaagcaatatacaatagtaaaaaaatgatctctgatattttattgataagtaaataagatta

SEQ ID NO: 327023 - DNA, 1133 bp, Cannabis indica
atatcagcaaagtattcctgaacaacagttgctatagcagccttggattgaactttttgtcccgaagaatttagaaggaacttgatattgttgtttgacttccgtgaggatgctttagcgtgaaaaaacttagtattacggtctccgctagaaagccaatcaacccgtgatcgttgttgccaataaacttcttcttgctcaagtaaatcttcaaggacagattcaacactttgcaattgatggaggtggtcgctggtacgggtagaggaattatttaaatcagcaacttgtgattgcaaagtattaatgttttttttcatctttccatatttgcctatatgccaactttgcaagcttgttgcacatgtgtttaaattgtgaatcacagcagcaatggggtcagtagcacggtcataaatccaactattggaaatgatttcagcactctcagggtcagcaagccacaacttctcaaaacggaatcgacttttgcttctctttgggatatcagcctgcgtgatgcaggaaaaatcagcagctatggcgcgatggtcagaatgaaaaaagtccaggtgttccaatgttggtgcttgaaaatgagttgtccaaaggttgttgataaaacaccaatcaagacgctccttaagaggattgacagcagtacggccttttatccaagtaaaaggatcaccaataaaagaaacttcatgcaagaaacatttatccaaggtagtcctaaaagcttccatttgggactcacgtctcaacccaccaccagatttatcattgttggataaaatctcattgaaatcgccaatagctagccaaggaagaagtggagcaacatcaccaaaccgctgaaataaggtccaagaatctgatttattagcagcctcgggagccccataaaaaccagtaaagtggaagcttgggctgccattaaacttcatataacaatcaaaaaaagtaggccccatgttaagcaaagtaacatcaatatcatcagtccataagagcattataccaccactaagtccaacccgagagacttcaagaccattagaataacgtagtaatgtcggagtcgagtaatagaattctgaacaagttttgtctccataaaaaacaaaaca

SEQ ID NO: 327024 - DNA, 559 bp, Cannabis indica
agggtatattgtcataatcctttttgaaaaaatccatgtcctctgatttggcagttttgcggtttcaaggtacatcaacattaaatgactatcttttccacttccatttcgaattctgtctgtaggatcaaacatctctctgatctaacaaaactgatttcaagagtataaagtaagaaaaaggaaccacctttgtagtatttcctctattttagaaattctgaaaagctcttaagcttctttgctgaaaaactagcactgactttgctcgagaatttgcatgccatctctgtctttgacattttcctgtgagtttcctctgacttaaatttcgactccacacactcaaagagaccctcactgcatccaaagatttgcagaccgaagagctgtatttcgtcccaaaccccaattttaacagtaagtagcttttcttcttgatatcctttatgtttgttatgcttgcgtttttaggtttattgctgcatgttatttgtttatatcattgccgtctcatttggttttagcagcttttagggtcaaactgtatttgggtcaa

SEQ ID NO: 327025 - DNA, 519 bp, Cannabis indica
atgatcaaacaacttgaggttagcttaagtgactataagaatgtatgtgtattgaaaattttaggtgcgagtaccaaattatgtattgtaatatataaatatttttaaaaaaaagtactgcaacaaatcttattcatttccactaaaattgtcatatgttctgcgtaaattactgaaaagctccatcatgcacttctaagttaacaaatacaaattaagaatgtaagcaagtaattaaaattgttaaaaactatttctaatgagaataaaggtatcataaaaggataaacctatttgctaaacatgttctttcactacaacattctacctcattagtggcggaccacttcgccgctaatacacccactcttggccgctaaagggtattaacggcggagagcggccgctattggtccgccgctaatgcttggcggctattaatagtattagcggccaaaaaagggtccgccgctaatactattaatagcggcggagcattagcagcgggaccccgccgct

SEQ ID NO: 327026 - DNA, 638 bp, Cannabis indica
gataggctatctcgtgaggctttcaaattgatgatggcaatccttttggtggcttcagtcgagattagatgttgtcccaaatttagtccataatcacatgttggagtttaaggagtatggtcgacggggccttcatttgggattgggccttgcaaacccaattataaaccgtcctactcgatggatactagcacctcctaattcttttgctctagcaactgatacttgtggtaccagggaggggctttgtcggattgggggaagtgatacagtatgctgcgggtgtggtcaactggtgtgttatgtgatttctctgttaatgtggcggagctacttgccattcgtctgggcttgactcttgcgcatcaatttagtttcaatatctccattattaataatgattctacactgacaattaatttgattaatatgcttcatataaaatttagtttttagtttattatatttaatatttattttttattaactgttgttggtggtgattcttgcagcatcattcgcattcaacgaatggtatgtcaatagtcaatacactgacaatctctgtgtaactagtttaggagaattgtgtttgaacagattattgtctacgatttttgtagattttctgtaacagt

SEQ ID NO: 327027 - DNA, 766 bp, Cannabis indica
atgtttattttaccattattttatggttttctaagtttacaaattagaattggcaatacaaatcaaatttttatgtttgtgttattttgtcaatcataaaatgttatctttagctactgttgtaacttattagagaagagtttttgttttgtatttggagcaacaagcgccattaataggatgcttgcattaccaagttatttctttaattttctaccattctaattctaaatgttctgtaaataagtctagcttcttctttgtgagttttaatcattgattatgtcctatatatgtatagatcaaattgtagtggtttggttggttcaaactttgatcttttataattgcataggtatattttgttgctgatagtttagttttaattttttgtttgcaggaagactcaagaagtttgaagaaaggagctaatattcaaaagaacttaccaaaacaagaatgtcccaaggtgccattaatatttactcattagtgttccatagagtcaagtttcaactaaagagaaaaagggattttctcgtagggatattggcggctaaaccaattgaacttttcggtttgtaacacttaaccacaaaaaccgaatttttggcggctaaactacctaaaccctggttccgttttactctgcacacctccgtccaaaaatcacacttaagtgtcgcggtgtactgtccacgtaatattaattttaaaaaataattataaataatttttttaataaaaatcatattaaaaaatttaa

SEQ ID NO: 327028 - DNA, 1215 bp, Cannabis indica
ctcttctttgaaaattttatcttttttttcgcttatctttttttccagaaatttttttgacttgcgacgactaatagtattttggccataactctctcgatattactcggaattggaagattcgagatgttctcgaaagctaagtacgagatataaaacttttatgttgagtttctaagtccatttctgcatttaagttcgtccgaattttgcaatcaagttccaccttgttcaatcgagctagccgacttccactactttcctaccaaaatatgctgaaattcctccaaaagactcaaaatgcatgaatagtttttaaaattaagtcctaacaaataaaaatcacactaatcaataatttgaagaatcaatttaagaatattaataaataaattaatcatatttataagataaatatgaactcatcacaccgcctgtctggggcctagaggcgagggagtctgcctcctccataacagtgtccaagggagttttcttgcttgtactctttaggatattcaccatggtcaaagtgatgcagaaactagtaaatttttctcagctctcaatgaaagaaccaaaatatttaccgagatttttagaaatcgattagtaagagtttaaggaaaatatcaaacaataaataatagacaaataactttttacgtgattcgggcattgataatccttagctcatgagtttgttgtattagccgtaccgacaagtgtttaagtattacaattgtttacaatattaactctgtattctttttatttctcttggagaagaagaaattaagcttcttaggaattttggcaaaggttctgtaagtaaattttttcaccccttgcacatgaaaaaagggctatttataggcacacatgtggataagggcataccctttacccaactaggttttcttactcaacacgacataggggtatagactacaatatgatggtttgctaatggtttggtggtatcttttccgtctgtgttgcatgaccattccaaggcattttgtaagagcgttgacacgtgtcgctcaaaggtttctcctttaaaagtggttgcctagataagtcattggataaaaaaggctacagaaccacgtacgcgcactaccatggtctgacgcagggacaagatctgattcggtgtcagagggcatacaactatctgttgggttttgtgccctaaataaaacccattac

SEQ ID NO: 327029 - DNA, 1027 bp, Cannabis indica
ggggttttaccgtccaaatttgggttttgagggttaagtgaaacaaaaatgaaagttttgggggttttgccgccattttccctaacttttataattaatttacaccttttgcattggagcacaaatataaaattgagccaaatatagctttatggtatgttttaggccaaatttaaccaaattatacaccatccattgaagatggtcttactaacaataccaatataagagcactcacaatcactaatgtaaaatagctacaaatttaaaaatataattaagagctaaaaaagtgattaaaacacccgttcaatagacgagctattattgttcaaaaaatttgggggcatttagtaatacttgtttttaattttttaatcacaaaaatgaaagtaaatttgtgttttaaaagttttgttttaaaaaataaaaatctattctttaaccacttttattttttaattttaaaaatagaaaataaaagtgtgttcaataaccttcattttcatttttattttttgattttatttaagtcaggtctaaggttggagttgtgatccgagttcgggactggggccgaggcctgagcttgggtcccaaggtccaggttggggtcaaagtctaaaatattgattaagaaaaaaaattgtttaaaaaaatttgaaagtgtttccaaaatttaaaaagtgaaaatagttttatggaacatatttttggaaaatattttcatttttctaattgaaaaaataaaaaactgattaaaaaagtgttaccaaacgcacacttaactaatgaataatacataactaaatgtagctacaacatttctaatttttagtgctataatttttttggtgttttgtttattttttagtgtaaaattatatgtatagaatataatacataatattttattatttatatatagaatatttagtatttttgtcctctactaaattatgtattctaatgtatatggtttataaataggggcctttttatttttatacttttaaaaattagtttt

SEQ ID NO: 327030 - DNA, 846 bp, Cannabis indica
attagcttaatagcttaaaggtcctgagttcgaacccatgacctctcctttttcccatccatccttcaccactaagctagcctttacaaggttttgctatataatataagttttataattttttttttttgtttgttattttaatttttttgaacaattttagtgtttttacaattctttttcataattatatttagggagtaaaagaaggtgtgacaaatctcaggataaactaaaatgatttttggcatgtgaactaaatcttaggtggttgaccaagagttttccctttggttagtgttgacgcggtttttcgtcaaaggatttaagaatattgtaatcaaacaagatgaacacgagcaattgtaaattaaagtacactgctttgtgaaataaatttttgacaaagatgaatacagatttatagtggttcacccattttcagcagtaataggctagtccacttggagtgttattgatcccaatacttgaggagggttctccagagttatgttctccaagagttcaatccataagtgagttattagaatgatagagtgagagctcaagagaataattttgtgataatcaaaatttgggtccctttacaagtgactccattctccttatataggttttcatctagaacacagttaaattttaaaatctcttaacctcagaagcacctttctgtaactatggacgggttaggtttaaaatacaaaatgataacaaaaattatattccaaaataaatatctagaataatgataaaagttgaatatatatcttcaaggtcatgttggtaagtcatgagaggcacttgcagctgagatgaggacatttc

SEQ ID NO: 327031 - DNA, 519 bp, Cannabis indica
gtacattttcaatttattgtttatgagacaaaaaaacgtttgtttaaagatttaattttaattatatttaaataaaaatgtttaattaaaatagtttaattttttaattgttaaaatcaatcaaaacaatttttaataatttttaaattacttataagactaaaaaattaattaaaatatcgtaaaatgatttatgtaaatattaacctactgatttgtaatgatttgtacgataatatcatggagtaatctgattattccaactgggtaatattaggggttttagaaaaaattccatacaaaatatacatatatatcgatctctcttatataaatattattataaaacaaaaaatattaatttttttttaaatactacaattcaaatttaatctagacattttttaatttattgttatttttttaaaactcattgcatatttaaaaaatagcattctattattttttttttacatatatctaaaaatgtatttttctattaatgtttttttttaaaaa

SEQ ID NO: 327032 - DNA, 692 bp, Cannabis indica
tttatttagggcaaaaaacccaacagttaggttttccatttgcattgcaaatttagttttttgagtgttgccctaagttgttgggaaagtttctttgtattcatacattgacattccaagactgcttaactagcctaaaaagtcaaagcttaaagtatctcagctgaaaatagacaacatcaacaacatcatcttcaattgacctttaaaagaggtacttgtgtgttgttttacttttgttctttttttgtttgttttagtgttattttttcatttgtcttttttgtttgcattatatctctattcagtttgagtcctttatttttttttttattttcttacagttataacttgaaaatatttctccaactttagtggagaaatttagtttgaatttagatgattatttttctggtgatacgactccttcctttattaagtttaaaggtaagggaatcgtgatatgacggttctaaatttttgcccaagtcttctcttgaaggtgaacatgttggtccatcctcatataagacgcatgagcatgtcactcgtattgagtacgaggatttgaagaaagatgtgtaccttgttcttagccaccagtagattattatgtttgcttttgctgatttgaacaaaaaatgacattcttattgaggtaacttttttttttttaatttttaattagtgtt

SEQ ID NO: 327033 - DNA, 942 bp, Cannabis indica
cccaccaccgccccattaaccactaagaaggggaatccccaccccattaggggcgggtccccgcggtataaatttccatctctaaatagtatgctttttgcaatgaagaaaataaattagtctaagagtagtgaagtgttgtcatatgaatattaaaccttccttgtcattgtattatactgtattgtattgaattgtattctatgttatatttttatatattactatgtttagtattaacttttataccaatcaaaatttaacatcatatttatatatagtttaccaaacatacccaaagtgattcgtataagagaggcctgcgcttcttcctcaatgctgatgtttgaatattacaggtttaatgagacttggctgctgatttgtatgctggaaaatgactatctactctgttgttaatgatgttgtgatttgttgatacatatgcattttcattgttagttacttgtgatctgtgttgcattaatttttgtgcatatataagagagaatatctgtgtggcaggttgttatgaacactgcttattctgaaaaccagagcctgagttatgtggaggtaattgatgatcctcaagagctatgtactgaagaactagaaaatggggtacgtcctattgaattagagaggaagttatatcaacttctggaattgagacaagaagaaaggataaaggaacttgaagaagctttagaatgtgctaatcacaaacttaaagagaaggaattagaggtttcttggtggaaagacactgcccatctcatatcgcagcatattccacaacgttaaaggattattatctttgtagagagagtggttttattattgtatctgtaattagagtgtgtgtgatgatgtgtaattagagtggttctttttatcagtgtgaaatataagacatattatatatatatatagtaggtg

SEQ ID NO: 327034 - DNA, 927 bp, Cannabis indica
tataaatatatatataaataaaagttgatgatgatatttaggaaatatggtgattgaaaaaaataatatatgttgacacattattgaggtagatgatagagtgttcttactaggataggaattttttataggatttattaatcaatcattattatagatatatctaccatctaatctaatttttgtatttgtatctcattacccaacatagaagaataatgtgaacatttatatatttataacattattaatggaatatgcttgtgggttgttaagcattagagttttttttttttttaaattttggtaaacagaaaaaagtgatcaatgagcataaaccattaagatttccatgttaatacaaaccgtccattgattaaagtatgtctcttttaattgtgtgattcatcttttgattagacatatatagaaatactctagattatgttatagaaaatcatgatcatctccccactaaattattatatataaataattaataaagaaagaagttatgtatataatatgtttttcttttctatatataaaatcctatatacatgtgtttgatgcactttctttttcaacaatatataccataaagatataaaatatgaataggggatttgatttatcatactaaatagtaataagaggtgggatttgaaagaagttgataatgttataacataagaaatgggcccaaaaatttcccaaattcagaagaattgtcggcaaaatgatattgtaggattttgcacttccatattggtgataataccaaagctttttaatttatttttccattcatttaaatgggaatttattttttaaaaaaatgcaagaattttatttggttcaaagtgatatatgtgtgatgattctcttgtaacgtcaccttcaaactccaaagctcatgtctatttt

SEQ ID NO: 327035 - DNA, 1310 bp, Cannabis indica
aagtaaatgcagattaatatacatcacttttgaaaaaaaaaagttgattagtaatttgcatagaattttcaaatatccaacgttgttctagagtcgttcttggttaacaacatgcaatttattagaaattggggatacagataaaatctggacacttaaatgatagctggaccatcgaaacaaaaagaacaaacgtcgatggttttttaactgttgttttactattgttgtgtgtttgttaaatgttgaattgatgaaatactgttaaaatattgtaggttagggaatctatacccgttctcttgaagagcaatggataatgagaagaaagaaaaaattatgtcaattatgaggctagtggaaaattcatatcaaaagattgcaaatatgaagagcttgtacaaattctagtctcctcattggcatgcaaccccacaaaaacagccatgcaaatctagtaccaagcgaaagagggtatacctccaataaaaatattcaacgattcgagcctatttttttacttgcaactgaacatcaaagaaatagattttaccacatacccattatgcgtcaacacgcagaacaacagcacaacaactgctgcaataccaaagatcacatataaaataacacaagaacaagaaaatattgtaatgcttgagaagaacgcacaaacaaccaaatcaaacacattggaacaaccagcagaggaagaagaagaaattgaaacagaagaaggttacaacaaccaatacaacatagttgactatgtaaatcttgttgctgaagaaatggtagaaaaactagaaaacatttgtaaaaaaatagatctagaggttgacattaacaacgcaaaaagcttataacagataaattctacccagaagttaaaaaaggacatacatacaaagacaaagaaacactcaagagggtcctgagctactatgcaatcaaaaataatttccaattcaaggtatggaagtcgttctctcaagaatatagtctgaagtgtgtttatcaaagctgtaattggtctctacgagcatcaaaaaataggtcaacaaatacattcataatcaggaggttctcaaacatccacacatgaccaataaatgttaaacatgaagaccaaaggcaagcaactataaaattcatagagaatacatcaaatcaaagtttctaaacataaagacaaaagcaacaccgcaaaatataaaaagagaatttaaatacaggtacagaatcaagatgaactatatgaaagcttggagaagtaaagagcatgttataaatgttggaattattttacc

SEQ ID NO: 327036 - DNA, 1115 bp, Cannabis indica
atatatattaagattttagtgtagttatgaaattaaataaatttaatattaaaatgttagattgtttgtagaaaaattgtgtaaaatgttatgatcatatgaacgtttattgaacttataaatgcaaacagtgaattagtgcgtaaaagaatttgattcagtagtttgtttggtaaataaagcattgttgttttataaacaaaagttacgtatattgttattaataataaatatagtacattaaatctcaatatattatgcatattttttttatatatatatattttttttgtaatgtgaggaaattttagagcatatattcaagtatatatataataactagggttattaggggacttcatgaagctctctcaatggatcaaaatatttggaataaaattaaaatagaactagatgaaattataaagtgctccgaaagcttaatatataactccatgcatggttgattgtggtgttgaagagacaaagcaatataatgggagagatgcatgaacccaaaattctgaacatgaaggggccatgatttaagtaaatgggatgttggctattcctaaacaatgccatttttgttggttattgaccacttgcaactattttattaatgaaagaatttaaagtagagagagagtagaccacttaatgtgttgaagcaaagtcttggtcaacctaaattacaacttcataaattgatataaattactccaatagtggttcaaccaaaatataacttactctcactcaaataattggttaactgttgaaattgaaattattcttaaaagatgaagaaataaatagtaaaaatgtatttttttgttttataaaatgtttatgcaagattgatcaactgagtattttaaagtctagtctagataagaatttaaattttaaatgtatacataaggaaatttgtaatgcaagaaagatgcaagcataacttccttacaagatttttcttttgaaattaaatattaacttaagagtaatgatatgttcttaaatctgcatcaaaattctacacttagtaatgatatgttaattgtgttagttaattctgttagggctcgtttggaacgccgtattaggtcgtattg

SEQ ID NO: 327037 - DNA, 1132 bp, Cannabis indica
ttttcaatattcccccttatggtgtccatgggggctttctatagtggaccatgttacaagttgctatatacacattttctcgagtatccaccagactggaataattgatgtatcttggctcatattccttctttgctctatttgaagtctcactttgtcccagaccctttcctccactcttgtttaaagactgacttacgttctgctctagaacttttgctttcgattgtttgagagcgatactgcatctgacttatgtctctccatacacgaaaaattaggttcgtgtaggtgcttttgtatgtatgcaaatggtctgtatactgttggggtatactaagttctaggaacaggaacttgtgagacaaatctgaaagcagaagcggttggagttggtactagagagactccaattttctattggtaaacatcttctaggcttatgaagccttaggccctggccataaattcagagaacgtctcggccccttttctttgcatttctccccatagcatggtaccaaccaaaagttccgattgtaacgccacaagtttcatatcatcgattactttagtctttgttgctccctccatcaaatgctagataaagttcttcaggatctctcccgcctgttgcttgacgttagtgatggagtccatttccatgtcataattacaggcagtaaaggcaaactgtaactccttaaagaaatgaatcgatccgagagccaatatctgccaccaatcctcactagatttggtaagggttagggagaagcacaaacatttggcatcctcacagactcttgccacttgcatcatcttgtggtacttcgctaaatgagttctaggatcactacacccatcgtacaactcaatttggggcatcttaaagttctgcgagagtgaagcttctgtgatctttcttacgcaaggttctaggtcctcatcctcaaattcggtgagggccccactaagtttctagacaaattttgttagtgcacaaattttttcttccaacctctttatgtcaatgttcgagagatctcttccacgtactttgtcattcaagtggttcctgagatcatcaccacatggcctcaccttgttgcttttgttggaaattatttta

SEQ ID NO: 327038 - DNA, 1284 bp, Cannabis indica
cagttttgatttagtaaatgaatgcgttaagaaaatgattaatagacttttgatcaaaagggtgattttagagactattgccgctatttttcgaggttgatgactaatctgcataaaagtgaactttgtgaggacttttgccgcaaattttcctaatttataatataaaaattaatgttcagatcgtctatttcacacatttataaaataaaaaagtaacacatgtaaaattctttgaacatatttttttaaatttctcaaaatattatcacatgtctttattaattacaacgtatacgatcttaaaaatatttttgactaaatattttttaaatactgaaacagataaaagtgcatcaatatatttattttaaaaaatttattgtaataaccaaatatattgtaattatttaagacttttcatttgaagttgtttggaagggacgaacggctgaaaaatacattaataataatttgtattttaattttaaaaataatatatgattatacttttatttaacttttcattaattaggtttattagttgttagatgttactagacacaagatatattttcatttaaaaaatattggatatttatagatcgtagagactacttttaatttttgcccttcacttcataaataaactaccttttttattataattatttattttcttttcttttataaattatatgaaaagcaaggtatatttaagagtataatttatatgaaatgaaatcgcgtacgtacaaagtaagtgaaagaaattaatataaagttcatagtgtataattagtcataaagaaaccaaatccaatgttctataattaattaattaattaaaaccatttaattaatcatataaataattaaaaatgtaaacttgggtggaactaccgttattaaatgcttttggtaccttcctatatataccgatccatatattatataaataatatatattttcgtaccaaacaaataatattgcaaatcatgcatcaatgccatgaaagatattatatatgtataggtatattaatttatgataaatattagttcaaaaaaaaaaattatgataaatataagatgaattctattaattgtcaacatttaattaaagtctcttaattaatttttgtgcttaaaatatatgtcgaaacattttttttaattatttttgttcattatacttataatattatttttgtaaatttttaaaaattttgaaataatttatattgccaaaaataagtttgaagttctttgaatatgcataat

SEQ ID NO: 327039 - DNA, 811 bp, Cannabis indica
taattttttattaaaaaaaataatagcatctatatatctatataaaggaaaagtatgaggcggtgatgtggtactctaaaattgctttaaaaacttctatctattttctcattaattctcttattttattaattttcattcaatctatgtaaattcttctcttttttttctaataaaattaaaatatctatttaaaatacacatacctcaccatacatgtatatatataagtatatatgatgcttaaaaaataaattaaccattatatatgacttatactatactaaaattaattatcatttattaactccctcatttaaaggtttgatttcatctattttgtagatttctcaaataaattagtatcatctaggtattgtttatgcaatggagagataaaagtttcacattgcgtccaactagctgcgggagccgatatttgcaacaaatctcaggaagcttagcatgtactatacttcgagatcgatggaattttctcaaagaatatcagttcaatttcattacaatgtgatcactttcaagcatgatcacctctatggttaggtttcacatgtatgacattatcttttttctctttatcttcactctgccgattccaaacaccactgattgggttttactttgctgattccatgttgaacaccgagtttgcaattcctaacatacaaaaatatatctcaatatgaattttttatgtgattgtttaaattatgctataaatatcgtactttgttgtataagaatattttattttgagaaatatatttctatttaaggaaataaataaata

SEQ ID NO: 327040 - DNA, 607 bp, Cannabis indica
gagacctgacacatcccggagtgcctttaagctatgctcgcttccgggagtaccttgtactccgggagcatcatccgggactcatgcgaataatgcttcctggtgccatacaaagacttagcagttcttcccaagtaatttgatccacgtgtcccttcttgattggtccacgtacattgggcgattttaggagcaacaataataataatagcctaaaatatctataacgaaacaaaaatttaaaatatttataaaaatttgtatattctatacttttatattcattctctttcatttattttttaggtctctaacatcaattttcttttataggtgcttcgtaatctttaatgcaataaggagaaatataatgaaatatatacatatatatattttaaaaaagcatatgtataattacttgtatttttttaagagtaatattgaatgacttttgagatcttataattataatttgtaataatgcaatctaatttcttaaacacattactttcttaattatttatgtttgattggcttcatcagtgagatacggtaatgctaatgggtttgaaggccagtttggtacagctgtgctgtgagaaaaagc

SEQ ID NO: 327041 - DNA, 1066 bp, Cannabis indica
tctggtacagaaaggatacaagggttagatatttgagcaaaatgagtcatttaattccgctgcaaccaatgtaaggtttctaaacttcatatgtgtttgaattccattgttttagaaattcatatttaggatgttaaacaacatacatgatagtaaatctagatcctggtaaaacaatcttccaacaaatatgtcacctacaaatctaacggtgggaattcgtccttatgaagatccatcgaagatagttcacgccggggagttgacctataaataccccagaagaagcataaaggagggattccaacacttttttaggaccttcaccttgagattgaagactgactcttcatcatttaaaataaacacattgttgtaaccctactattaactctagaatattcctactaagcttcctcttcttcaagaggaatacggggaaaaagaataaacatccattgtatttgtatgtgtataaacagccaccgaccgatgagcctaataaaatagacttgtggactaaagatagttaatacctgaactacgtaaaaatctcttgtttagtattttaatatctacgccttcattactttcttaagctctaaaaatattcgattgtcgaaaaattcgataaacagtttccaacaaataattaaaataataaaaataacaaattcaaagaataaaaaaattatatgtaaaaagaaatgatagatttattttaaattatatttttgttatatataataatgaaatataaatttaatttattaaattttgaaatatatttatatcatatatattaaaattttaaattattattatttttttgcattaaaatagtaattacatatacatttattaaatatatataaatctgtgttaattgaatttgatcaattacttttacatatcgaatcaatattcgatctgcataaatgtggattttagagttacacttgaaaaaaaaaattaaaaactaaaaaataccaatgtaacaataataacaataaataatcattaatactatatcataatataagtattttagagtaaatataatttc

SEQ ID NO: 327042 - DNA, 1553 bp, Cannabis indica
aacattaaatgttatttctgatctatattaataagtgaatctgattatattgaaatgagttctatttagggcataaatcccaacagctcaaccctctaaaatgtgcctttagcatccaaaaaggaaagtttccgagattcattatcaactcaagaggtattgaagtgaatctcgagaagataaaggccttacaagacatggagtcactgtcgtggataaaagacgtgcaaagcctaacatgacggattactgcacttaacaggttcgtcaacaagtcaacacacaagtgagttctcttctttaatttacttaaaagaagcaacatggggtttgaatggacttatgaatgcgagcaagccttctaagctctcaaaaatcacctagccatgcctgtcatcctatccaagcctatagatggtgaaaaattatgcatctactttgcaatcaccaaggatgccgccagtgttgctttagtgcatgaggaagaaggggtataacaccctgtctactacatcagtaagcctctcaaagaagatcttgagacaagggtactttcggccgaaaataatagaagatttaatggattatgtctaaaattgtgaaaaatggcaaaggttttccaaaatatgtacagttgccccaaatgaacttaaaagtatgcaaacaccctggtcgtttactgtttggggaatcgacctcataggctcactaccttagaaaaaaggcagagttcgatatgtagtggtggtgattgactacttcaccaaatgtgccgaagaagagcccttagccaccatcacatcaaagaaagttcttgatttcatggtcaagaaaataatttaccaaattggactcccacagaagatagtgtcagacaatggaacatggtttgacaacaacctctttactaatttctgcattagacacagaatcattaagagtttctcagtgtttgcctatccacaaacaaatggacaagtggaagcagccaactaaactcttaaggatatgctaaagaaatgcttcgagtaagaaaaagggaattggcctaaacaactacgcgaagtattatgggcttattgcacaatagaaaaaatagcaacatatcacactcccttcgctttaacctacaagtataaagccatgatacatgtatagctcacacctcaatctcatcgaagacatacatataaacagcaaaccaacaatcagctactggttgaatccctagatggaattgaagagatcaaagaaaggtttgagcttagaaaggctagcatatcaacaaaagtttgcaaaacactaaaactttaaggctaaagataggaaatttaagcctggagacatgttgttacgatgagtattcctaaatacgaaagacacaacaataggagtacttgggcctaatttggaaggccatatgttgtggtgaagcgcttgaacctaaacttacaagttggcatgctatgactataacttgaatctagtgccagtccaaggtattggaacgggtgcatctaaaatggtactaccaataaaaaacagctatcttc

SEQ ID NO: 327043 - DNA, 1584 bp, Cannabis indica
caaaaaaaaaaactatctaaaacccacataaaataacttatggttttcaaccgaaacttatggtgaaaacaccctcaattaaaatgatttttttttggatctaatctatgtctcatattgtagagctcttcataagcttcgaaatggtatatagaacgtttaaaacagacactcgaatgaaaagttatggctaaaatacaaaaatcggcgattcctgaaaattgatcatccagaattccggttggtgcagccctataccatccggaattccggttcactacagcagaaactcgaaaattctagatcctcaaagttccaaaacttgctccaaacctaaccaattgttcccaaacttaacagaacagttctatatcataaatacaatgtatacaatcaatcaaaactcataaattcatcaaaatgatcaaaacaccgtagttgagtgaaaattgagttcttaaactcaatttagcccaactcaaacctaacagccctaatttccatccaattcaagtttaaacaacctaacttaaactcaaaagcatgctctgaacttaaatcaacaccacagtcccgaaatcacaaaatcccgtaaccaaactcaacctaaacctcaaaatttaaagagacaaagaggaataagcttacctcaaagcttaaacaactcctagtccttcttgattcaactaggaaatggtaaaattgatgaagaatgctctaggttgctgctgctttcttaggccaagttcatcataaggaatggaattagtaagatcaaagggatttcttttgaagttggatttggaaggggccttgagaggtattttatatgggagaggaggagagaatgcatgatcgtcacacttctaaagataagtaatacacttggtgagtgtgtgatcaagcatgccacaatggaagcatatgttgggtaagatagtaattgttggaatatcttttaccaggatctagatttactaacaagtatgtttttaacatcctaaatatgaatctctaaaatgatgaaaataaacacatataaagtatagaaaccttacattggctgcagcagaataaaaagactccttccgctcaaatctctaacccttgtattctttgcgtcccagagtatcaccaagatctgagcctgaaactccttcagttgtttggattcttcacagtcttacacactatgattgatgactaacttgctatggttgggcatgcactcaatcactaaagcttgaattttaatggtgaagaagactaggatttcaaattagaagaagagaaaaagaaaagaagaagtctcaaactctctagttgtctgacaagattgaaactaggttaagagtctttagaagcattagttggatgatgagacctttcttttctttttatactaattcacttagggttaggattaaattatttggaataaaaaaggataaaaatggagcaaaataaggacctagtggccggccatgaagtgggcccaacactagttagatttttgccattttttctcaaccatttatctatttttcacaaataccactttttgcaatttcaatcttataaatg

SEQ ID NO: 327044 - DNA, 1201 bp, Cannabis indica
taaccattttttttatttcaaaaacctaaaccgactgctatgtcaaaaaaaccgaaatcgaaatcgactgccaaattcggtaatgacgtgtaaccaaaaattcggttacggtctggttggtttgatggtcgatttcggtttatcggtttttatgaacacccctacccaaaattttgcagggtgtcttaaatgtctacaaaaagtgattcatgagacccctaaatatagaatttttttaagggtaaatactatttcggaccctgtattttgcaaaagttagagattggatctctgatttgttaaatgataaaatggaccatgtatttttcaaatagtataaataagacctaaactaatttttgtcaaaataaaacttaataataattcgacctagatgtattatgacaaaataagttaaattttctgcatttgttttagtattaggaattgtttttaagttggttatattaaaacaaaatattaaaaaattaagctcaaaatcttatttttactattttaaaaaatacaaaatctaatttatcatttaacaaaataaaatatcaaatttataatttttgcagaagaaaaaattcaaaataatatttacatttttaacacatttttaatatcgaaaaaagcgcggtgacggtgtgtgaatcaaaaatatctttcttaaattgaatacaaattggagacgggaaacagtgagtgagacctagcaagcgcaagtaccagcaccatcaccaccacccacctcctgcgcctcacttcactttgccctaacaccttcttctccttccctatcttaggttgacatatcatacatgggaagcttcgcaaacaatagcagaaatggcggcggcccagccatggtggacaagggcgtcgatttcgctaattacttctgcacatatgcctttctctaccaccagaaggagatgctctgcgatcgtgttcgcatggacgcttactacaactccatcttccagaacaagcaccactttgttggaaaggtacgagaccataccatcaacaccactcgtaactatagactatatttatgctctgctgcttcaatcattatgatgatgatataaaagggttgaaaaatattaaggattttagggttatttattaattatgaaatcatttcttttttttagggtagaggtttttcatatagtctatacatatgtaatca

SEQ ID NO: 327045 - DNA, 1604 bp, Cannabis indica
tttaaaattttaaaattatttttagtaataaattatatagtttataagtagtatttttttaatttattaaatttttatattattactttcatacatattactaacattttaattttatttattggtttaaacttattataatattcttgttttttttttttcaaaatactattatatttttttttgtaaatattacttaactaaacatttttaatataaaatgatgttgtttattaaatataacatatataaaattatacaactaaaaatatacataagaaaattaaataacaactaaaaatataactaagtgtacaggaaatacacgtaacaataacataatatgtaaagaaacattacagtttggccaacaagacctaccgttccaaaaatattgttagttgagagaaaaaaaatacttttaactgttggggtgtttatatacatattaataccataattttgtgtcaaggttaagtattcacatatatatcattttcataagattaaccttttagagaactaaaaaattaaaacgatttaattctattgtccacacacacatatatatattgatatgatataaaattacattaaaactgtggactcatttatatactcaaccaagtgatagttttgcatattttgtctaatatatatatattttaggggaaggatacccttagggaagagaaggctagtaagattggaagggcgatctctaattcaaatagaagcttcatctaacccgaaatctaatttttctaatttgtagggaaaagtgttagcgaaacgcttaacatgagtgatggagacattagagaagtgagataaagtatgttgatcttgcttttagccaacgacactgagtcagttaataagggattagaaatgtaattacgacagagcaaaaaataggtaaccaataatgaacacaagattttaaagaggttcgacccctttagttcggtaatggcctactccctttggatgtattgacttgagaacaaagaatacaatgtttcctctctcaaagctctcacaataaaatctctgagtattttctcttagatctctctaagcaattctttcgatctctttctcagtgaagctagatcactatttatagggctaaatgctagagtgaatctttcccttttgcttacaatatctataattggtaagaacatacattaaataactagaatacatgaaatgagggattcagacaacttgccatatccctttgatatgatcccatgattgtagggattgcctttgtgcttgggcttcatgatatcaatcttgaagtaagtcttgatgcatgacttggagaaatgacttcatttgttgttcagatcatcttcccttgctctgctcggtcaggaagactttgtgcgtgcagatgtattactcgaagtctgttcaaaacttttctcctattaaacataagaaataacagacatgtgccactagcacatattgccacgttgttgtgcaaaaaaatgggataacatttgccccccaaatcttcacgggacttccgaagtcgcgcgtagacttcacttagtttgaattcttgtttgaacgggtggcacgtgttc

SEQ ID NO: 327046 - DNA, 1647 bp, Cannabis indica
atctaatttttttattttttttttgtaaacaaatttatgtattttacaacttgtgtattgtaatacaattgtcaatttttttaattaatattttgctgattattttattttatgaactacaagattcttctcatcaatctttacaacaacaaagttgatactttgactagaaattaagttcttgcctctctaccattacctttatttttaatatgattattttttttaaatacttatggaagaatgatcattaagagtctgtttcgtatgaagaaaactatatttggatagaattttgtattgtaatttttacaatcataaggagtaataatataatatgaaaaaaaaaataaggagttataatataatatgaattatattatttaatagataagaaataatttgtattagcttgtattataatatttagatatagtttgaggtcggggtctgaagctaggtccagggcttgaggtcaggtttgtggctgaggctcggatcaagagtttagggatagttttcgcgttcggagccagggttcgagctcaaggtctgggttctagtctagggctgggtcgagttgggattcacatctgaggctaggattggggttggagcccaaggtctgagtccggcgttaagttgggtcaggtgcgaggccaggctgagttaggtccaagtttgggttagggtgagttcgaggtcgaaatcgagtttatggtgaagatagtataattatacacaacctttttatataagttcatattaaatatagtctgaatcgagcctaagataagatgagttgaggcgactgctttaagcaccccacagttcaggcctccattttaaaaaaaagaaaatagttggtaaaataaaagataatattcatattactaaaattatgttccaactcatttgtaatttgcatgctcaaataacttaaaggtttagagtttaaattttaacaacttcaatttttgtactatacaatccaacacgatacggattcgaataatatcgtttagagcatacaatattggcctcaaaatttaaagttccttcattaagataaactaaggaaactcattatcatattctacaattactaacagaatggagtcaaatgtgccaataccaatgaaatatagtctttgaaaccatgaggaatattggctttttgaaaatgtacttagaaggagatgtggtttgaggctataagaaaagatgctaagacacctgtgtactacttaaatatgtcgtatcactataaatataattaagtatcggatttcacataatttaatttaataactattataaaatatcactaattatttaagatgtcatctataaatagtgttaaacactactagtacctaataacaatactcgtgtttataactgacaataaaaaactttttgtagaaaaattcaaaaatatttcataaaatttctatttattaaaagcctgtttggaaaccattttgttttttgtttttttaaattttacttaacaaaatcttgtagtttcttcgtggtttttgattaattaatcaaaaaattaattttttaatgtttactaaacaatacctaaatatatctttatatattaaaagtgcctatctaacggcatttcttggtttaaca

SEQ ID NO: 327047 - DNA, 594 bp, Cannabis indica
tctatttctttgcttcaatattggcttgcaaaattagattaatgagacatgacttttgtttaattaacattatcaattgctaatgattgtcttaatgactcatttttattaacaaaagccctatttttcaaagttgtgtgcttctaatattgaaattaatttatataatatataaaaaaatatataataataattattattaatgttgcattatattatttaagcagccataattcattcacatattatataaacatttatttaggagaggtaaaattttatttttatatatattaataaataaagaggaaaattctatctttttgtgtgtaatttatttattagtaaattatgtacattaaatatcaaatctataaataaaaatagagttgtcaaaatatatttctatgaccatatagctttatcaaattaattgttatagttttgtgatgtgagatttcaaggcacaatctccttcaagcttggaacttcactattactctcaatattacctatatatgtatattgctcttaattaatataataaaataattaagtatataatgtatagctagacttacaaactttgattta

SEQ ID NO: 327048 - DNA, 2435 bp, Cannabis indica
attaactgttcacattaaattaatggtacttaaggaatctagagataattagaatggtaaaatagtaattttgacaaactctaattatgaactaataataattggagggcaaactacttatattgattatatcaatgaactacaagtaagaattctgtaaatataattctatattgtcaaagagtgcaattttatatttatagtgaagtaataatggaattaataaattagagtattctattaatgagatcgataataatcaagtgtttattgaagcttcaaaatatcagtccatggtccctaagtcacctctatacaacactgtacagagaaaggttttatttgatgagtaaatttgagtgagaatcaatttctatgagaaataattcttaagagtacaatagtaatttataaaaattattattttgaataattctaacaattacgaattgtgtaattatatagtatttaactatttagttttatttgataaaactattaacaagttaaatataatagtgttcttaaataatattaaagagagaaatatattcttttagtgaaaataatatttataattcttgtgaaataagagattaacgagaattaatcaattatttgatttgttataaaattgagaaattaattttggatcttaaaatatagctcacacgtgtagggtgacatataaagacccgtgttaattttgtttgattattttattattaaaataattcaaatgaaattaataaattatcttttaattattgaatttaatatattattaaataacctatttaattaaaaaaataaataaaataaaagaatttaacttatttttgttaatctgttatatgatatttatatttaaatttgaatcaaattaaataatatcttttattttaaaggattaaataaagagttgtttatgaccttatatatactatatcagtataacaaacaagtgatatagtgagataaatatacgatacttttcagagagaaaatatggattaatttttccctctcactctatctctctctctctccttcatactcgcacgccacacacactacaatttggtgtgagttttgtattcatccctatctcttcacagtatctcatgagttgagaatatactatgatttcaaaattatactcatccaatagaatctaattgcctaatctattcctgagtgttgaggctggcttggaagattttagtgtgaactctttagcaagttattggattggatgttcgataaaagaataaaaagatagcgaggatcccctaatagctacaagaggtattgtctctcttttcattagtctagatttaatctatatacattatgttgagatccttgagcttatggttcatattaaattaaattatttttaatcaaaactacttctacttttctaactctaatatggactataaaaactaacacgccggacttggacccggactcgaacctggacttggacccggactcggacctagacttggacccgaactagggacctagacccgagacccaaacccaagatagactcggacccagaccctaactcagacctgggacctgggacccaaactcaaacctgggacctaggacccagccgaactggacccttaaccccaaaccctagaccggacctaaaccccaaatctagacctgactcggacccaaacccgacccggagtcgatgttggggtccagtttactaaaaatatattataacttcacacatcctttcaatataagtcaataccaaacatagtattgtattaaataatacagatactaatacaatataatccaatacaatacaatacaatacaatacaatacgatgtaccaaaaatgagcctttaatgtgaaaatatatacactaaaacttttaaactaaaaattcattctcttttataagttttttcttttccttctttgatctgatcctctccaaatttcttaggaccaaattgtgaaaaaaatttgacaacctcgattttttggcaatgaaaatccaacgacctccatatttagtggcaatctaaattacggtgagctccatttttaccaaccatcaaaatctggatcacctccatctttaccaaccatgtgagcttcatttgtaaaaatgacctccatctttatggtcgatagagaattcgcgtaatggattaagaggaatgcatttggtggtggatgtgccgaatttgagagcaaaggtgattttgtttgggtgcaaaagatggtttggtgaaggtttctctttgtgtggaagaagaagctagaaagacaaaaggaaaagaatagaaaagggggcttttttcaattttaaccaaaaaaaaaatgtaacaatactataaaaatactttcagctggcgaaataaacaaatatacagctcaaataaaaaaaaatta

SEQ ID NO: 327049 - DNA, 617 bp, Cannabis indica
atatatatatttatatgattactctaatttcataatttcataaatcatcaaacttggtgtattacatcacatggtgacattatcatcatcatcataaatatgaacaaatttaagttcactgttttttcttctttttttcacttttcaaacaaaaagaaaaacttcacacaatcaaaacaaaaacactatatgtaccatcaatcagacctaccaaatgtatacattgaactttgaggaatatataaataatatatatttattgactaaaattattttgttatttcttcttcttttgcatttcaactttatttataaagaatactattattgatgtataatatatcaaagctcacttttgcaatttattacaactttaagaaaaaactttgaatgaaaagtgtaccaactattatacacaatgactttagggatacttcaaacattttggggcttggtaacttttttaaattggatctcttttgatctataaaagtatgattttttctttcttaaaatacattgtcacaaatctaaaatagaccctcttgaaagaaaagaaatggtctttttctaaaaaaagaagggataatataagatactattttttataaaaaaaa

SEQ ID NO: 327050 - DNA, 684 bp, Cannabis indica
tatacaaaattgtaaaatgtccttgtaaaatgcccgaacggccacaaaattgatcacctgccttatcaaataattttaatattaatagcacaatcattaagaagacgaaacgcttgggttggataaaattttaagccatctaatttaacttcataatagtattgtgaaaaaaaaaaaattgtgacattgtttctaaccgttggatcataattttatatgtaatttatttatttcaatattacaaaaaaaatatatgttgtatatatatttccataacctgatcaaagttcggttatttattatctttttataaattttgaagagtcgtgtattttcataattaaaattatgaagagataagtctcaatcttattattaaaatcttgatccacttaacgttttgattattgcttgccaaaaaaaaacgttttgattattgaaaatatttattactcgagtgactatacgtcgtaaggaaatcgaatctcactaggcactactcactactactcactgtattaaaagaaaaaaaaaaaagtactgactaatttagattactctatgtaaaaatggctgaagacgttaaatattcaaagaaacgcttaaataatagattcatcaaattagataacataacaaagtgaaagggataattacataaggtatttttttttataaaaaaaa

SEQ ID NO: 327051 - DNA, 3813 bp, Cannabis indica
ttttacccttctaattatctatttactccttatgtaccattaattcagtgtgaacagataatttataacttattttagattttagatctaactattaacactcccaaaattaatacaataagagaactaatattcgatccattaggaaagcttagattccactattgtataacatgttcccaaccactcatgttattaagctcctaagataaaagttgtaagaatcatcttctctgtgaaactttaacgagtgaatcaaagaactcaatgaacacaaacatgagtttatgtatactcaggattcaggctgatctactaatgatcatcgttgtgatatgaataactctttcatggtaaacaacacgttaatgaaagatatttatcacataattgtccattcatgcataatcaaataaacaacacatttactacatgtctatctatatatgtgatccgaatcaaaatcacacacactagaaatatagtgtaagtaaaccatacttagtaattctataatactttaatacaccaccgacttattttattaatatcgtataatcttaattcttttgcatgtctttacaagattatacattctccatatgaataaggaatttttatatgtttaataattatactattataattattgtatcatttatcttataattgtattttatgtattctctaacatattatctaataattacttacttttagggcataaatcccaacactttgtacattgcatgagcattaacataaatcatggtacgtgagagtcatgtatgtcacatataccttggtatacaagagccaagggttgcaatggcatttgacacacctgagttagtatttttatggtttaatgaaatgttgatgttatcctagttttttaatcgtaaagtgctagtgcgagtgctggtaagttcattaagttgaacaaccgcacgtacatactatttgctcaccagagtcaagtactatcatgatataagtgcttgaggtctcataagaatataacgaccacgtttataaatgtgaagtactagtgcaagtgttcctcctcggatcacaaaaataaaaaagaaaataaaagcatcattaattacaaaaagctctctagaagcaggacgctgcatctagaagaggtttttctaattaatcgaagaaaaccctttgggagtgggatgctgccctagttgtggtattctttcaatggctaaactcttcctaagtatgggacgttgtacttagcacagatctaatccaatatgtctttttttctttttcctccatcggatttttttctttaacaaggatctatgagttgaaatcatcaaactaggttctccaacaacctgtgatttcacccctatacaaatcgggtttttctacactactcattgataatgattcgtctcacttatgatcataaagtgagttcatgattgagcaccaaacacacaagcaataacccactacacctcaacagtagtctatctcactcacaacagatagcttcaacatagaaacttcaaagttttttcaccccagtcacaaagagatcaacgttgaggggaaagagcagttaagctcagacagtgccaacaaatttcaaacatcatggcaaaaaaggtgatggttaataattaagcatcaccaactgttctaatcaaaatagaccttaaaaagagtgggtgactccctaagagagtcggagccatgcaagtagctcatgtatggtttctagtgatctaacatcgctccttgtgataaaattagattaccactcacagtcaaaactaccctgtggcaaacatcaccgtaactaccttcatagtattcgacatcaaatctctttagaaggtcaacacccaacgacctctgagccatctcacttaactaccacctgtttgacaagttctcaatagtagttggtatcgaccgtctccttgacaaccaaagagtagaatgcgaatgttacaacacatccttgacattcaccaagaagacctcctcgactgtgctaatagccgaggggatgaggaagacctccttcactataataacagccgaggggaagtggaagacccccttcactgtcaaaacatccaaggggatgtaaaaggcctctttcattgtgaatacgacataaaggacgatgaagacctctaaggttaaaggccaaggactaaatggagactgcacttacaatcattctaaggtgcacccaagacagggaagacatcacccctatcttggatatattaatttgggagttggtcacatcttcaattgactaaagaatggccaacaactactttaacacatcattgacagtcatcaagaagaccttctcctctgtaaagttgaggagatgatgaatgcctccttcgctgtaaagccgaggaggtgatgaaggccttaaccgctacaaagccgaggggatgtagaaggcctcctctactgtaaagctaagggaatgtcaaaggccttctacgctataaagctaaggagttgacgaaggcatcctctgctatcaaaccgaggagatgaataaaaccaccttcgcttaaacacaactgagggaattctgaagaacttcaaggatacaacctaagagaagacaaggactacatcaatattcacataaaaagatagggtgacaagagagttaatgctaagacaacaaccgaagattagagtaagtgttgatattctaatgtcgacatgatttcacaatacctcaaatcaaaggaaatcactcaaggagtcatcaacttaaaatttcaaattccactattcaacagggaatggggattcaaaagcctactcttagtgggaatacttaaagaatagaaataattgtccaagattgtcaaaattgaattcgatagtttcaagagaactagacttatcacgtcattaagtcaacctcacacaagcttaaggttgacttggggggaaaatatttactccaagagtagccttgatgacgtggacatcaatttttgacacgtggtaaaagatgacatctcagagttgagtagtcccgagtcatagcaagttagcctgggaggggtccttagccctgcactcagcttgactttgtaccatgaagatatagagcaacctaatccaagccctgagagctgaaattacacgaacttgtaacccggaagccaacctgggcacctacggtttcactcagtgccgaggttgataacctcaactaggatttcagtctttgggaccgtcttagtgcaaatgggtcaaaacttacattgggacataaactagacatacaacggacatgtttgaggcatcagaattaaaattgaacttcaattttgagcacccagggcccagagcacccagcacccaggttgacaatctatcaatctaggcgctttccaagtatcagattagagatcttacttttgcatattcttcgtcttcatcaaaaatagggaaatatgtatttttggagaagaaacagtacttcttgggtgccaaaatagggccgcacccaggttgacacttaggactggccctgcccccaagttgacacttgggtctggccctgcattttcgatggtgttttccaagatttcttttgagcatcttttctaaaaataaaaaatattaagattcaactatttctggggaccaaagagaattttcgaagggctagaactgggacccagcatccaggttgacatctgaggtgcatggttcgtatcgaaagtaaacaatgtaccactacagaaaatcttacttttagtcccaacaaaacttgtgactaaaagt

SEQ ID NO: 327052 - DNA, 742 bp, Cannabis indica
ttttttaatttcaaaaagtaacctaagcacccatagtattcttttttcttttttgttttcctcaataaaatcctgtttactttctcagcaaacaaacagaaagttgtgcctaattaactataaatattaaaacaaaaaaggaaagcttaattttaagaaatttgccaaattaatacattaaattagtaaaagaaaaaccacactaaatttacacaatgaaaccattatcttcacacagtgtaaattataatcgcaaaactactattaatttttaatcgcttttgccaccaaacatgattattttgctacaaaaaatttaaagttgtaaaaataatgtttatgaaaatttttattagtaaaataataatcataaaacaaccataaatttacttacactcatgagtgtaaagtttaaggtggttattttacaaattttacagttacaaatcgctaattttcataaatttcccccccaaaaaattaaaatggtgatcaaaattattaaacataaattgcttaaatttccattatccaacctaacttcatattttcaaaattaaataaagggtaaataccattttggaccctgtattttgcaaaaattacagattggaacctgtattttgttaaatgacaaaatggaccctgtattttctaaaacagtaaaaataagacctgagcttaatttttgacaactttttttttaatacaaccaacttgaagacaatgcttaatacgaaca

SEQ ID NO: 327053 - DNA, 609 bp, Cannabis indica
ttttactagtatatatatatttgtctataaattacatcgatccactttatatatacactagataattatagcacgtatgattagttgtatacttaattttattatttaatgtgtgttataattttgaaaaaatttactctccataaaaataacttgttgatagttgttgatcgtatcgtactggtgaggtggagaatgaaaatttccatattaatcacgtggaagatgagggagaaatgccaagattcttgcaattacctaaccctgattttgctatgactgaagacagagataccatcccaaacattggcctactattgcccaatcattggggattccacatgagtggatttgtctatcccaaaagccccataaatttcctaaacctactcctttgggatggcccaatatggataaagaagcctaagaaatgtttcttaagctatatggagatgaggttttaaacctttacaaggcccaaccatctttgatatccaaccccccaacctatccgaaatgattctattccttttgggaaataccatgttataggcataaatctacccttcccgcgagaaagacttgtctatagagaactcgctgtattga

SEQ ID NO: 327054 - DNA, 768 bp, Cannabis indica
acttcagatcaacccaacaccaataccattctgctgcaacttcagaagctccaaaccagcagccacgacaccaggcactgcctcctgctcctgctcctcctgctcaaccgtggatgcctccatctgctagtgctttcaaattgaatgttgacgctgttgtcgatgtctcacggaatgttattggtgtaggggctattagtgggcaagttcaaatcccatgaaatggaagcattggctattttccatagcttaaattgggccattcaacaacaattgccattgtcccaaattgaaactgatgctctattggttgcttctgctttacaagctcccttcaattcaaagtcatcttttaatgatttacttgtagacatctcttgtcttttgtcctttttccttaacgtaattgtatctcatgtcaaacgtactgccaatatggcggctcatggtttggcaaagtttgcgttaggggtggatgaggcatgttactggtttgaggatatccctcagcctatatactctgttattgtagatgaactctttgcttaatttataataacaagtattttcactcaaaaaaaaagtactataaagtgccacgtgtcaagcacatttgtttgtttccaatgaaaataataatgatcaaggcgaccaatacggcgagccaaaaatgacatgcatttattactaaaataattttttgttcttttgaaatgaacaaattttatttcgaatttttcttatttttttttaataataattttttcg

SEQ ID NO: 327055 - DNA, 519 bp, Cannabis indica
tgtgacattgttaaggctgatgcttgttaatcttaatgaaattttcttattcaaaaaaaaataatgagaaagatatgtgtattaaattttaatttaaattgtatttgttatccacgtttctaaaagggggacacgtggcactcccaattcaaaaattggtcaattaagccccagttaaaagccctaccgagaggacaggcccagtttgtacgggaggatggatctaagtgttggaacttattttaccaggatctagatttactaacatgtatgttgattataattctataacctaacatcctaaatatgaattttctaaaataatgaaataaacacataagagatagcctactatgttatgttcaagataggaactttaaataaaactaaagagagtagatctaaccattcatatggatagaaagaatttatcaaaattacaaggataagataggagaatttttgtaatgtctattcgaatgacttaggcaaaatacctaatccttatgaaaagtttta

SEQ ID NO: 327056 - DNA, 874 bp, Cannabis indica
taaccacattttatataaaatagatataaacacgagaaactcgttagattcctttgtcttattttttgcaggtatatattgactcttcaagagctccaaattccaggtaaacaatgcaaaaaccaaatttacttcttattatttttcccatattaaaaaggtgatgatcaagatcaacccttatatcatgtatatacaaaaagcactatatagtacgaaaaaatggcccctcctccccataaatatttccataaatgcatgtgacttttcaatgtatggatctataggtttacttaatttacaccacaagagatttgtggtttataataaaatttatggctgtccaaaacaaaccaagccaccgttaccatttcaaaaggtaatgacatcaaataaagttaatttaaacattttatctattttggtatataagaaaattgttattattttttataattgcatacgttatagctatctaaaattacttaaattcactacaagaaatgtcacttttgccatcacatttttgtgctggcaaaagttggtattgcgctggtaaactagaatttacttgtgatgtgttggcaaaagggggttggcaaatcaatgttggtattagaacttttgccagtataaaatgaaaagcgctgacaaaaatgacttttccctgcgcgtaaatgcgctggtaaaagttagattttagccaatgcaaatgtatgcttataaaactttgatctctttgccagtacagtttgtgaaatgcgctagtaaaagttacttttaccagcgcagcagcgaactgtgctggtgaaagtaacatttcttgtagtgattttttcaaaaaatttcgagtaattttttttttttgatgaat

SEQ ID NO: 327057 - DNA, 695 bp, Cannabis indica
catagagtatcaaatattctaaaatattttataattgatatattagcattgttattaggcattagtagtgactagcacttgtagacatgtcgctttgcgattgactgacaatactccctaaaagttattacattaaattatataaaacttgatatttaattgagccaataacaacataaacacataaaagaacacgagacaccactaatacattctaacatatttctcttaatatatcatagagtattaaataccctatttgcttttgatcgtttcttcattattataataattattttgaaatgtgtacacgtaaatttaataaagtttgacagaatcatcctacacatatataattagtaatacagatacatagatatatattaattattttatagactagctaaaatctagaagattgaattattaattggacttagaacttaaagaaaaatattattcattggagaagttatttattagacaatgtcataagtagcctagttcattattatttttttttaattactccacatattattttttttattactctatatattcaacctaacttttttttaattgctctagtagttggttaattgatttctatgtgagttattatgtgaaatttggttccaatttaaattattttattagttgctatgtaaatttttgtaaaaatatataaaaaa

SEQ ID NO: 327058 - DNA, 1103 bp, Cannabis indica
attctggcatgtattttcagatgcaaaagttttgaaagaagttgtaattaacacttctcacaaaatattatcaattggtcaagtacatgattaaaatttaaatataggaataatttgtagtaaatctttttaaagaggtgttttggtagacccgtatctgttgcgtcattcaggagagctttttcatttaaaatcttttatgatcatatatgttgtagctattaaggactacctgttaatttttaaaaaattatgaattgtttgcccatgacaaaaataaagtataaataattatttaccacacgtataagaaaaaatagttacgagtgaaacaaaatatttgaactgtattttcgattatatacattattcaagaaattttaaaaatttacaagtaactttaaataactataacgtacacgatcataaaaaatataaactaaaaacctcttctgaataccaaaatagataaagatttactgaaataccttttagaaaagtatactatagacttaccggttattatatatcaaaattataccactcttttatatattcacatgttattatatatttaagtaagagaaatttagacagtgtacttaaaataagatttttttacattttaattacagattttttatttgagtaaatattattttagaggtttataaaaattacttatttggttttctgttttgttaaatgataattcagaccctatattttttttttaaaaaaaaagtacaaaatagactatgagcttaatttttgtcaaattaaaatttaataataacctgatctagaggtgttatgaccagattagttacattttttgtatctgttcgtggtaaaaactgatttcatgttggttatataaaaaaatgacgaaaattgagtttaaagtctattttgtaccattttaaaaaacatagggtctaaattgtcatttatcaaaacaaatagtgtaatcagtaacttttacaaaacacaggatccaaaatgatatttatcctttttattttacatttttacatattctcttttttagggttttttcactgttttttttttttttttttttttttttttttttttagtta

SEQ ID NO: 327059 - DNA, 740 bp, Cannabis indica
aatgtaatgactaaatacctaaaatatgaaatttgtagacaattaatatcaattatttgtaaattataattatgtgtgtattatgtcatatggaatctattcgcaagaaatatgcatttgataatttacaagttccaaagattttaatgaattctaagtgtatcataaaagacatacatgaaacttaatattttcatattttatgccaaaatagtagaaatacgacatacaactattttagtcacatagatacagtttagtatcaagtatttcacaaagtaatattattagatatttttaaatatcaggctaatagaattgaactattttacccctagagttacaagcttatttagcaagtaaagggtaaaatagtaattttacatcataagcttaatcacccttttatttgatccatatggaagcgccgaggcagttgagtgggatgtgtgggcttgtaaaagcgccagtgggcgtaagtcccacaaaggcatcgatagagatgcagagttgtggaatgaatgcatcaaagaagcaagtagggctaagaagaccgagcgcaagtgttaagatggcgctagagtttgagtagaggccagatggtcgtgccagtgagacttagtagtcatgtgagcctgcgaagttcaagaagggttttagagtttgcatgaaggccagagggctgcatcattggaacttagtacatcgtgggagccggtagggcgtgatgcaagtgtgaa

SEQ ID NO: 327060 - DNA, 1055 bp, Cannabis indica
ttattttattattattatttagtatctcaaacttaaccgaactatagttacgggaaggtacacatatgattaaggaattttaaattccagatgaaaatctatataaggggagtgaagtcacttgtaaagggaccctaaacttgatactcatgaaatcatactcttgagctcccactctcaaattctaaaaacttacttaaagagtgaactcttagagaacataactctagagaactctcctcaagcattgagatcaataacactccaagtggattggcctattatcgctgaaagggggtgaaccagtataaaattcttgtgttcgtctttggtgaatttacttttgcaaaccggtttactttgattaactattgcttgtgttcatcttgttcgttttacaatcttcttatattcgttgacgaaaaaccgggtcaacagtttggtgctttaaatgagagttgaactcaagtgttaatcaccctttaccatcatagtgagtacgagacggacgaactatgagaagaaggaccgtgatgaccccatgaatgaagaaaacaccacgaacaccatgaagagtatcaacccgctaagcccactagcgaaggcacctctcgacgtcaaggcaaacaacctatgcctaacaacaaaggtcaagtccaagatgcgggaagctcatcatcaccatcccaaggtttatgatgaactaccaatgtccatgaggtgttcatgggatacgaggcattgcaccggcgcgtttagataaaactctcagactcaacaaagagtggcaagagaggtatggagcccaagagaacacaaggccacaacaaagaggaacccgccggcgtcccggtacggcaagaaggggatgaccccatgggagtagttcaacacgttaccctctcgaaggccaagagagatctaggtcacgaacaacgcaaagtcgtgatgctaattgtagtgccatatcacaaaaaccttctcatgagaattacaaccgtggtgggaggagtgagcgtcctccatcacaacaacgaaaacgagtaacaacctcg

SEQ ID NO: 327061 - DNA, 984 bp, Cannabis indica
ttaaatcgtttgcttttggtttaaagactattataaaatttataaagtattcaaaacatttagaatgtttgtgtttagtgctttttatttataaactatgaatcttttaaaagtgcgcacaagattttgttcttatagatttttgggattttatcgagatgttgaaaagtttaaagttttgtaaagttttggattgtaaaagtttggttgttacaaaatattagcttaaactttcaaacttgatttttatcataaacaaagtgtgcactaagtatcttaaacttagaattatctacctatatatcattttaaattatctccaaaaatcaatgttacatctgttaatatattcatcttatttaacttcgttctttttattctaattctaattcatattatataattgaccatcaaaatctcataaaaaaaaggtctaattcttcgcaaaaaacacctagacacaatttaggagctctataaagtgagtttaatatttatttatcaagagcattcttcttaatgattggagcacctagtcttttattttgacatatataaaaggatgtgcattctaagaaaaattttaaaagcaccacaggttagcagtcttttccgttttaatattattagtggtttaattaagtattaatttctatataatttataatttaatataataatttttaaaaaatatcattatacaattataaaatataaaatgacacatttagaaaattattaaatactaataatacctaataaaaatactcgaatcctaaagatctagctagagaaacatgtttagcatatggaggaggagcactactccccataaacattagtgctgaaagtaattataaagatagcaggatcatgttcattgtacaaagaggcccacaagcttgatttcttatcaatgtataaatatgctgcctatgagtggattgattcatattaataaattaaaaggtttttttttttttt

SEQ ID NO: 327062 - DNA, 2509 bp, Cannabis indica
taaaaatgatgctcaaacatagatctcgaattcaagaaaaaaaaaacaattctgaagcttctcaaattgaatttattatacatgtgtgatagaagtaaatgcaaattaatatacattattcatgagaaaaaaaataggttaataatttgcaataaatttttaaatatccaacgttgttatagagtcaattttagttaattacctatatttttattagaaaattaggtatacgtaaaaactggacactcaattcatagttggaacactaaaacaaaaagaactaacgtagatggattttttactgttgttatacaattgtttactgacaaaatagtacaggttatggaatctatatcagttctcttgaagagcaatgggcaatgggcaatgggaagaaaaaaaaattatgtcaattatgaggctagtgaagaattcctactaaaagattacaagtatgaacaattcgtacagattcttctctcttcatttgtgtgcgaccccacaaaaataaccctgtaaattctgtaccaattagatggaatacttctgataaaaatattcaacgattcgagactatttttttacttgcaattgaagattaaagaaattgattttaccacatatccattattcgtcagtacacatagtttaacagcacaacaactgctgcaataccaatgttcacatcaaaaacaacacatgatcaacaaaatttgggaatgcttgagaacaatgcatcaacaatcgaatcatacacactgggacaaccaacaaaggaagaagaagaaactaaaacagaagaaggtgacaacatccaattcgacatagttgactctgcaaatcttgttgctaaagaaatggtatgagaaattggaaaacaacagtaaaaaaaatagatctagaggttaacatcaacaacgcaaagctcataacaaataaatttcatcctgaaattaaaaaggacaagcatacaaagacaaagaaacactcaagagggtactgagctactacgcaatcaaaaataacttccaattcaaggtatggaagtcatgctctcaagaatgcagtctgaagtgtatttatgaaagttgtaattagtctctacgagcatcaaaaaatgggccaacaaatacatttataatcaggaggttctcaaacatccacactttgtcaataaatattagacatgaagagcaaagacaagtaataacaaaattcataggagaatgcatcaaacccaagtttatgaacataaagacaaaagaaacaccacaagaaataaaaggagaattgaaacacaggtacgaaattaagatgaacttcatgaaagcttggagaagcaaagagtatgttgtaaaagaggaaaggctaaggaatcatacagcctgataccaagtttcttacacatggtgcaaaaatataaccctggatcagttgtggatttgaaaacagcaaaagacaacagtttgctgtttgtttttatggctttggatgcttcggtaaaagtgtggaaaacatgcaggccgataatagtggtcgatagtacattcttgaaagcatcttatggaggaacatttctgtttgcatgcacacaagatgcagcaggtcacatatttctgcttgcattctatgttgtcgattcagaaaatgaaaatcttgaaaataatttttcaaaaaattaaaataagcatatggtgtgagagaaaaataatgtctaattttttatagaaacgagatcacgatcaaagcagtaagaaaaatatacacaaaattacacacgatatcacctactgaacaacctttaaaacatgtactgctaagtacaatctaccattatttggagcagtgaaagcgtacactaaaaaatagtttgagtaccacatggcaaaactagatggattggacaaatgtataagaccgtacttgaaaaaagttagttatgagaatttagccaaagattcacagaaaaaattagagatattgcaccatgacctctaacatagtagaatcactaaactcgataaatttagcagcaagagagccttcaattacaacactgctggaatgcttaagagcattagtgcaacaatatacacatagtaatgggataaaagtacaaaacacattcattggcaccacctgcaggatagatgctactaaaaagctagacatactcattgaacctggaggtgagatttagattatgcagtttaaattattaaacataatcattatggggcataatagtttttctagcattgttgtagggttgttctactattattctttatgtataataaatattagttttacataacacaggtaaaatcaatcactgattatttatttgaggtaaccagaatgaaagaatcatggatagtagatctcaaagagagaacatgcatatgcaacaggttccaaatcgatgaaatgtcatgtggacatgttgtagccgagttaaaggagattaacatggacccataaaactactgctcagattactacacaa

SEQ ID NO: 327063 - DNA, 1171 bp, Cannabis indica
gtgttgaggtaagaactcttcgacgatattattgactggaaactctatatgttatattgatagaagataagaagaaaataaacttttaaagcttaagagtaaatttttagagcaacaatggtagaaaacatgactattctattgataactcgtatgactagggttttaaattttccgttttataaattttgaattttaataactgttataataatcatttttatatagacacactaatcaaatttttaaaaatctatcctaaattaatagtattattaatattagatgtacacaatttaaaaatatgtgatatattgtttaacgtttagtaatatattaaattttgaaagatctacaactaatttaaattcaaatcttaacttttatattattattatattgtattttttattaaataaataagctagaaaaaaaaatttaaactactacaacattatttttaatcatgaaaattacataaagtattattaacgtaaatttttattaactaattaataagtcttttttcgtaataaatttgacacggaaattataagaatttgagaagaccaatagaaacaaagatgacactaggtttttacgtggttttgcagttaagtctgcatagtccacgagtctatcttattcaggtatttttgaatacagaattagggttttacaataagtaaacttctttttttttctaagattttcgtccccctttttttgtatgatctgccccttatagtaatataggtagacagttaattacatttaaattcaaatttcataacaatattccctgaaattgtgggcttttaatacgctccatttaaatacatgtaaattacattacacagctgtgatttaaaccacctttaaggaaatcatcagtgacatggataggaactcccttccaaaggtatctcgctcgaggtacctcaccttgtacatagatgacttggtttattcatataccttccaacaatggcatgagcactagtgtaccgagcaaagataagaacaggtatttgaccataaggccttgcagactggacaatcatgtcctccaagttctcgagttattacactttgttactataaatgcctcactatacgttatctatgtttccctcgggtattatgccttctgagacaagatggtttctcg

SEQ ID NO: 327064 - DNA, 661 bp, Cannabis indica
ggagagagagagagactgacctgctgccaatacttatatagagactacagatgatgttgtcttcttcttcagagaatccaccatgtttgatattaggtctcaagtaattaagccacctcaatcgacaactctttccacatctcttaagccctaattaattaaacaaactaaaatcaattaatacccaccaaattaattaatcataataatatatataattaagagaaatatatataaaaagcatatataccaattttttggggaagagcaatccaattaccaccagtgccataagtatcaatataagccttaagcttagtatcctcttcaggtgaccatggtcctttcttcacattagccttatcacaacatggagccctacccatcttcttgattgataatataatatatataaatatatatatatatatgatctttcttcttcttcttcttcttcttctttcttctttcttctttcttgtttgttgttatatatgttgataatatttgttgttagtgagtctaaatgtttagaaaaaaaaatgaagaagaaagagtagagatttatagttaggaatagttgttgattgtgatgcttattattatgaggacaaaaagtcttactacatctgcctacctctctctctctctctctctcata

SEQ ID NO: 327065 - DNA, 897 bp, Cannabis indica
actctgcttggacatcttgctatttatgtacaacttggactttcatatcaatctttacaggctgctaggagtaaaaccatctgcccaggttgagaattgtaagacatgtgtcatctagtcaggtgccacgtcatagtgtaaaaattagaataacatttgcccccaagtctacaggaccttcttggtcgcacgtggacttcatttaggtaggaagttgtctagatgggtgacgcgtgtcctggttgttgaagttgatccgatgtgacttgaatgagagtctcttcagtgtttgggcattaaatgcctcttggaagttgtaccttgagtcacgcactgacggttgaggggtacaacatgcatgacatctgtcattcataatgagtacttaatgtacacttttgggtggaaaatataaattttgaatattgaatgaatcaattttctcttttaggtgcctgtaaaaggggtttaaaccttcgtgggaaccattttagctttttttattctcggagaactggagcaagaatttttcttcatattttactctcaaatctttaaaaaaagttgctggaaagtatattgatgttaccctccaagcatatcaaaagagcttcgaacagtgaataagttactttccctttactttatgcaatattcatttaatgtatgcattattttctagatttcttgctgcaaatttatatgttcttgaactgttcttgactaattatagcatagatgaaattaaggcttgaaattttgactaaccttcgattataacttctgactctcttaatgcatatcaattttgacctaaaatcattcatttccacctattcacggaattctaaagatttccaggtatctttcaagggtttgaactgttggaattatttt

SEQ ID NO: 327066 - DNA, 629 bp, Cannabis indica
aaaggatttgaagtattactgattggttaatcttgaagaaccaaagcgatatttggccttctatttatttatggcattgaggaagattttgagttttaatgtgtctagaaaaatcaatatattattgtgggaggagtttcaatggaggtcttacaatgccgcaaagaagaatttagtagaaaattggcccatgatattgaagagaattgaaagtcgggctaaggattacccgattcggggaatgattccagtggcagaggaggtcctcaactcaagaaggatcctattgtctctgcacttcttaaactttatcagaattaattaccaagccctattagactttttctgtttcaatttgttttgtcgatcgagaaatgataaattgttttgtgtttattttagttttatgttcatatccattaactcacttttattcaaagttttgtattgtggttattaaatcatctctgagatttaggttattaaagtttataattgaaatttatttttaattaattaaaattattattatatttaattctattaatataactaattaaattactatttataatttttataatatagaaaatttgaattaaaaatttaaatacatatatttttttaaa

SEQ ID NO: 327067 - DNA, 919 bp, Cannabis indica
ttttggaattatttcaaaaatatacaaaaatgataaaagttttatatttttacgaattttttttttttaaataagaagggctgtttttttgttatttttgaaaaaattattattttaacgttactattaaaagaaaaagtgacaatttatttaaacaactaaacaaagttttatttttttttattattttaaactgcaactgaaaaataatgtaaaaaaagttatagcattcaaataacatttctcatcagtacttttttcagtttgccaccgaaaaaaaattaacatatattttcggttataacagtacaaaaatcaaaactataatgtgtacgtgtataataatttatcctatttaaaatgaaaagatagattttcattattttggataagtgttcttattttgaataatagttttgactgaattttttaaatttatatatatatattattttgtggtctcaaatttagacacgtgcattattgtcagtctttttttaaaaaaaaaaaatgattttctgggtatttaattgtaagaaatgtcattagtttgctggccttctaatattatattattttagattcaatcggatgagatagaattattgaaatgaaacatttgtgggacattcctccatctcctggattatcctataatacattataggataatatgaataaatatatattaatatgacttttatttccatataaataatttatatacatacatgtagtgtgatcatttttcatattactaaaggaaaaaagtgcttccaatttcaagtctattccccatgatcggtaactcctcattatttcttataatactattgtgtgtatttttatttgtaaacttgataatatatatatatatatataaacatatatatatatatatatgctagatgttacgtct

SEQ ID NO: 327068 - DNA, 1831 bp, Cannabis indica
tatgtgatatcacgtggaaaccacgtgaggggaggccgtagtcatggcgcctatgacgtgacgtggaccattttttcgttgaggtgggacccggccaagtaggaagaggcctgagtgtgacacgtgtcattgagtccgtacagtgaagaaaatggaagagttggtgggacgaggaaaatggttggagggaaaactgagctgagccccctctcctcccaacacattatttcatttatttataaaataaataaattaaaatgtgaaacgtgtctcctcaactttatccacttttaacaacctcttccaataattacacttgttctttatgataaataccattaatgccattcatagtaataagaatttttttatttaagaaaattgcctataaattggatgtgttgatttataatttggtgttttaatattttttataaaattttgtgaaattaaaaataatttaatgtgtcaaaattaaatttaaaataatttcttgtattgtgaaataaaatgtttagatttttttttaaaacttcacctaaatcgttaatataaattttagttgagagtatcaaaagaatagaattgagagaagtaatttggtaagtatatttaaataaatacaataatggtaagaatagattagattgaattgaatctaaaatagaaaatttacatttaacgtgaatttgatgtactatgagtaaaataatacaaattaaattagataaacacacttattactaacatatacttaaaaaaaatatatatcagtatcaactcaaataaataataaaaatataaaaaattctactataatgtaatgattataattcatttgtaaaatttataattttaaaagcataattataatatttgatttatttttagatcaaaataaaatctggaacacattctaatctacttaagaaaaagttgacacctaaaccaagaaacactaattttaaaaaaaaaaaaaggccaaaaaattattttttttggtaagggttaaaaaataattttaaaataatgtaatataaatcaataataagtaaaataaaaaagttctccatattacattagaatatggattatcattttgttttattttataaatacaaaaaagaaaaaggaagaactagaagtgagattggattgagggagaaaagtgtaaaaaaggttgaaatagaagggtaaaaagggaagagagtatttaatggttatccaaaagccaagtaagaggtggtgtggtcggacaagggcgtgctgtctgggtcacgctcaccgagtcaagcttctttctctttctctttctcttatctaaacaattttcccttttcaaaaattaacccaaatcaaattttattaattatttttttaatattttttttatttatttaattttcgtctggggaaaataaacgcctacttcacccttttaccaatccccagctgtcatttattagcacacagctcatttcatccacttctaataacttaatatgaattctcttttttacccctctcttcttccatctatttaaaatataataaataataaaaatggtatcaaactattgatttaaatgcatattccatttccttatgcccattcatcctatttgcccacgtgacttatttcataagggaatattattagataatttcataatattcgattcttcttgtttatatatatatatatatagattatttgcggcaaaactccttaaagtagggaagttttgcaactaacctccaattctaaaatttttgcggtaaaactccctaaactcaagttttgttagcagttagccatttccgtccattt

SEQ ID NO: 327069 - DNA, 1040 bp, Cannabis indica
gaggatgttaaaccttcaaatcatggacttcatttccacattaacattaatataatttggaccatgtgccttttttaattattataatgtttttgaattgagctagcaatattgttccatattttatgaatggttaataatttttatgataataaattaaaatatgtaagagttatagtaattaattataccaataatagtataatatctcttagtaataataataataataataataataataataataatataattttaacattttttacttgtaaaatctttttgattttgttctccaatgtgataatgaatattcatataagttcaaatccagcccatacaacaacatgacatgtaatccaataatctgttacataattaaactttgaatattgaaataataagaaataactatgtatgcatgtaaaggcatcttctagttcaccaacccaatatatagatctatcagagtatatttatatattaatttgaaagtaattaagtaataataattattattatcttttgtaaaaaagaagatatttggggtttaaagctaattttttttttttttaaaaaaaaaataccatgtaaaaatgtatttgtaacaaataaagcacgtgagagtgagagaatcattttgtaaatatataacaagtgacaagaaataaaataaataaatcactagggaagataaatgtttttctagcgttatgggactataataataataacataagcttgttaatatgatttattaatattttggatttgtgtctttgcataagttattaattgaatataatttattttgttaaatgataaatagatcttatattttacaaataagtaaaaatgaacttaattttgttaataacatctttagattaaattattattaaattttatttaactaaaaatcagttcatgatcctatttgtactaatttttgaaaatatagggtcctattttatcatttaacaaaacaaaggtaccaattgttaacttttgcgaaacacaagatctaaaatagtatt

SEQ ID NO: 327070 - DNA, 796 bp, Cannabis indica
aaaaaaaaaacaaaaagaaagaaaatcaacaactgactttaaaaaagtttaaaatagttttttgaaaaattaaaatacaaaaacaaaaatattaagtaagaaaagtataaatataattttttttttatcaaagtataaatataaagtttattaaaaaaaattagtattgtccacaattttttttaaggaaccctaatacttaaaacaggaggtataccaatgaaattaattggaatatatgtatatatgctatataatatattaaaaaacgatccgatatctgcaaatgtatatagaccaaatcaaggaacttcatgcaacattcaaaaagtagccttatttaatggtaagcctcttaaatggaatattattatgaggagaagaaactaagatgcttccttgaattatatgtatttgagatgtatattacgctttatatatgtttacataaagttatgatgtatttaaaggatcatatacagtgacactttttagaccaaaaagtataagaaagtaaccaagtgttcgtgagcggaatagcaggattttttattatttttttttcttttcttttctttatcattgagcataatatatatatatatatatatataggtagggtgtgcataattgatctaatccaatgtgaacggaccgattcaattacaaccgaccgccaaacattggatatccaattgtgatcggatcggattggatgttattttaatatccaattagatcggatcagatggtggagggggtgtactaaaaatccaatacatccaacatccaatcg

SEQ ID NO: 327071 - DNA, 1282 bp, Cannabis indica
taggtttagagttatatgtttttaaaaaattagagaagatttaaaattagatatttaagtttttaattgatttatatattaaaataataataaaatattaatttattgatttatgttttaataaaatattaaaatggagagaattaagcaaaagagagaataatagttttagagtgattttagaccgccacgtcacgagatcatacttctcctttatatatagatatataaataaatacatagatatttcatatatatccatgtcatgtgtgggtcaacatctatcttatatattaaggaaacactcacacacaaaataacatatattcgcaacattcatgtttcctgacattttaattatttgatctcaacaacaatggggtaataatgaaaatataatttctagggtgtaattgtacagaaaccttttgaaaaggccatatcggtatactttaatgattttggtatttagaaaaactttttagtttaatttctttttatttcatgattaatttattcattttaattattttaagatcatctataaaatttttaaaaaataataattaatttatagtattaaaaataaaattcaaatatattgttatatacttgagtgttttttcttatacatatagtaaacaattttatttttctcactataagttattcaaaaatattttaaaaatttacaaaagattttaaataagtacattactcatgattataaaaacgaaatagacgaaaaaattattctcacatgtcgaaaaaaaataaaggtactactagaaaaagctttattagtgtcagttttgaactagtatatactctattagttacaataaccgacgtgtatgctacagacgcaagagaaacatagcttttgtgtcgattgggaaccgacaataacagtgcgccaatcagtttgagcactatttgcgtcatttttgcactaacactgttatagtgagatttctctcacctagaaactcgagaccagactcctgtttggaggacacgtgtattcagttttccaagaaaagctgagatgtccatgagagactcctcgagttgaaacctcgcctgagctagaattagcgagatgatgcgagcatgatcaaagtctgattgcataattgtaactcgcattatgagggaccagataacggatccaactcgcatgtatcaggatatgtgcgagtatcctctctatattcctgcgaaagcatagagatcgattaatctctataatgcgagctggtcccaattgttgggttttatg

SEQ ID NO: 327072 - DNA, 741 bp, Cannabis indica
gaacctaattcctatgaagaagcaatgcaaggcaagaattttgggaaatggttaaaggcaatggatgaagagatgagttctataaggaaaaatagaacctagaaagtggtaaaaagacctgctggaaagaatgtgattgcttgtaaaatggttgttcaagcacaagaaaaggatcaaaccaggtgatccaacgaggtacaaggcaagacttgtggctataggttttagccaaaaggaaggggtagattatatagagatattctcacctatagtgaagtataaaataatgagaataatgttggttatgcctacacagtttgatttagaggtagagcaaatggatgtaactattgctttcttaaatggagaactagaagatgatatatatatatatatatctgtggaacaacctaaagagtacattaaaaggggagaagaaaacttagtatgcaaaattaaaacagataaacttatatgaggaataaggtggaaattgttggaataattccccatataaggtgacctgtcataattagcaaatggatgaagttccaatggttacattaaatatgtaactatcatggttacatttttttttttagctattagattattattgtaatgattgtgaacttgtgattaatttggaaattaaataaaaataaataataattaacatataacctaatagtcacctaataatttatttccttataaaattttaatgaagattaattatat

SEQ ID NO: 327073 - DNA, 1902 bp, Cannabis indica
  modified_base (124)..(124): a, c, t, g, unknown or other
actcaatttgattatattttgattattagtgttgtacacatagtggaaagtaagtcaagattatgtagagttaaataatacctatgatttatcagtacacacggagtttctactgatatgatanactgcaatgtagttcatttgcaccttgaataagtggtatgtcctttcaagtgttggggattatttcaccaggatctagatttactaccatgtatgttgtttaacatcctaaacatgaatttctaaaagcaatagaatttaaacacatataaagttctagaaaccttacattggtcgcagtggattaaatgactcattccactcatatctctaaccctcgttcatttctgtcgcaacgtattctcaagatctgagcccgattctcctttaggtgttggagtcttcacagtcttacacacagtgattgagtacatacttgctatgtgtgggcatgtactctatcactataagggaaaaaactttaaagagaaagagagagagagagaaggattcgaaatagagagagaagagagaaggctcaaatttcactgaaggcttaagttgcatcaactgttagttttgagtctatcactatctatttataggaattgaggaaaatttctaagaaaatgaaggctttgcaaggcatgaagtcaccatcgaggagtaaacacatgcaaagtcttatgggacaaatcgctaccctaagcagatttgctcaaaatccattaataactgtgtcccattttttaacttgctacatggaaccaataagggatttgaatggacttatgaatgcaaacaagctttccaagctcttaagcataacctggcaaaaccttcgattctctcaaaagctaatagatgatgattgagttattcatctatttggccaccactgagcacacaactagcgttgttttggtgcatgaggaatattgtacacaacaaccagtgtactatgtcaataaatgtctcattagggctgagtccaagtatccccccattgagaaattggcacactacttagtactagcctctcagaaacttaggccatacttacaagcccgtctagttaatgtttcaagcaaccaacagcttaggaaaatcctacttaagctagaagcattaggatgattacctaagtgggcaataaaaccgagatagtttaaaatttcatatcatcctttaatagcaatcaaaggccaggcattggctaattacatagctgaatgcattggcattgacaaagacaatcccatggtctgtgaagaccagagtgcaacgcttgagactatagctcagatagactctggtacttcctagaagctttgtggggatggcttgtcgaatgaccattgtaacgccctaaactgtagggacaccacgtgtgcgtgtgcttttataaattaaactataattataaagtgcaatttatttaaaacttttggaattaaactaaaacttatcttattattcaaaatactactagttttggggatcccctgtttaaaagcacttacattacattacaaaactgcttttacaatagagggctatattttgaaaacacggtcaaaagggtggatcctatccactggaagcgaagacaccgcaattgatatgtacatcactgggagacatttgactcatggttgatccactttccccttccctatacctgcaccacgaagcaccagtgagtcacaaagactcagtaagaaaagcaattaaaacacaaacaatgcataatataagaaatcacaacattacataattaacacacttatcatccaatattaacatttattcaatgcatattcaaacattacataaacaattttttgtcttataagacaaattgactttgatgcttcataaaacatccttaccactcgt

SEQ ID NO: 327074 - DNA, 757 bp, Cannabis indica
cgcaaccacgcaacaaccaccctataactattgtctgattatgtaagtgatattttggtaattaaaatcatataaaatgtataaatgttgtccacacattataaatgtatttttgtaaataaagtttcaatttatatttgttattatttaaacaacttaaactgttatttataagaatttttttattagtatgctataaaatataaaataatactataataatactataaatttatattacaaatctttatacataaagatataccattttgaaaataataattacgtaataaatgatccaatattgaattcattcctaattattttttaataggagaaatgttaaaaggtaacagtagtgcctagcactttctatgagttaatatcactattggtccaattaagtatcgggtcccttgtaatttaatatattaacttttaaaaagtattgctagtcacaacgcgacattcgaaaaagttttagatactactaatgcctaataccaatactctttttatatatcaccagtttctaaaatctatatttgttaatgacaattattttatgacgatatattgatattattaattgtaaaatcacttaatatataaacaatatcataaaatgtaattaaaacttggtatatcattttctctatcaatattaaatcaaaaaaacacaaactatactaaaagaacaaagttaatattgtattaatataaaaatgagaatatttttaggctttctctatataaa

SEQ ID NO: 327075 - DNA, 1985 bp, Cannabis indica
aaatcaaaagcaaaggtttcacccagaaatataattttcaatcccagaagttcaaaacttcgaattggaatctgattttcactaaagccctatggatgagtggaaataaacattgtaaggttaaattcaaagcgcagtcagacaatcagatgttattgttaaacataaatgagatttttgagtcctaaccctatgtattctatggttgaccgagaacagttcaaaaataggcaagattcatagaaaaaaaatccaaaaattaggcatgatttcgttgcaaatgtgtaaaagaaagaagtcaagaattcactcacttgtttgaagctttattgcttttcttggaagaaatcgtcaaaagttttcttgtgaattccttgaagaacttgggaggaaatttagccaaatgtttttttgctctgatgtttaagagttgaactagctaaaaggattactcgagatccttgatcttatttataagtagtctgaaaaaggaattaatcatttcaatattgaaatttcttgaatctccccccaaatgtgtacattatgtactcattacagggagtataaccgttaaacacacgcaagcatcgaatcgtgattcaaggtaaaaccgtcaattagcattaaataggaagaaattgaagagacccctagtaagggtcacattagttcatcattcaatatctaggacacacatcacccatccaaacaagactccaggctgagtgaattccacgtgaacctaggaaggtcccacgcagacttggggataaatgttatcctattttttacaccttgatgtggcaataagaaggggtgatacgtgtcccatgtttttgatacctgggtggaggaaaatactcctagcagcccaattatggttggttaatatccgtagtgctcagattgctgagcaggtttatgaggtagttgtccaaccaaggtgaagacatgtctataccgagcggagtatgaaaggtgacaattttagagattgatctcgttgtgtccagacgcaaagacaatccctataatggcaacacattctagtttcctattctttgcattataattatagaattaatgtagtttcctattttactcattataagcaaaaggaaaaccatccctcatgtattaagtccctataaatagtggtttaacctcactatgaaggggatcgataggattactgcaaaaatatactctagtgagaaaggagttatttaagagagaaagttactcagagatcaattataatggctttcaagaggaagaacacttttcttctctcaaatcaatacaatacaaggggagtaggctattgccattcttacggggtcgaacctcttcaaaatttggtgtttactttattttattgtttttgctttcttttatttataatccctttattttttactcactgtcgttggctacaaccgaggtcaacacccatggttcatcacatagtgtgtttctttttgattgtggtgaaggacattagtatgagtatgcacctcctataacttctttcagggtctccaaattagtgttttcccctagattgacttggggttctcccaaagattgttgctcgatacctagtggagtttctccagtatatacctggctactatttcaagtttcttgtgtggaaggagtaagcccagccggaggggttgtcactcctggcattgttggtaagggaactcgtggaggtagtcaatgtaattgggtgaggatcaccattgaatcccttaaatggtgggaacttgaacattgggggtccgtcaccatcagattagttgatttagtggactgagaccttcttgttaagaccatcttttactgagttgaggagaatcagagaattatgaaatcgtatctttttgttctcaatgaaagtacaaaaatattgacctcagttttagctgaccgttatccccgaaatttggctttcacttctgaggaggacacgtgtc

SEQ ID NO: 327076 - DNA, 1153 bp, Cannabis indica
attgaaaaagcactgtagcgtgccttagcattagggttttataaaaagaatcgctgaagatattcaaatactttccttaaccgtttccacaaagataagaacaatagaagatcttcatttcatgagatttgacttagcagaatgagaaaatcatgggattcatattcaaatccacactgatcattctcctattattttgggattaaatgtattctatctctcctttaaatagtgaggtcaattcactatgggggagttcttttttacgcactttcaagagagaacactttgaaaaaatatttgtaaccttttttaaagatactaagaattcacctggctggaccttgtgatcttaatattctttcataagtaatacaactaaaaggggagtaggttgtataccattgagaagagtcgaacttctataattttcgtgtgtcggtgacagttattcataaaaatcccccccttttgtggtattttatttagagtattttttatattttgtgggactccaaaattttatttcattttaattgctaaagttactataatttgtggtgaaattttttttacccataaatttaaaagctaacttattttgggaattttgatttttttatgcatgttttaagagttaattggttaggaaaactaaaactataggtaattgttaaaataagcacattttacctaaagcccaaaaatacccctctcaaaatcccacattgtttctctctccttccctctctattctctttgcctcttcgcccgacccatcgacaccccaatccgcagccacaaccactattctgatccacactcaccgtcatcacaaccgcatggaggagacacaccgtactgacacacaactacacgaaggagaaccaccgccaaaccccgacaatgtgtaaggtaaggtgaaaatcaaacattgtgagattaaagccagaatgtcataaacaacgaaatcatatggtctactacagtaaaaattacaaagtatcgagcctagattctctatatatctcctacaacaagtcaagaacaattctattttctacaatggaaacccagaaaattgaaggtacaaaattgttacgaattttatgtttattacgcaagtatacgcaatcaagtagtatctcacgca

SEQ ID NO: 327077 - DNA, 1263 bp, Cannabis indica
taagggaccctcgtcatcagtagctccttcaaatgttcaaatcccacgaaaggctcaaagacagttgtcaacccacgaaaatagcgggatattatcctaaaaatcagactccaaccacctccaaaaatcaaggagacggttgagatagctccgcgttggtcgcgtctcctgaagcgagaagcaccgaccccctcccctatataaggggtcacccatgacctgggagggggatccacaatccgaaacacttagaaaaataaacacttctcattctttgcaatcaagagcttgttcttgacttttgcaactcagattaataaaactcaaggggagtaggctattaccgacatccggggccgaacctctttaaattccggtatcttttatttacatttattgcgaattccggtgttattaattgtatttattattgtgattttggtttaaatctcatttattacgactccgcgtcggttggctaaaaatctagtcaacacaactccaataaaaattttcaaaaaaaaaaagtgtcaactcctataactactcttatttttaaaatattccacggcaataaatgctcattttattttatataatataaagtaaagtataaaaatgatgaagtgtggttctctaaaaatttattttacaatatttaatttttggttaatttattagttaattttttttaaaaaaaaaaaccatttataataataataataatatcactttttttaaatggataataatatcaattaatatgattatcttttttgtttataattcattaaaaggctttaggaaaaacgttatctttttttttttatgaatatgaaaagatcattaacctatattaataaataaatatgtgtataattaattaataaatatatatttatcattaaatttcttaaaaattatttcttatataatatcacttaatgttttaattttcttttcataattctattaccaaaaaaaatatttaacgtttttcactaaaaaaatatatggaatgatgatacgaatatgaacagattttattatacaacaataaattactaacaaaactagcatctctacaacttcatatagagaaaaactaataagtacacttatatagatatattgttataaaataatataaagtaaatgagagggaagaagaagaagatgaagagagaaagagaaagtgaatgagaatttctgagttgtttattccaatggggtgaactcctatttatacaaatacaagagtga

SEQ ID NO: 327078 - DNA, 784 bp, Cannabis indica
aggtaaatgtcgaaaatagcactgtaaaaaaaccaccatttaaagtgttatatgaaaaagcattcaacaagaacatttttatttcgcaaaagtaaatttagtgccccaaaacatgattaagacgaattagagaggaagtttacaatctcttcttctcttcccaaataaaatgatccgcctgaaccattaccatggaataattcaatagagtggacatagtttataacttattaataaatgcagcatttgtgaaccaaaatgtgatgatacgaagttgaggcgagataaggtcacatgcaactatggttaattcctactttctgtgcgaataagggtgacatcacttaatggcaggggacatgcaatgcaacaaagagtacaagacgaaagagaacaaaaggaataaagaagataaagccatcacttagtaaaattagcaaagtaacttctaggacagaattgcaaaaagcctacactatcagcgtaaaagcaatagatagcatcaatcttaatcatacttgcacataatacaaacacaaaaaagatgaagatcatatagcatctacctatccttccaaagcaaatccagggtattcaactttcataagctaaagttcacgcaaatacttgtatgacggtaaaattagcagcacccaaaaatcaaaggaagatgattcacgtaatcaaagaaatgaagagcatttggacacaaaagaagtattcatggaccacaactattaaatggaacttacgactttccaatgtctatccgtcatggaagtta

SEQ ID NO: 327079 - DNA, 1054 bp, Cannabis indica
gtatattattataattatatttaataaaaaaattatctttaaataaatgcacccatttacattaaaatttagtctatgtgtgttattacaggtagctaagtgcatgtgggattgacggagtttattgcacaaatatgtttttccacttgtttgatatctgctcctccaaaacctaccaagtacaacttccaaatcatatatacagagttaaatgtgtttactacaatgagaaaaaagtggtgatgagatatgaaagtttttggcacaccatgtcatttacaaaaataagaatgaaaatattttcaactaaaagaccaataagttgtcagtattgaagcatcaaagaaccgtgaagaaagctagatcttcaatcaaaatgaatatatgataaatcacaactatcaatgactatcaaccaaaaattttctaataataattgggtaataacaaccctattattctatctagaataaaagaaaataaccaaatgaccaatcataaaattaacaatcgcactgtaaacttgttgggattttatgccctaaataaaacccatttcaatataatctgatttgttatcaatagaagattagaagtcatttatgtttacatgtatttttcatgtttatggtttaatatacaatttgtgttaagtccacaacatatagttattcacaattatagtgatatcaacacagtagaaggtaattgtgattatatgtttcaaaagataatgtcccatgattcatcagtgcactggatttacactgatgtgatagtcagcgataaagcttacttacaccttggataagttttatgttctttccagaacattagcaaaatatgctagtatcgaatgtatggagtatacattggactgagaccgatattgatcttggtaaagatattataatcttaccattgtatctttctaagtcaatatcactggttgatcttagatcaaaagatcataatcctgacatcgttaggttcgatctcaagagtgttatttgtgttcttagagttgttagttaaagcctaccatttggttcgg

SEQ ID NO: 327080 - DNA, 1256 bp, Cannabis indica
atgttgcatagttacatgattactttcataattttatgtttattatataaattctattaaatcccgaacatataattattcatgattatagtgttatttacacaataaaaaataatcatgattatatgcctcaaactacttagtccgacaatttaccattgcactggatttaaactgacatgattatcagcgatgtggcttacttatttgtataagtagaatgtcctttctaaagcgttagcaaagtagattagtatcagatgtatcaactatacattagactggaccaatattgacagtggaaaagatatcataaacttacagttatttattttttaagtcaatgtcactttgttgatcgtagatcaattgatttcaattatgagatggttaagtgctagcttaattgtactatacgggttttttgactcgttcgttaccagcttactcgtaggactagcccatacttacatcttggaaatttgttagtgcaactgagtgggagcgttaatggagcgttaatcataaatatggaatctatagcttctataactagtagaagtgaaacgatggtttacttagaacttagcttaacgcaataaatgatggagtgctcatttcagtaattatattagtttactcaaatatcatttacaagtagcaaagtgttttaagaataaaatacattaaagggtaaaatggtattgattgtttagattgtaacaatgaataattcatagcgtaactatatttagtatatagagcattatatgtaatcaagagtgcaattttaaatctacagtcgagttaggaggaattaataaactaactgagataatatcattttgtagtcttaattgattgatttatttaatcaatttggattctaaataatgagtatgccttatttgtgaatgtttacccaaattttgatgatggtgatgtggcaagaataacgacacgtggcacgaggataccaggactggattgatgaagaatatgtaaagttatgactattggtatggactattagtcatgaccggttgtcatgaccgctgaaagagaagtctaacggtcacctctccccctagcttgagccaggtggctacctcgagggggacagtggactaacaccctcatagatgggataaacgatcactacacacttacaaggtcaaatcagtctaggggtagatggcgaatatggcacagttcatgacgttaaggttacccacaacgtcgaagatcaagtgaaa

SEQ ID NO: 327081 - DNA, 1117 bp, Cannabis indica
atatttttttgaatttgctcccccaattttagtttactccttcacatagtattattttggggaattcacacaactatcagggcggccctgaaacaaagtgggccataggaaaaaaaaaatttgggtccttttgttagaaaaaatgtggtatttttcaaaatcggtaaaaaaaatgtataattttaaaagaagaaaaaaaaaattttgggcccctagactgggtgggccctaggcacaggcctagcccgcctatgcccagggccgggcctgacaactatacaccattatgaacttaattataaaaaaaagttttattgggtaccagtgatgctcagcacctttcataagtctcactttataattagttagcgatattttttacaacttattttcttaagttatatgacacccgctatttaattccactaataacgatatctgataattttttttgttgatataccgaatttcaatgatttgtaacttacataatattaaataaaaattattaaatttaaaagagtctatatattatgaggtatctatcttatgattatctttgcattgtatatagtatagaaatttttacatcaaaaaaaccctttagtatatgtagaatatataaattcttttattattgaacaaaaagtctaaaatatatacagtatatagtatattatcctaatattgcagatgtataaatacacaaattcctaattagaaaaaaaaaaaaaatttttttaaaaaaaaatgatattaattagtatatatattttattagagttaatatatatataaataaaatttaatatatactatttagtaatatttatatatttatataaaattaaaatataagacactctaaaaactttaaaattatttttctcttctctttttagttctcttcattttataaatttttaattttattcataaatctatttaaacctacatctaaaagttaacaagtattttcatagatatttattgaaagaaaaaaattataaagtaacaaataaatacttattgaaaaaaaatatacacataacaaataattattttttattataaatatcttttataataaaatctatatatacctaattatattttt

SEQ ID NO: 327082 - DNA, 940 bp, Cannabis indica
gaagtccaatgaacataatgatcttagtattagtagtactggttttcgggactacctttactttactaagccaaaaatcttaccatctttcaatctaattcttgggtaaattattggatgagaagaatcatcatcatcaccatcaatatgtggagatggagattgatgagtagccatgaaaataatacccaaaacaccaatcaccactctcagagctgttcttgaaacaagacctgaattttaaccaataataataactacaagaccaaaataatttatgggcaatcaatattttcccggaaagtgaaagaaaatggccaagaatttttgctcacctgacattattagtacagcagaaatttctccctttaatttgacttcaaacagagtttttttttttgcttgtctggctttttactattaaaaaatacacatttatttatttttttcaaatcaaatagatgaagtatatataattatatatattaccactaataataaaaaataaaaaataaataaaaattgagtttgggtttatacctaagcatgagaatattcttgtagtttttccaatttaaatgggattttcttgtatttatccaaaacatttcttgtcccattgaatgtcttctattctagtcaaattcaatttcatgtaaacttatatttatttattattattttgtctaaaaaaatgaaaagaaaaacgtgatttttattggaaaaaaaaaagaaaatttacacaatatacttaaaacgaaaaaaatttaatattttttacgattttttttatttatattttacggatttatatttttcaaatatttttttatgttgttcaacattatattatattttcgcaatgtaaaaataataattgttttaaaataatttaaaaataaattaaaatatctgtgaaaatatatatatagaaaaaaaa

SEQ ID NO: 327083 - DNA, 582 bp, Cannabis indica
cattggaacgcgacatttggccaataaaattacattttagtatttttatagtagcgatgcaacttatatagacattgagaatgttgagaatattcgagatttagaaatgaccaaaatacccctaagtgacaaggttgctttttggctcagacaagggcgaaatggtctttttggccttttgtctcttttgtgttttagtgatttattttaattaataagctgattttaaggttaatataggataattagagaattatctcattttacaaaaagaaaatcaagaaaatactctctctttctccaaactctctctctttctcgagctcccttcaaccaacaagggtttgagatttcttcagctcaaggttatagtgttccaatctaaggtattaccccccttagctccctctttgatttcttatgttctatgataggttttatgcatgttttgagttctcggttactgtagttattgcttatttgtatttgagtatgttgtagtttaattgaaggtgtttgagtagaatttaagttattctgtggcttggttttgtgtttggacaaggtttgagctttagagct

SEQ ID NO: 327084 - DNA, 1412 bp, Cannabis indica
ttagttttgtacagcgttctactaacaaggcgacgcattttttaacgaggtgttcttatgttttatcaatttgtgtttttatgactacaactcccctcatgaattgattatcttattaataaattgcaatatttacattcaaaaaaaaaaaaagagagaaagagctccccccatatttatataagcattgctatgagacattcacggtgcctagcaccatgatgaagtatcgtaaaataagtgggacacgatattaagttgcaccaataacgatattacacctcacatggtactaggcaccatattaatatttctctatttaatatttataccactttctaatttctaatatccttccctcccttctcttatttttattgtatttattttatatttttaagttaatatttttattatttattagagcattcacaataatttttcaaaaataaaaagctttaaaatatttaaagaatcgtattaaaaatacactacatctaaactttttttttggttttaaagtggccaaaacatgaaatgtcaccactactaaagcactaacataaaaataatattttttaataatttatacatactaattaatattaatactctcattaatcgtttaagtgaagttgtgttttatatatattattacttgtaatcttgtatcactaagattaaggcgtcactttatcactttaggaagttttttttttaaataataataaaaaattagttgaaaaaaatataattgtttaattgtttatacacataaaatatttggagtaagtgggttagttaatcactattacacatgataatacataattaagatatatatatttattctttacatgttatcatgtttatatacttgaaacaaagttgaactattttctaaggcaaaaaataaataaaagacaaagtcaccaaagacaagtgatatttattgtctttgccgtgttgaaaggtttcttgcaataaggacattgtggaccattttttatttttcataatccaaatattattaacaccacaattcttttaaaccctaaaaaaaaagagcaagaaatattaagggacattttgatgtaattcaccatcaaatctcacatattttaatttaataaataatataaaaatcactaactatttattatttgtcactttagtatggtgctgatcaccttaagatatctaataacaatattaaaataaatatataatttttacgaactatattttactttttaggaattatttttaattataatttcacatagcctaataaaaataataatatgtatttttcaaaaaaaaaaaaaacggtttaaattaaagtctgtaaaaattaactgaaaaattaatatattcgtatatttttattattttagtatatttataatata

SEQ ID NO: 327085 - DNA, 710 bp, Cannabis indica
tgatgataaattgtggctgcaaataatacactcctgttattaagatcaaaaaaagatatacaaatcttctatagcaacattttaaatcatgcatggtacaacttcattatctattgacgctgctaagccatagctgtttattagacatttattttatatctaatgtgtgacaatggacttctccacagaaattaccacattaccttgttctttgcttttagaattgatgtgtgtacttgtagtttttgacatttccattacttcttccttcctcactattaatcaatgaaattttaatgcagtcattttgggaaatacatctgatccttacttagacttcattaagaactatgtggtggggatcggaccttggaaggacacggttgttcctgtgataaataattacttacaagagcctaccgatcttgttgccagagcgcacgctcataacctacaggtataattttcatccggactttgtattttgatcattatcagtataatttattgctatggttatgataccattgtatttgataaagattccattgttaattttttatagtcgttatttcttctgaaagtcagtaagctaaaattagatggaaagaagcatttttacttttaaatcctctatatgtaaaatttgggtgatatctgaaaactttctgcaactagacttgttttctatgcattctcgatttttactt

SEQ ID NO: 327086 - DNA, 1091 bp, Cannabis indica
agatatattttttaaacttcaaataacaaaaaattcatacctaattaaagatattttttaaaatttaaataaattcaaaaccgattgttttatataatatttttagattagtttgagatatttatgcaaatatatatttttaaaacaaatacttaaaattcattatgacacatagatctccttgaattatttctttaccgttatcagtattaattcaaatagatgagaaaaaataataaataaaacaaaataattcatatagtatatatacatataaatatatttataaattgtaactaaatttttaaacacttactcaagtgcgtgcaagataccgttccgttgaacttctgcacaagccctgtaacctatatgtgtgagaaagattgagagagcaagatagagaatgcaaaataaatatctaataagatatacttaattaatctgttaaaaagagaatcctctaatttcatttgtatcatcaattcatctttttttaaaagaaataccaacaattaatttactcaaatatgaaatattaggagagaagaaaagaagtgaaaaagcaaagaaatagtaaaaagtgaaatacacttacacaaattaattttccataaaatcatgtatcttaacaaatgtgctcttctccaatttattattttaaagtaaaatggaagttttgtacatgcattctatttagtattgcattgaaaagttataataacaataataataaaaaaaactaacctgagcagtagaattataaacaacaaatgaaaaaaggaaaattgaaaaatttatttgcaaaacccttgtggcttctatcaaccttgatactaagtattgttgtaatctatggtttggtacatatttggtatatataattagaatatatcgtatatatgagagagatagggagagatatatatagttagattattatcatttataaatatatatagattattatcatttattattattattattattattattattattattattattattattattattattatctgaataattctactgtaagtatagtttatatatagtatttttttaaattaattaattta

SEQ ID NO: 327087 - DNA, 927 bp, Cannabis indica
cttaacctcacagtcaaaaaactgtttacccttaaggtacttagatctgagaacattacagcacagcgactgttcctcagtaagcagagcccaaccccacttggccagcaatgcctggttcatctccacagtctttctaaagccaagccccccacgggacttgggaaggcacaactggtcccaggctttaagacagatgcctctattaccttgttcacagccccaccagaagtccctcaccataccatcaatcctagatgcaagctttttagaaagctttgtcgtctgcatcgtgtaaacaggcaaagcaagccccaccgatttgatcaacgtagcacgaccagcctttgataacgattttaatttccacccatggtgtcctatgttatttagtgttttgttgctcttctttttcggtttcactatatataataaaaggacataaattgaaaaattaaataaatcataaaacaaattttaattttattgtaataatattaactcgcggactaaaatttattaacaccccaatcacataaaaactgcggtgttatatttttagcttttacaaatatatttgatttctgaaaatttgtgatagcaaagtggaaaaggaatttcattagataatatctgatattgcttatgtatgcttgaacaagaaaggtcagcctgaaatagctatagctagccagacttcgattgaactcaatcaagtccttgcttcattggctgtttcaatacgttaaaacttactttcttgtctttgctttgctttttcctttttttgggtgaatgctacaatatgtcaaatcaaataggccaactatatgtgttgttttcttgtaagaggttaacccaattcatggcttcggtttgggatagccaaacgcaacaaaacatgtactactaccacctccaagaaat

SEQ ID NO: 327088 - DNA, 524 bp, Cannabis indica
aatcattattgtaaaaaaaaaatgtcacattccattcctatgttagaacaaaataaagtaatcttcatattcctaagcatcatcatagtattacttcgcacaaccaaatatggtaatgttgcttttctaggtttataattctcttcatcactttccaagcaatgttaaacttattgccatgaaatcaaacctgcataacaaatggcccttaagtgcatacagaacttaaattcaggaaatttaaccaccaatactatcaaaatttaagttttagagattaattgctagagtgattaatctctaaaaaaacagaactattattaataattattaatattggaagcctttcttcttctggagccttctagcatgctgttcatctcctcaattgagtttttggtccctctcatggggaaatcagtccaccctcccgtgttttgtggtggtttcaggtgttttcatcctatttgtgaatcatttctctctgtttctctctcccctttgagcatttattgctctggggg

SEQ ID NO: 327089 - DNA, 890 bp, Cannabis indica
tatcacatttttctccattattctaaaaaattcttcaaccatccatctgattgccctaagaattagcgccgtgatctctagagtgaataatagatcaacttgatcaccaccgcctttttgacaaggcatgggaccttttggataatgtgggcagggcctaccaagccttaactggaggtcgtgtcgctggaggtggccccttgaaccagtagcagcctcttgcctttgtctcttcttgcaaagatcgctgtctctcacagcttttgaagaactagccctatccatggcagacctaaacgtacctacataagccaatgtagggttaagcgagtctgcacaggacaagatgccaagtctccctttttgacaaagatcatacaaacaggaccaatattctcagaatagtgactcatatatagtatacaccaattcaacctcgatatttttacatcaagaaaaaagtgacgaaagacacttactgattgatgaattaaagtattatgaggtatggttctactacaccgtgactggttatgttcacgcctgagaatgattcggttgatcaagtcttgcaaacaaaaagatgagccaaaatgctacaactcttgtgggaaagcgaaaaaaattgaaacttaaaaaatgaaaggtgctgtgagaatttattgagagccaagaagagacgcctttcacgagaaataaatgattcagatcattcaccaaaaaaatggtacttgaaaacgtgatggatggggagctgagaagatgcatcagttccaaacgtttaacctccttcatagcatgcatcgtgaaaatgttagaaattattttaccaggatgttagatctactcacaagtacgttgattaacgtcctaaatatgaacttctaaaa

SEQ ID NO: 327090 - DNA, 2363 bp, Cannabis indica
tagtgccttgagcttgaaaaaaacgtcaaagctaatttttcatcatgttggaagttaacctcttgaccacaaatagagctctcaattgaattggacttagtcggcccaatagcctctttaccctcaattagtccatttgaaatctctaaaggcccaacaagtccattcggcccaacacactttgaatgaagcacacctatttccttatgttccaaaatgggctcggtcccacaagcagaaaaaaactggccattgtattctttaatgagtccattagaagaggcactatcttttaaatggcccatcttggaacccggcccagaacaagagagagccggcccaacagaatcattaatatacccaaaccgaggcccttttcctttaccaatagtcaaatcttggtcattatattttgaattaaaaccaggaagttgtacaaactcctttccaccttccagacttccaacggtactcttgataccattaaaggaaattgtaggcatgcgtgatgcagggagttctttgggaacccagaccattctgcgagcctgacctccttccaggctcctacgatcagtcgccttcacggagtggttcgaagatcgagagttcttccgaccatggcccttcaaaccagcagtcacggccaacggccggattccatggcgaacagagacaggactcgccaaacccactggagtcgatgccggagtgaacgagtttgctcccgagaaaacgtctaggtacgtcgactccaaagacaaccacggcccgtacattgggaaaggaaccccatttacactggccaccgtgaccggagaagacagagtgcatcctcttctttgatgacccattttgccgcagttataacagaagattcccagcttctcgtacttgaactgaatccacctttgggagcccgattccagaccgaagtagcatccagcgaacagaggttgattaacattcaacctaatcaagactttgagcgccttactccagagagcaggttttccttcatccatattcacatatatcacttggccagcttttgcccccaatgttttaccattatctgttgagtagtagtccctagggagattgtgaatatgtaaccaagttttcacacagttaaacacaacagagagatcttttaaaggctcccaagctttcaacaaaaatgtatacccacggacacaccaaggaccattttcaagggcccaaatacggttcccagcactagtgaaaccaagctcaaaacagttatggttgttggcaccctcattaacagctaccactgtcacattaaatttccataccttttccacaaaatcaataatggtggcttcattaactaccatcggggccaccactttcccaagaagacaaaaagaatgtaaagcctgctgagaagatgcacaaggaatgagcttgacagaagcttccgcacacgtgaaacactttccatgattggaggagttggtagcacttactaatgccattgaatcagacaaagaaaagcaaccaactataaaaaccaaccttaccaacctttttaccacagaacaacacccacactgagacaacaccacaaaaaacacaacccacactgagacaacacccacgtgaaacacaacctctttacaacacccagccccacaaaaaacacaagagcccacactgagactacaacagacagaaccaactcgagatctttaggaaaacacggaagaccaaaccaaagcaactaaggggaaggaatcaacaaaacagaggaacaaactcaaaggacacagccacacacacacagaaaaatacacagaacacctagacgaagaaaagcagagaaaggaaaaagaaatgggaaataagactcagatgaaaagagagagtggtagatgaccattttctctcataggaatatatataaatagttagagagattgattgttgagaaaccaaacaaaaacttccacaatgatatatatatctggtttttagttattcataatttagtttctaactctaatcaattttttaatcaataaaaaattaaaaataaagccaaaaaataaaaaagtgtgatgataaatttgaaattcttattttttaaaaaaataataaataaaaaataaaaatataaagccaacaaacaaaaaacttatgatgataaatttggaatttttttttttaacaaataataaataaaaagtaaaaaataaagatatatattttatatcaattaaatatttatgaagctaataaaaatttaaaaaatgagataattaaagagagataaataattttaattagagaaattttatagtgtcacgtcaccgtctcatatctctcatatatatata

SEQ ID NO: 327091 - DNA, 745 bp, Cannabis indica
agggcatttggttcctatgataaaaatcatatccaccttaagaaataaaagtagaagggaaccaaaaagttattgaagattagcatgagtttgtgctattgaatgaaggctttttcatttctatttaagagtaagattgtgaatttgtgatgttggtcaaaaagatgtacatatacaaaacaatatagtataattatatgaattgtattggattggtagctgaatcttatttaattggcatatgagtcattatttgtactcattcaattggaatgatattatccatgttacattattactatatcaacctgtcatccttaaatatcaattatattaaaaattggcacataacttatttattggcacatttatacattattatttcaaaatcatggttgctagcctttacttgacaatatgattgagaaatatatatatatatatatatatatattattactaattattaattattattacactaatatcagacagttttaaaaagaaaatagaggtatgacaccgaagaagatgttagtcactaataatactttttaataattctctaaatttattattcaaaccatatacatatagatatttcttaaaaaaatttgtagtacactcttatttattttggtatacaaaaaaaaatatttttttttcatgatcgcgtacgttttataattatataggactacttgtaaattttttaaaaaaatctaaataatttacagtaccgaaa

SEQ ID NO: 327092 - DNA, 506 bp, Cannabis indica
gcctgagcccaattttggcctctacaatatccactttactttatttgttttaatttttacttttatttttatattttttaaaatatatccacttttatagatgatgtcacccttataccccttaagttaaaataaattatataaaatgccactaaaacgccactaattgggaatagcttacattagaacctttggtgacattagaatagcttacatttttaaaaaatgccactaaaatatataatgtccctaaatattaataataatgacacttaaaaatgtcactaattgggaattttggtatagtatgtgttaaatttaagtagagagtgaagttatattggacaactcacttataaagtaggtattttttaatgaaatataatatgagaagattctaattaaggaataattacataagcactattttttgtaaaataattacatttttacattcaaataatgtttttttacacttttacagtttttaaaaataacacgaaaac

SEQ ID NO: 327093 - DNA, 1011 bp, Cannabis indica
aacataactaatataattaagagatatttaacgcaaaattctcttaacatttataattgttacacatatgatcttgaaaatgacaataaaagttacgattttgttgctgtcatactcttttttggccattaagtgtcaactcagaaatacgtgaaaacatattattgaactatgtattaaataaactaaataaatttatcgtcacgtgtttttgaattgacacttaacaggtttaattgacacttgacaatcaaaaaagagtacgattgcaataactttatatattaggataatatgtgtaacgatggtagatgttaagagagtttcgccgcaaatatccttataattaaatgttacttagcaggatcaagagactcaaacttggaatgttgagaatcagaatcagaaaatatttgcttccaatttcattcccttatggattgagtcttttcattcaggttactttattaatttgcactaattaatttagttctaatgcatttatttcgtggtatcattattgttataaataactacaaataagatgttttttttatatatataaattattcgaaatttttatttgttattctaagaaaacgagaaaaagtgagaagaaatattctgagttattggtactattttttgtttaaaattaatgtaattatttaaaatcgagagttcaaactgatattaatcctaatataaacttgaacaatgagcatttgttttgaatttattttggtgtgttttgtgtatgaagatgattttgtggtagaaaaagttatgaaaagtcttcaaagctcaggtcttctttgttcttgtggaatagcaacatctttgactgatttaggagaacaatggttagtaaaaattgtatacttgttcaataccataacgacgtgacatcttataattagttgacgatttttttatattatttattaaattaaaatgtgtaaacttaatattgaaaatgtactaataacatgttattttttttatagtatt

SEQ ID NO: 327094 - DNA, 1047 bp, Cannabis indica
ttccttcatggcgtagatagggtatcgaaggagggtgatttcaaaactctctacttcttggtgaaaaacattgggtctaaacacaagtttccaacaggtggaccgatttgtgaggcctttactcaccgcaaccatgtacgagagggctcttgcattagctcaactgcctagctccaaaaaagatatcatcatcttgacctctcctcgtgcgttagacgattttggatttaactttgtcattatccactctatcggagtaagagaaaactcgcgagctttaggaccccggaggccagccatgagtgccatagcgaagggcactattcctgggccttcaaagaaaaggccagttagggagtgcgactaacttggtgataattgctattcgcctttcttataacattgcttcattaatttgcatgcttttatactttactaattgcttttttgtttgttttgtagatgttgcccctgaatttgcccaatgtacgtggaccaaccagagaaggacacgtggacacaaaggttttagaactcaaattaatagctaagtctttgtaaagaaaggcattatcctggatatgccacccagagaaggcatatcaggttttctatgctcccggagaccaaggtggcatcaaagcatctacgggagatgtcaggcttcctctgagcagtcatctcgcatttaatgccgcataggaggaggcgtgttggaactgccacacgcaataaagtctgacgacacaacccctgatctgcacctacaaggctatgaccacttaagtctaatgacggctactctgtgaagaatcacatcagtcaaaagacaataaggacaacccacgtaaaatccctacagcacctagggatttgaccatgcattacccatggtatattcattgggaatacatgactttactggtagttacagaaatacatgtactatcattctggggatcaccccacaaaaacactataaataccccctcaaagctcattaatgggggtcgagatttttgggttgcataagtgcaagaagagtaa

SEQ ID NO: 327095 - DNA, 741 bp, Cannabis indica
tcgtgagcaggggaaggtggtgaatctctctactatatttaaccgcctatggagaagtctgagggtgccacatgttaggataaatctcaactttgatgattatatcaatttagatataattgatgggtcgacggcgattgggagttccaataagaacgtacgagaaacaagggggacgattactattcaaaggatattcaaaagattgtggaaagacttgaaggaaccacgtgtgcaatctcatttaatgccaagtaattttattaatttaaattacatatggcagctgtatgaagaaggaattgtaaataaagtgggtctagataaatgggataggaaaagagatggaccctcaccaagcagtattattaatgacacgtgtcatttaaatgtcactcaaggattaaaacaggtggacaagggtttgttgggctagagtaaaaatgaaatgaggttggtggtgggctggaaggataatgggccaaagaatttaattctaaataataataagctggtgggtaattacactatccaacttaatgggatgtggtattaccaaaatggcccatacaaacttattttggaccataaaaaggaaggaagtgctttcttaaatgataagataatggaatatcattctgaagcacaacaggggagatataacaaggaaagtacagctcgaaaagtgtctctattgataaaatggcagtgtgcaataagaaaaatcctgtacaagtgatc

SEQ ID NO: 327096 - DNA, 1234 bp, Cannabis indica
cggtttgatggtcggtttcggttttcggtttttatgaacacccctatatacaagttggtattggcacaaattgtgccatatttgagataccttttctcaataggagatcgaaaaatgcttgctgcaataaaaagttcagaattagcctgatgtaaagaagtttttgtaacagagaaatgattaaatatcaacattttgtttggaacagagtagccatgccaaagcatcaatttatacattggcagattgtgaatgacagactattaattcggcatcatcttcaacgagttatgcagcttgaaaactgcctgtgtccaatctctggtatgattgatgagaactctgctcatttattcttcacttgtaacttctctcagcaagcggtgcattagattcatagtttttattggttaaagattgattcacttggatggaaggattgagcaagaatgtcaagactgtgattgttgcaatattttttcagcaacagtctactatatttggtataataggaatacttgtgtttttaatagatattcttatagtgtgaatgtaatggttaatatgattaaaagagataccaattatagaactagaaatacttgctttaagaacttgaaggacaatgagatgagcttattgaagggaatttgatacatgtaatcttgttgttggcctttttgtaggctttgtttggttgtaaatgtggttgtgattaataaagattttgtttcttgataaataaaaaatattttattgtttaaaagagcatctttaataatgcatcattttattaaattagtgtataatcttcatatcatttcaatgatatactaaatttcacacaattgaagtatcttcaattatgcatcattccactaaattagtgtgaaatctttacaccattccactctaaagagataccaaattggtatgtaccaaatttcacactattattagtgtattgaattttgaatctacaccaaattgttgtataaatttttcttttcattgtaacccctcttttaatttgttgtaaaaataatcacaaattaattgtcgacaatatgaataattatattataaattaattattagtgactattcatgtagatgttcaaagacactagtagtgtctagcacctcctatatgttaatatcattattagtccaattaagtatcgagtctcatataatttagtgcaataatttttaaggagtatcactagtcaat

SEQ ID NO: 327097 - DNA, 869 bp, Cannabis indica
gattggatggatccagtccaatccaattaatactggatctaaaatattggatgaatccgatccgatccaaaaaatactaggtctaaaatattagataaacccaaattaaacaaataaatatatatgaaatacatccaatggatagaaccgatctaatccaacgacgaaattaattggatcggattggatggtaaaatctaacatccaatatatgattggatcagatctggataggcgtaaaaatattggatgtgatccaatgaacacccctagttaaaagtaaagattatttttcttaaaatataaaatggtatacttacatgtcaaaagtatatgatccaagtaaaaattaaatttttatttatcgtgcgtgacaaatatgatgcaggatcattccataaaatatatatatatatatacgtacgataatataaaaattattactgtcgtacaatagtccatatgaagttgatgaagattgaaccccaagttgggatcaacaaatatatattattcatttttttttaaaataataataataataattttgttaatcttgtgagtcgtcgtaactatatgtaggggtgttgggcggacccatataaatcaggcaaggtagcgcaatcgccctctaaaaaaaattggaaaaaaataatctatatatatatacattttagttaatcacaatatatatttataaataaaaatgatatctatgaacataaaataacatttgatataatagtatagtcatttcatgcatataaagaaaggaggtcaagagttctaatctcaataaaagcatgcttactttagtatttgcattttactttttgaacctttaccaatattatatttgatgtcttaat

SEQ ID NO: 327098 - DNA, 640 bp, Cannabis indica
atatatagaaaaaaacaagaatcaagactaaaaaaaatactaattttttatttatttttttacattcaaaaataaaaaaattaaaaacttagggttcattcacttacctcttgaatgtaattgttctcttgacaacaatgttgatctatccacagatttgaagagattgcataagattttgagagattttgaaaaaaatagaggaagacatgaaagcaccatgtgagggaagttagttttagagttttttttttttttttaattttttttttatgatattttattttaattaaaaataaatataaaataataaaaggtattattgagatataaaagtttcattttaaaagagaaagttagtgtataaaccagttgagagaccatcaaaagcagagcattcagcgcaattactaatcttcttccaaactagtgcaattccatccatccatggagttgggaagctcttctctttcttttaatagttatctcatctctggttctactccaaggcccaatgagtcttcaaccctctttcttcttcctctttcttttaaaccttcttctttgtctttagctcggagtcagaacccttttcgtttcaaagccatcgccacccaaaaggttttttttttttttattt

SEQ ID NO: 327099 - DNA, 1256 bp, Cannabis indica
tccattgcatctgtgaaagcccacacccaaacggaatcccaatacgaacctcatgaacctcaactgccgacgacgcaaccatcccagatgaacccaaaccccgatggcgcaagcccgatgcaagcctaaaccccaaccgctacgacctacacataaaaggaaagatagattgtgataaaaagatgaaaagaacaaacacaacaacaaacagatagatctcaaagaagatggaatggaccgttgttggtccatatttgggtcttcgggtacgaaaatttccatcaaaagcgggggctcgtgcgcaaagagagagatggagattgagagaggaggctgatgcggtcaacaatggagagagctccaccggcgttgggctaaacaaccgcacgtaagagagaagtgaagggaggagaaatggtcgggttaggctgagaaaatttagggatttcttttgctaaagaggaaaaggagaaatttagggttttggttgttgagtatcaaaattaatatacttttttctctttaaaaattttaccatacacgtgctctttaatgagcattaattttttttgttttctcaaaacgaaaaataccaatttaatatatatatcatcttttccaaaaatatctatatatcattttaaaaaaatatatattaagttatttttttattatatatattttattattattttaattaaatttataggtatgatatagtgacacgctaaacgtgtggctacaagtttatctagtcacatttagcgcgtcactatatgtcaagaatattttttttaaaaaaataaaagaaattatgagatttactctttagtgacacttcacagttttagtgactcaaattataagacactaacactaaatgtttagagtctttttgtgtgtgtcactaaaactcaccactaatcctttagtgacaagcacaaaaatgcgggtcactaaagagtgtcactaaagagtaattttgtagtagtgattgggcgctaggtgggtgagtcctccgtccaaggtcaccgaggcacgcttacgggatcttgatcaaggcagctacttgggtgagtcagactgttacatccccgcctataacaatcgagccgcaaaccctgaaaggggaatgtgtgtttggtcgggtgcttatgccaagcaaggggaattgctgcctttgcacccacactttatgtaaagaccgctcagtttaatttggaaattagcagttaatcatgtttaattatgaaaat

SEQ ID NO: 327100 - DNA, 639 bp, Cannabis indica
tgacctatttcaactcagagtcagccatgcatagagcttaaagaaaatgtgaagggaagactgattgcattaattcttttcatggaaaatgagctcatggatacaagaagaataactaggccactataccttattaataacttccgacaaaacatattttgccgatgggtaacagtattagtagttctagaatagaaagaaagactagtatagtgaaaataataataataaaaaaactatatttaaaatctgctaaaactaactctaaaaaagaagccaaagaaatctagttattaaattttaaaatcacagtcaaacaatcaaattcaaacactacattttgaaatcctagtaagtggcattggacatcatgttttaaagctaatgtttctgtaggaaatcaagctagcaattaggtgtaaatttacatttaatgtattttttcatttactctaatattactaagtgttcacattatattatatataccctttgtatatactaaaagagatcatcagaaataaaaacaattttctctcatttgcttcatagtattagagcatttgaaacttctcaaacccccttcctgaaaattagggtttggaggtctttatcctagaagattaattaaaagtagtt

SEQ ID NO: 327101 - DNA, 742 bp, Cannabis indica
aagcgcgggatgtttactagtttcttatatgacaattaatttctcgtgtaacaaaaattttgtatccgtcattattggtcagtgatataattgtaacttttatcggagtttaatttttattgtgattcagtaacttaatttaattatttttttcaaaagacacatgtgtaataatatattttttactgaaaaattaactattgtgtattaattttgttgcataaataactaaaaagatatgatcaaggtttaactaaatcgtttctaattttttttttaaaaaaaaatccagtcaaaactacaacttgaatacacattttgatgcagaaaccctatattttaagctatatatgctctttttcaagcttttgccaacaatgtcgataataatttatggacccaacagtccattgtttgtccatgagccatgaggtctggtagtaataattgtactgctttcaattaaaatacatttactaactttttttgcttcttttttaaacaaaagatgcaattcttaaaaaaagaaaagaatggtgaacaccttcttattatattaaacattgagcattttaaccattctttttgtacaaataaatattgtaaaaatagtatcagacagacagacctttaaaaaaaaattacacgaaatataaagctgtagaaattaggtcggggaaggacaaccccctctctaatctctatgctttgtttttgtttattgtttttttttttctttctt

SEQ ID NO: 327102 - DNA, 519 bp, Cannabis indica
tggggaaaaatgtgcatcgatccctaatgtgactataaaaaacaatttattaacaataaaatgtaattttgtaactaatactttttgagccacaaattttttaatcacaatataagaaattaataattttataaatagtactactaattttttttacgtttagtttacaaagtttggtgtgaactaaaagtaagatattttgtggtgtgatataataacaattgtagattgattattaagcaaaataataattataccctaatttagcattaaaatattacaatatgccgccatccccaacatatactatatagtacttttgttacaacataaactaactcatattatatatttaatcactctttaaaaaaatcatatttaatattagcaaatatatgattaatttatcattattgtataatatttgatgaaaagtttattaagcctgaacctacataaaatatataagggtaaatactattttggaccatgtattttgcaaaaattactgattggacc

SEQ ID NO: 327103 - DNA, 627 bp, Cannabis indica
tgccccttgaactttcatcatgttagaagaattttttactaaaattagacaaaaatccttaaatttaacaatttcaatagttcggggagaatttttaacggccaaaaaagttcagggagcacgatttagtacatgtcaaaattcgggggagggaaaataactaattagccttaaattattgtgaattaataaatcacccaattttttgtttgaatcaacatttttttaaaggcaaccaatgaaaattaaagaaagtgtccttctaatattatcaaagatatagaagaaaagtggtaggagccatctaatttgaaagatttgactaccttcatttattcaaattgtcctttaataaagccatctatttcacattatgagtaagtaccaatgtaatttaataaagaaagaagttgagggaataataataagtagaagcatgaaatttgaggacccttgtaaaaggaaaaaaacacacttgaaaattcttgaaacaaatgggaagtaattgagagagagtagtaggacccataatattattttgggtttttttttcttaattatttttacactttaaaacaaatttttttttttttgttatatttttactagaattctacataaaaactc

SEQ ID NO: 327104 - DNA, 1163 bp, Cannabis indica
catcatcgttggaggaaggattattggaagaaaatgcagatgatgatggacacggtttcatcaaatacgtcttaatttctgatgaagaacgctcatatttgggctataatttcacatgtcatacgatatccatttatttcacaaaaattagttaaatttctaatataacactttttaatagatattactggtagtaattaaatttaacgataaatattaggaaaaattatggtataagtctcaaaaatttataattgatgcatataagtccctaacctcaaaaattaacagtaataatctataaggtcactgtttatgtatctcccttggtaccaaatttaacatcaccgttaaatagtaataaaatgccacatgtatgtttttttagtagagtgatataccacatgttacatgttgtttattggtacaaatcataattttaattaaaaataatttaaaaaaaaactaaaaaaactaatattttaaaatcatataatttatcatttttttgttacttttcctctttgtcttctttcaccaaagctaccaccccgaccctcaccccacccccatccccagccacacccaacctccgagctattcggagatccactacttcagtcgtcatctattgttgacgtcttcttcatccagccacaccttaaccccaaccgcttaaaaatattaaattgcataaaaaaaataaccagaccaagaaaatgccataaatgagttttttaaaatcaaactcgtatcaatatatccaataaacccagatttcaatcattgatccaataaattttaattcgttaggtattttagattggtatggaaaattaaactctcatacccaacaaatccaatcatagatcttaaccaacacatcacaaacaaaattaaactatacttacccgaactgaaatcttcgttttcttcttctactccatccaattatcttcttagaagttttgaatacactaggagagaggtgaaaaggaatttgggcttcaagggtgtcgatctactcaccttcagggactgatgcgcaccgttggggaccgattggctcacttgaaatgggctcggggatgatggtgaggtcccaagatcaaagcgtggtatgggtatattttttaggcaagtgtggtctgtgatcaacgaag

SEQ ID NO: 327105 - DNA, 357 bp, Cannabis indica
aaacccaacattagttacatgaacaataatcctaacagaatgtaggttacaaacacagtaaaaaacataagagaaactaaatttatgtacatagtaactctatctaaaacaaacttatcaatattaaattatatcaatcattattaagtaataatattaactcacagctagattatgtttttatgtagatacttataattttgatttttttttctatatgaggatatatattataattattttatatattacacttattaaattagaatttaaattatctatttcacaagtgtagataaatcaaataggagtcttcactacaaaatttgttacttttagtcacaaaaaacttatgat

SEQ ID NO: 327106 - DNA, 891 bp, Cannabis indica
aataataataataattaaatctaatacaatttaattatatttttaaatatttaaatataatctagttttatttattttaaataaaataataactaataaatttttcataaagtattattttaattaattgaattaacgtctaatttaattttaaattaaaatttataaacaaaataattatttaattttatgaatatttttaagtaattatttataagttatatttaataaataaatttaaatatttaaaattatattttaaaaaaaataataactgattatttaatagtattacaatttttaattattaattttaacgaaaaaataaaaataattagactaataattttcgttaaataaatatcatttaatataaatatatatatgtgtaatttatagtgattaggtatccaagtttgaggtattgatattggccccccttaaaagagatagaaaatattacaagtaagaatgatacattatgggaaagaaattagacaaatggaagaaagtgggaattagaattaataaggtagtgatgaattgaagattggaataataaatataatagagaagagaagagtagagagtgggtgtggggccaaagctagggcaaagggcaaagaagaggtgggggcctaggaaagtgtgtcggctgggtctatggggttcaagattcacatatattgggactagagccaaaccaaccctcctcacaacctctcctacctcatcttcaaaaatttatgtgagaaactctgagataagagcaccagtattgtctagcactactgtacgaaataacgttttataaatagttaatggttttttgtaattgttattcaagtaaaattattgaaattcggtattaaattgcatcaataatgatat

SEQ ID NO: 327107 - DNA, 697 bp, Cannabis indica
ggtattttattgacttattaaatctatctattcggtgattacataattgtgggaatattattgttcttttatattgatgagtggtcctgattttgttactaatatttttttattaatataggagttaatctattacttttaaattagtattttgtaatataaattaaagaatcatttataagctttatcttcctacaagggtcaaagtgtgacttttgacttcccaagttatcatatctgccacggcctagggctggggtcgtgacacataatttcttcttatggttagcagtgcaagatcagttaaagacaaggtgtgaaaaatcaatataactgcaaaagacatacacttgtttactctgcaggactggtaaggagaacttcgagcatctcctttttagctgcaatgttgcagcaaattgcttacaacaaattaaagagtgggttcattagagggttgtgtcattttcacttcttagactagtgaggtggttgcaaagagacaagacaaataggtttaaaactaagatttatgttgctgcattagcagccttagcctataatattggcaagctcggaatgaaattccgtggagtggaaaaaatgtccaaactagtcatatagtagctagctagaacaaaaacagatattttgtatagagttaaaagtgtttagcctaaaagagttagtgctaaga

SEQ ID NO: 327108 - DNA, 997 bp, Cannabis indica
atgcaaccaaacaaaggaatgaaatgaaaattgtttcctttccattccattccatttcattacctccaaccaaacgccacgaatgtttgttgaggcaattacacaataattatataatttgaagtaattaacagagttaaaatacactaatttttatgacccctgtaataattgagtgtgtaattatacaatattataatttttatataattaatattaggtaatataatcatgtgattattatactaattaataaatattttttgaatttttattttataacttatgcttactatattaaattatacggcaaatatctttttattattttataaaaaatatattttacttttgtattaattttaaagttgtaaggaataatggttagtttgctaggatttatcaattttatttataattttatatttttatatttttgtcataaatttattatatgaaaatacaaaaaattgatctctaaagtacaaaaaaatacttaattcattttcctattttgactatttaaaaaactgaaaataaatttataaaaaattaaaataataacaaaaacatttagatagacaaataaaattataatagtgatattatattttaaaaattcaaagaatgaagaaaaaataataaaattaaaaaataaggaatgttcaaatattactatgtgatatgataacctataagcctattataccttcatacttatacatatattcattcaattattttttttatctgattacctttataggtaatatatatcccgaaaattataatgatatttaactgggcatattttattaaatatgcgattaagtggctataagagtaagattataaaacttacttaagctagttacgggttaattagtgaaatacaattaaaggaataaataaagcataatttattaattacggagattttatcggactataggggtatcgtggataccatttccaaaataaaatattttcgggttcg

SEQ ID NO: 327109 - DNA, 1240 bp, Cannabis indica
ttgtgatattaaagaatttttgtttagaggttccgaagcttttaccaaagatgactttactattttcttcgatcttttgtggtcaatttggaatcagcgcaacaaaattatttttgaagataacaaggctatggagctagacatggaatcctctgttatttcttttttgcaggaatacaaaaatgcacaaacaaagataaatcctcacaagacaatcatcacttggaagacaccccctgctgccctccccaggaatgtttaaacttaatgttaatgcatcagttcgttctcaggcgaatcttcatggttatggtgtggtagtccaagactcagacaactcaatcattgtagtgttttcctcttaagccccttcgggcctgcctcctatctttgctgaagcgaaagctctctgacgtgctttaaggtggtgtcaagctgttcggttcccaattcaactcatattgttagactgccagaatttaatcacaaaatttcaaaagaatgtcaacgatcgctcagctctttcaggtgtcattaaggatattgcttcctctttgtcctcttttccaagtgtttcatttaggtttattccaagatcaaacaatatttaagcatataacatagatgaagcagctttaggaactgataaagagtgtatctggaacaatccgtgtctctgctttcttaaatcttcgtaacttgattttttgtttgtcttttagttacagatcttgtaatgttaaaaaaaaaaaatacatagtattattataaaataatattttataattaattaataattttttataatttttattaaaataaaatatataaaacctattatcaaaaaaaaaaaaaagaacctaataataaattacccttgcacatcacacaaaaatttaggcgctctcgggactagtgcctttatgagttctcaacatgcaaattagttgagtaatttacgttataaaggtagtagaccccatttcatatggtttaatttgaaacataaaagtgagatagagatgtctctagactatagtctagctaggcacatcattgctattgccaatatttgtcgttttctctcataaattttatgcaaaacaggtttttgttttaatatttttcatagatttgttttaagtatatatatgggtgcacttttaatagatattatttatgaataagtaaaattagaaaattttgagtttttatgcttattttttggatctaattaaaa

SEQ ID NO: 327110 - DNA, 937 bp, Cannabis indica
taaaagcgaagtcaacactaacacaattcaaaatgatgattttgaagaaattagtcatacttgtttaattgtaaaaaattctaccaacgtcacttttaatggaattcaaatcctaagtaaaaattattttggaggaaaaatagagtgaacccttggtttttttaaaaaaagtagaaattcttttattattcgcattaactctcaaatccatcatctttgcataaaaaataaaccaccaagtgaaccaaatacaaaagtaaaaggaaaataaaacactaaaattaattaaatctccaaactttctttgttattacaaaatacttttcttaaatttcatctagtagtatcaattatttccatattggataaattatgatgtatttttcattttatttaataatgtatgtaatatattcattgcaaatattaccaaataccaagtactatgtcacatagttttttattgaaataagtaagccagaatattaaaatattatccaatatacatatatgttagaataaaagtgctaaaacataccacatcgtaataggttgcactgcagattactgtgtattgtccaaaaaataggctctgcttggtgagtttgataggatatcatcataaactggagtttcttactgagtttgttgactcacagtgttactttcatgtgtaggtaagggcaaggctaaggctaagcaaccgtgaggacgagcagatgaagattgtacatgtcggggcgattaggcctggagcgtacgatctttggagcatcaagtctttttgttgtatagttgctaggcaacaaaacttttttatatgaatagcaaacttttgtaaaagtattttgtaaacgagatcccaggattttataaatatattactttaagtttctaataaaataagtaaaatttaattaatcacgtttttctttaa

SEQ ID NO: 327111 - DNA, 883 bp, Cannabis indica
tacgtggaccaataaaattgtactatatgtatactatgttcacatagatgtatatatgggcagtccaacatgacacttaatacctaaaatagatagaaatgttaaattgctaacagaagacgagtattgtacgttttccagctaaattttgagttttaagagttaagtacaagtaaaataaaagtattaggagtgttacgacactctctgggctctctagcccctatcttcgtcactgtatataaatcataaggttcctaggcgtatggaatgcctctgccccatgaactggacctcagttaatggacctatagtcacttatttaatgtatttactccgttagtagctcgagatgatataaaaattctagcgggttgtgggtgtacccaaatccaattcctagtttataaatactactttgcaccttcatgcagaaggaagatttattatgagaatactatagtacaaaaagttagggttcttgaacttgtaaaaacttcattgtaatacttcaaaatttttcaactaaatacaagtgacttgtgaattaggatttatcaacactcaaattacgtaaaaaaaattacctctaacttttatcactttacaccaaaatagtgtaaatctttggtgatggtaactacaaaattaacacatttttttgttgttgaaggatctaatgttaatgctaaatttatccaactgttaataataaatgatgatgacatttattaaaaaagaaaaaagaaaaattaatgaaaagttattactatgtcagttttgggtatgaaatagatatgtagatgtagttgtaacttttaattatgttactcttttatcttataaataaattaagtaatgaaaaaaataaaataataaaaag

SEQ ID NO: 327112 - DNA, 1625 bp, Cannabis indica
tctatgaagaatttgccaagtattgaaacgattgatgggcaaggagcctcataaaaatcaggtgaatcaaaatcagaaatattaatattggagacatagcaatgaacatgattataaagtaattacttatcgttacattcaaattcaaagtccagaaatataaaagtccccctcctaaaccaactctagggacctcaaaacccaatttagccttaattatatcaatagaacccttacatagtctagattccataacaaagaggaaagatggctcatacattataatcaagaaggagagatttaggaaggctcaataactccccaagcctcaagcattctagcttaagagatttatttgtttaggcaagcatgttcgtccacaggacatgccttttcactagaggctacctccacgacttcttgatgtggttagggcctgtatttttttaacattttcctctgttcattgcctacagtcgctagttgtctcttaaaacacattgagctagtagtaaggctcttccttgtcatggtcttcttagttgggccttcagagctgcccactacaaacgcaaaggaacttagagttcctacaacattaggggtaggaatagggccagtggctggattaggattggtacttgtaatggatcattcataagatgaaagtgggggaagtagaacttctcaacctcgggtggaaggatatcttggagaggtaaagtaaggttatagaccctcctgaggctgcagacataagcgcagtgaaagatggatcgagtactacttggagttgctggttttgtgggagtgttggtgtggcagcattgggcaaggtttcaaggcaagtattattgcttgcgttgcctagggaagagatgaagaggccattgatatcaaaagtattatcccccaataggctaaaaggagaaatcctattaagttgaaagtcctttgggaaattaatagaggtgtttatgaagttcatgaggctgtagctgggcatctgcatgaaatggattaaggggccatagttcctgggggacgtggctggttgggaaagggaaggagaccaaaagggcctttattggtacaggtaatttcacgtaaatattttcatatgggatcccaaattgttaccttttgatactttatgtcgcagaatgttttgtaactagatttcaagatcccaaattgtaaatatttcttaaaaaattcacatgttctgtaaaattttaatcatcacaaaatttttattaaatgcactttttatattaaaaccctttgattagtaaaggttaagacaataattagaaaatatcatgatgtgctttagatactagagtgttacagtgttggccttagacaaaaataaaaattgggctcctctacataaaatggggtcctgagaatttaaactctagacctccaaattaacactctaaacaaatttcaactaatctacaatataaatttactaatgtgtgtattatgtttattttattactaatactattttcttttacaaagtgtgggccttgagtggttgggaactcaaggtcgatcatgtttatatattttagggtaattaggatttttatttctcgaactttgacatatatcaa

SEQ ID NO: 327113 - DNA, 641 bp, Cannabis indica
tcattcattccatacacaaaggagacatgaactatctccttacctgttgtcacctccatatgaattagttgacttaagaaaaacttaatatatatttacgtgaaacaaaattggattccaactaactattattctaccactaggatgccaagcattatttgtcgtaaagcaccacccttgaaacatgtttaagtataaagctcctaatttaggagccttaactctagtctcgaggagaccaacaaagcctattttccatttagagattagatgcttaacctctatttgtttacaacgcttgttgatccctcggacattccaactcatggttttatgcatctaaggtaggaggctctccccctcctgttcttatagcctcaatttcatcaagctgcccatcttgttcttctggccaaaaggagcattccccttctgtcaaaacttggaatttttttgaagtttcaatggcaggtgccttttctacagtctttttcttcgaattcttcacttgttggaatcaatcttcatttatcaaagtgtccctttttcctgttccattgtctcttttggttcttctcaaccaaacttgctttgtcgtaacttctacattcaagtccttctttctgcatatggctgctgta

SEQ ID NO: 327114 - DNA, 1064 bp, Cannabis indica
aaaaaaataatatataaagtattctcttattttattttagatatatatttccaaattctctaaatatttataattgttatatatatgattcgaataaaaaaaataatactaaaagtattttattttataattttattgcaatggtaccatttttttattattaagtacggattaagatcattaagtgtcagctcaaaactacgtgtggatatatttttttaacttatttaatagataatccaataacgtgtctccacgtatttttgagttgatacataataattgtaataaaatcgtaagataatataattttaccgttatttttttaattaagattatatatgtaataattataaatgttaaaagaatttcgtcgcatgtatcattttatttacttttttaacaaaataaatttaattttttagttaatattaatgcgatgattggtagttattattataattttttattacaatttctttgttaatttttatgcttgaaatcaaatgtcataatatttttttaaaaaaaaaaatttatagccgcattcgctataattacaatattattcttgtaaatattaaaaaaatttgtatagtttaccgtgtagaaatagaattactgatattccagttcaattaccacttgtcttcaaaaaatttcaaacctatttttaacactttaaattatttaaaaaaaattcaaaaaatttatagggatgatgttgagtataacgaacatgttatgaaaaaaatatttcaacatgtatttttaaacatgaatttcgactaaaaaattataataacaagttgacgagagcactcctctattgactaatactccacaaactaatgaaaactatattattttacttaacagaaccaacaaaagattttaactacaatctcctatattataatttttttcaaaagttttgcgagaaaattaaaaaaaaaaaaacatttcagtatatgtttttagatgtagagattgagtaaagaattgttattagcactcctctcttacttaataatactcgtcaatatttcaatatatatatatat

SEQ ID NO: 327115 - DNA, 1528 bp, Cannabis indica
atttttattttaaaataaaatatatttaaaaaaatatcttaacttgaattcaaattaggttattagaaaatattaaaatctaacaaaccctaaactatctccaatttaaatatccaactaattgtcaaatatctaatttatataaaaaaaaattaaattacttaaataacaaataagataatataacataatatcttaatttgaaaattgagataaatctaatgttatatttcaaatcttataatttaataaaatatattttaaaaatgatttttttttgaaaatttgatatggttaacaatttaaaatttctctagattatctttaagttttattaatattttaatgtcaaaataagagcatttcatattttattaataaaatatacaaatatctgatcttacaattaaaattaataaatcaaaataaaataatcaaatcttaaaaaaatcataatggcaagtttgctaaagaattaattttttaaatttaaagcctactattatctaaaactaatttaaattaactaaaaaattaattttaatctgataattagatttatatttgaaaatttagattctacacaaaattttaccaaaatttcaatattatttcattgaaaaaatgatttttataagttgaaatatggccaacatggtgcaacacaggggagtgcattgcatactctcgcgcgagcggatggggggcaatgtgcgagaaggatgactgcacgcagggtccttgaggcccatttctcggtcagcagtagccttggacagccctagtttgagaaatctcggacatggctttgtctgaagtcgtgttcgaccaagctacactcgtatccgcgcgcctcacaccaaccctagcctaatatttttttcaaacttcaaaaaatcataactaattcaattttaatccaaattgaattccataaaagcctaaattattaatttttcatcttattttttttttaaaaaatattttcagtatgaaactaaaaatattttttgtctaaaattcttaatgaacatacaatcatcaattaagcacataaaccaacataaaaacatccaaatcatcacaatcatcattttaaaactatattttatgaaagtaaatcattacatataaattttagaaaaccttacattgatgatagcaaaatataatgactccttccattcagatctccttgattcctttctgtagcagagcattatcaagatctaaaattagatcttctctccttcagtttggttaaccacagtcttccacactatgattgagtacttgacttgctatgagtgggcatagtactctatcactaaaagtgtacagactcggttttcaccgagttaaatctttatatatatattaaataataatatatatatgtatgtaaaaaaaaggagtaaatagcaggtgtccttcgtccccctctctttctatctatctctctatcattttctctctctcttcaaacacaaacccaaaagaaaacccacaaaccaccatcaccaccaca

SEQ ID NO: 327116 - DNA, 673 bp, Cannabis indica
tttttataaatggggttgaaaaaactgcctctaaaggctaacattgtagtagtgtggcggtagaaattgacatactataaacatcatcgaaaatattagtggcatatatcaaaacaactacctcaactagtagatcacacccataccaaccatttatcaaaataatacacgatatcggcaaaaagtttccaaaaaaggatagagctacaaaaacgtcactagaaaaagtagcaggatgagcaaaatgtcttagtgtaagttgtttttctcaacgggctaaatctaaaggtgaagatgactcgtcaaacggacattgagagtggtcaaaaaatccgttcaaattttgtacctccaaactttgacttgtgatcatgggctaacagcgatgaaaggggcggcactgcttggggttgaggtcatcgttgggtggggattccaatgcttcagcacgtgggtttggcagtgcccgaagtaggatcaccgaaggtggtacttgtgagtttttctttcgtgttttgatgagagagagagaaagagagtgactaagattgggcttcctttatcacatattattatgtacagtagaacctctatctaaaaagactctatttaagaataacctctaatttgtataaaaaaatcaagtcccaaattgggccaattataaataaga

SEQ ID NO: 327117 - DNA, 652 bp, Cannabis indica
attaactaaaaacaacaaaaaaaaaaataataataaaaatttagtatatacacttcaatattcataaaaaattatattgtaaatgtaaatgtgtatttggaagatatatattgttcggtaaaagattctcaaaacaacaaaaatatataactaaaaataataattaagattttcccaaatacctctaataattatttacacttattcaatattcataaaaaaaagatatatatatatatagcatataatttgagcttacccacatggctattaattaattaccccttacactattataattaagatagaattagtttccacaaaaatattctaattttagggaaaataaaaataaattaaaaagcatggatatggatatgtgaaagttgaatgagtagtatttataatgttggagaaagttgattccccaaggtcatatgtttcggctcaatccatgtaattatatcaattccagtcttaattaatcccaagacttttaattaatattacagctaattaattaaaataatgccataattaaaaataaattattatggcaaataattacaagtttttgtaaaataatcaaatgaaattaggagcatccaatagggtcatttttttttctttaattaattaattataaagctat

SEQ ID NO: 327118 - DNA, 554 bp, Cannabis indica
aataatatatatttttttttattgggggtcagtcatatgttttaatgtaaatacaaaataaataatatggagttaatagatcaatagactgcattaaatggtagctttaaatgatgaaacagaaagatgaaggtttggtataagaaatcgtgcaatttatttgaataaaggaggtagactttaattttgatgatagtaaggacaatgttcaatgcctttctctctctatatacttggtcaaaatcaataaataaataaatatatatatatatatagatttagttgtatagtaggtctctaagttatataggtttcgataaattggtctgtaaattttatttttagcaaattaatctcatttggtatgcattctttatgtttttgcaaattaatctccaaactttttattttcttaaaaatataaagtccccgctcttaaatgatattttatttatttatttatttagttttatattagttttaaatatttatatattagtataagttatgaagttaaaaaaaataacatatttttattttattatgtatttttt

SEQ ID NO: 327119 - DNA, 770 bp, Cannabis indica
gcaacacgctgtttgaacgtaatattcggcatgctaaacttttccgaatttcttaaaattttgcaagatgtcttaaataactgtaacgtacttgactatgagaaaaaatttgaccaaaaaattatttcgaatgctaaaacaaataggagtgcatcaatatacatattttaagagggtgcattgtagaattgtctatatatacaattaccgaaaaaaagttggattaaaaatttctttttgagtgccaaaaaataagggtctatcgaaatacttccactatcctatagatttttcttattttttataattttcgtaaaccctcccgatattagcgccaaatcaacggctgagattcaatcatacgttcaaagtgcaggtcgatttcggtcaaaccgcgtctcaaaggacctataggtaaattaacggtggagattaatcaaagagtgctgtgagcaacttcggaacttggtctcagtcactctagcttttcttagctcaattattatgattattattttcggaaggttgaatctgacgtggaatttttggtctgaagagccacagatacgcatttgttttttctcatttcaagtgtgtgttcgttgttagttaagaagagtagtaatcgagtggacccatccccactttaaaatttgtggtctccacttgactcgaatatacttatccatttatgaaatattgtaagttgttctcaaagattttgctttcattaaattgtgatgtttttttttagagtaaatattatttta

SEQ ID NO: 327120 - DNA, 1100 bp, Cannabis indica
cccaaaacccacgacacacgcagtctttccagcacttcagttcgtgctaacgtttcacacagaaaaacaactttgggctgcttttagataactaaatccttctagaattgaatagcccatgggttcccaagcccatggcaattccaagaaaatatgctcataataattggtgggcctgaacaccaaggcccacctgtaaatcgttttttggctcttcattcaaattctccaacccgcccatattactatcagcatcatcaatctcctttatattttccttattagtacatctcctcttattatctaaaataataacagaatcttcattttgatcttccaactgtacatcctcattgtcttgattttcattaatatgcatggttgtcttcccttgatttactccaccattaggagcttgattagcaccccctttagcaccagaattattgccatcagattgaattctgattcgataattaatatccatcacctcctccgtgcttatgggcagtccactactggccaccgcactcttctcctcatcatggcctgaacgcaaccattgcgcacctatgaggtagttcttctttctagtaacaactttcatccattccccataaggcttaacattttgatcgaaattagaatcaaatctccgtggacaaaacctttctgaatggccaataagaccacaaatgaaacaaaatagaggaacatgttcatacttgaatgtagtccatatccaagtaccatcttttttaatcaacttcatgcgtcgtttaagaggtttgttgatgtcaattgtaaaccgaactctaagataatcccgccatatgccaatgaaatttttggggtccgacttaacgaactttccaatgtagttaccagcatgtttaaccacccaatcagacataaacccgtacttcgaatcatgaagctgaacccacatatccaactcatacaattggaccaacagaggatcttctcccctcttcaaacgatgaaaaaccagttccattctattaaaagtccaaggactccctgttggaaattattttacgaggatctagatttactaacaagtatgttggattaacaac

SEQ ID NO: 327121 - DNA, 604 bp, Cannabis indica
tttttttttatgtttgttttataaaaaaaatattttataaaaattccgtgtaacagtaaaattataaatttttatcccaaattcaatatttttataaaactctatattatataactaaattaataatgtgatcatatacttaattaaatatagatttttcatatatttatacataaatatatattcttttaaagacattaaatcaagtaattataatatttagtcgttttcaagacgttaaattttgtgcacaatactattattgggttcaaagcatacataattaagttaaggaaagttgaagacatataacaacaaatgttgttatctattgtgacagttatacaactttaaattaataagatcactatcaaatataagtaccaaatatcaatgattggatttgacaaataaaatatagctaaatattacttataccgcacattacttaataatctcaattaatattattctacaacactaagacactgaaataatacctaaaaaaacctcaaatataaagtagaacctctattcaagaatatatataggaccaagtaaattatattttaattgaaaagttataactaaatagaattacact

SEQ ID NO: 327122 - DNA, 764 bp, Cannabis indica
atttttttatatttataataattttaatatattttaaacaattaaaattacgtaaacggttaaaaatatgtcatatatgtacaattatatacacatcaactattaacaaatatttttggacgaaatactaaatactacaacataaatgaagtttttaagatactatcattcccaaatgtttaatttgtttgtgtaataaaataaataatttagtggtattactgccaacactcttaaaataaatgaaaattataacattaatctcagtaaaacagtacattagaagaatattgttattattgaatttggcatcttaactaaaatgcttaatgtcaaattatgatgtaataaataggtgcaaattaatatccaattcataaaaatatcctttggcatgtagaattaataaacttaagatcacagtattaattgttctttcaacaaaccatagccatgactctttattaagctatgttaagaatgttcccattcaaactattctttcactttattcacatccactagagttgcatatctatctttgggcaaggagaggagtcatgactaattatatagggtaaatactattttgaaccttttgttttgcaaaagttactgattggaccctgtgttttgttaaatgacaaaatagacctgttttccaaaataataaaaataggaccctaagcttaatttttgacaattttttttttaatataatcaacttgaaaacaattcttaatatgaacagatacagaaaatgt

SEQ ID NO: 327123 - DNA, 1010 bp, Cannabis indica
tttatttttctagttttttttttcctgtgattgtaatttttatgacttgtaatttattttcttaatggtatataattttttacaactactatctatgtataatcccacattattaatttaacagtcaaccttagtcaattttaacagaattagatagaaggattatactattccaactgatatattttagggggtatttttaactacacttataaattaaggggcatcatagtatagtgtcataagtacagggactaaaaaagctaattattctaaatttaatcgcaaatgctaaaacatattggtgcttattttagagaatacaggtaaaaaataaatttatttagcaaaatataagaatgaagaaatattattcttaaaatttgtattgatgatttacaatagcattatgctataattttttaaataaaaattaaagatactataataatttaataaagaaaaaaaattatatatatataataatgtgtaagattataattatatcatttttaaaatatgttataaaaatatttttagaagtaaaagtgtcaaaaatgatataaaagaaagataaaataaaattatatttttggatgatgtagaaatatatagcatttcaataatgttactattgaagatgttcttagtacttttttatatgttaatattactattggtctaattaattattaggtatcgtatagtttaatgtaataatttttagaaagtatcgttaatcaatcgcaagacgatatgtgtagaagtgttattaggtactaataatatcccgtgcctatagcaattggttagcaatactctttataatttattttcttaaaattatatataatctgctacttatttatactaatgacggtatgacactacgaatggtgctagatactagtagtgcttttagtgattctcttaaaaattattagggcccgtttggtacgcatgattggactggattggactgaaaagaattggactggactggacaagat

SEQ ID NO: 327124 - DNA, 891 bp, Cannabis indica
ccctgaactttgacatgtacaaatcatgctctctgaattattaagaccgttaaagattctctctgaattattgattcaaggagcatgatttagtatatgtcaaaattcagtgaacacaaaaatactaattagtcataattatataataactaacattattaggttaattagcattaaattaatctcttttattataatcatataattaatattgtaaaatcaactaaatacaaagttaacattaattagttaattaatttatttggaagaatacttttaagtttgaattaatactaattttatggtgaaaatgatagaacataattcttgattataaattctataattaactagtttgagcaaatgaattcaagaatattgttgttgaatcttcacatgaagaagtagctagaagagtcatacgtgttggagtcttattgattaattaattaattaataataaaaacccaaattaatatgttagaacaaaccctagctattttagctatatctaaacataatataattaattaaaatgacagtcggttttgatttgatatctaatccattaattagtgtaataataagttactttatttatttaaatatattttctttcattctagatttgttggtaagaaaatgacttcaataaagaatttctaaccaatcttctctaacacaattaataattaggaaaaatactctaattttgtagcattagttataagtagtattgtatacttaacatatattagccaaatcttctatatattcatttatatatataagtgaagttgtatatatttatatatatatatggaggaagttttaatagttacatcaaatatattatcataataattatatttatttttagtcattggatca

SEQ ID NO: 327125 - DNA, 717 bp, Cannabis indica
tttgaaaaaaataataaatatatattattttggaataataaattaactattattcaaattacatgcttataattttaaatctatagaataacacagtaattaaattttaagcaaaaataaatataattgatacacttctttcatttatgtaagttgtatttgttttacattaatatgagattgaaggagttgaagagtgagagcctacgagtgaaattgcatgtaactaaattttaaatatatagcttgtaaaaacaaaacttgcttaaaaatcacatattaccaaaatttaaaacatatttgtgaacttaaattactactgtaaaattaaactaattaatatggattgtacatttttattaacgcgtgtatgtacattgaatattgaatgtttgtatgcaattgaacaattttaattataaaatttataaataaaatattattataacatcatgcaaatgttataattgttatatttttaataatatttttattatgtcatcaatatttatttgtatgacatttataattaaaatgtcattatttatttttaacgatatttactcatgacatttaaaataaaagtgtcatagataatttgttgtgaaaaatactatgtgttgtagtgaagggttacagatttgagtggaaggagacatattagtccgctgcacccaaggtaaggtttctcatactttatatgtgtttacttataat

SEQ ID NO: 327126 - DNA, 713 bp, Cannabis indica
  modified_base (75)..(75): a, c, t, g, unknown or other
gaacctctaggttttcacaaaaagaaactctcttcccacaaagatgaaaatttaaaaaatgaagctcaaggaggngagaacgtttggctgctctataggtcctatttatagatcatataaatcctagagatagtcacaatcacgtttgtatagatgaacaaaagttttttgaaataattcttgatttgtagcaacaagattgaagtctatagtggcagattgggtcgaaaaaggaaactttttatataagtctaagatcacaatttggacttcattttctgccataaaaaggttagaaaatctacaatatacatagaaaatcgttcaaattaatcaccatacaattagagttaattataccaaaaatatgccaatttaaacaaactttttataaagagaattctctctttttaatgcaaagtttcctaaataaaaatacaaccataaaaaacgtgataaacacacaagaaaaaataagaatattttatgtccataaattattcataataaattaagaatattttgacatttaatattgtcaaaagagacctaacagtatggaatgaaaataatttttattctattcttttgtttagttgtattttaaaatattataataacattccaatagaatgacttttctatcattttaggtaaaacaccctaactattttaggcatgttaacgtgattttttaactgactgtgcagctc

SEQ ID NO: 327127 - DNA, 1155 bp, Cannabis indica
tttttattcctcgcaacacattgaaaaatgggatgcatttatctatggattttgaaatgaatcgactaaggttgcaatccttccagttacactttgcacatccttgaacttcttggggaaaggcatgtcgacgaatgctttgatcttctctgggttgcctcgattccttgagagctgacaataaagcctaagaacttcccagatgagactccaaatgtgcacttcttgggattgagtttcaatgcatacttctagaggactaagaaggcctcctcgaggtcagtgttgtgcttcgcagaagttttagatttcaccaccatgtcatacacgtacacttccatattcctcctaagctggtccttggacatcctgttaaccaaccgccgataggtggcttcgacgttcttcaacccaaatgtcatcactttgtaactatacacgtacccccttatccatttggataccggtatgttcttgatctgcaacgtgcattttgatttaatcatagtcagagtaggcatccatgaagctcaaaagctcatatccggatgtggtgaccaccatttgatcaatccttgggagtggaaaagaatcctttgggcaagccttattgaggtccatgaagtctatgcacgttctccatatatcattaggcttagggaccagaatgagatttgctagccacactaggtacaatgattctcgaaggaaatcattagtatttctcagagaaataaggttaaagacattatttttgaggaggaattgaattcaaattcagttcttactatcacttttgacaatgtataggcttctacaccagtcattgattaagaaatgaatctagaacctcaacaagataatgttaaacaactcccaattcaagatgaggtaattgttccagaagaacaaatttaataccctcaagaaccagagataatagaacatgaggatgacaatagaatgatggaagattacctaatcaatttttatcagaccatgaaaagttctagttctcaaaagtggattgatgacatggatgaagagattaagtccatgcaagacaataaaatttagggaacttgtcccattaccataagaagaaaaaataaatttaggagcgttgagcagagactcgtactgataacgtattat

SEQ ID NO: 327128 - DNA, 874 bp, Cannabis indica
tcctctccaagttacaacatgtaggttacaaaagtgtaggttaaaatcataggttacacatttatttaccatacacttaatatatattattcacatatatttatcacattttaatctatactttattatattataaaataatataacaatatttgcaaggaattaaatttgacatttagtctaattttacttttgaattttttatttttctctttaatgattttctttgctcatttagcctcgattaattaacttcctattaataaattattcttttcatgcatttagttttccatgaaaggacattagttaatatataatattaaatgctttcaaaataatagataaaatattgaatattaaaaacatcaatattgttacaaaaaaaaaccattaatatttatttacagatcaccaatttttaacaaaatcatattgtcccataaattaaacaacttttttttgtaacgtcccataacttaaataatcaattttttttttctttcatgttaattcttaaatatcggaaacaatatctaggttaaagaacactccatatatattttaaactacataaattagtgtggtcactggccaccttaatagatttgtatgtactagatatatagtacatgttacacgtatcctacaatttaggtatacctaacaaaatgtcataattactatcatacatttaattttcttactagaaaggtgaagctaatggaaaatcatacagtagaacctctattcaagaatacacttgggaccaaataaattatattctaattgagaggttataactaaatagagttacactagaaaaaaaaaattaaaaaaccaaaaaatatcaacgtaacaataataagaataa

SEQ ID NO: 327129 - DNA, 696 bp, Cannabis indica
tagtgtggaagattgtgaagaatccaatcaacaagaaggagaatcagaatcaaggaaggagagaaagagatctaggttcagatcttagtgatgttgttctacagaaaggaatcaagggctagagatctgaacggaaggagtcattatattctgctgcacccaatttaaggttttctaaactttatatgtgtttatttcattgttttagaattcatattaggatgttaatgaaacgtacaatggtagtaaatctagatcctggtaaaatattttcaacagctatgtctctgaaataggggtgcaaaggcagcaccgcctcctactggatgtggtgctccgaccatgccatccaactgaaggtcagtcggtgtgctctctgatcccttgagggaacctcacaattgatgcctctagtccactcgttaatatcctatcgaaatcctcgacattgataacaaatggaggaaagacccatcggtctccctatgacccgacattaagaacctgaggctttgaagactgtacaaagacatggtccgaacctatcacggagggctgaccaagtctgttcaatggttttatgtcaacatcatataagctcagagggcagtgagaagacagcataagtcttgtacatcctcctcctagcaggcacagcctcctccacttcgaacttggtgtccgggctctcagcgc

SEQ ID NO: 327130 - DNA, 1851 bp, Cannabis indica
catacactttacgaaagaattcaaaattctcatcaaaaaaatcatcagacaagttagcataaaattctttgacaaatccataaatatatccctcaaaaccagtaacagtattttcccagtgatgatattgaacaaacttaacaataccatacaccctatgagcatgcaaatcataattgctctcactttcaaactttcgggtagcataaagattccaatcacattgattatcacggtaataaaatatggaattgacagcttgagaatgagagatattactaggagatgaactctacggctgcttgcctttggcagcaacagtggctttggttgcagaagaaacacgagggggtgctggagtagatttggtcaatggtggctcaaattcaagttcagtttcctcactatcagaggagactccaaagtcttctagaagctgtttttttagaagagatagtcatggatttagtctcggaatcatcagatgggacctccattggtttttcttcttaagaacttgaagaagctaaagggggattaagcttcagcttcttggcagaaggaactggtctgtcatggcttcgtttagagtgaagctccttctcgatagacgcctgctgggcacgagtgcgagtggaagggcctgctggagttgaggcagtaatgcccttacttgatgcagcaggaggagatgcagtagcacgaggaggagaccccttcgacgaagaaaacgatgaagtgaaaaatttgtggggacgcacagatttcctagcaacttgtttgagaattcatttcggcttgggcttcacaggctgagattcacgctaaggaagcgatgaatctcttgggtttgatgcagttgcagcagcagggagcaagattggagcagcaagaggagcattcgagggggcaggatcggattcttccatcctttttgggtgccctagattctttgtcttagccataggaatctgaaagatagaaaggcaaacaaagaagtagagaacaaaagaataggaatcgggtaggttgggagaataaataacaaaaaaactaccagccaacgaacacaaagaaattgccccactctttttcctaaattattattttcttaaaaaaataaataaaaggaaactagaataactaagatactttccaaaaataggcaatttaagaaaatccttcaagattaaagacaaaatacaatgaatatgatatcaaactttaaaatgtaacatgtcaaaataaattaatttagattaaatgttgatacttaccaaataaagcacaaaattttcttagcccacaagccaagtcaccaacgcctccctcttttttttttttttatttttttaatttttgaaaaaccagattaaatacacaaaaaaatttaaaatatcacaataattataaggtattctagagcaagcatttaaacaaatttcataacaactgacaaaaatacaagtatggtttttaagagaatagctaattagtatgtcaagaaccaaccatacttaattaatagatgttgagaaaaaagatatgcatgttacaaataatgtgaaccaggatttttttttattttagtagaggagacttacaaacttgtacacacttgttagacattagtgtgtggagtgaaaataagatcattgtccttggcaagatttttcttttttatctttttcaatttgatcccgcaactggatgttatcacgccatactaaaggtagcccttttctatatatggtagtgcatcctcttcataactctcaattacaaagttctagcttactcaaaagatggctttcacacctcagtatgggtagctctattccagcaaggggc

SEQ ID NO: 327131 - DNA, 709 bp, Cannabis indica
tttttggttgtaattacacccaattctcatgggggagtatgagaattggagagagtaattgaggcctcccaattacctctaattacacaattactatgtaattacgtggccacacaaacacgtcaaactgtgtaattacctccaattacatccaatttcaattctcagatagctttccaaacgcgccctaattatatattttgatatagaagtatgtaatgttaaaaattggcaaactcttcctacatacatcgaagctataagatcattgaatgggaagatgatgttgccattactacaaatataagatttttatgcccatcaagttgatcgacacaactatggatcactatatatgtcattgaaaaatttatgcaattagtcgaccaattatattggttataaaaagacacaagattctaattgtacttcattctctcactctaatcacttcctctctctatcctaaatctctcaatcgcgtatctctcctagactcttgatccctctttctataaaccatgtctctctacaaatttttctctctttccttcaaatatctctcacccactttttcaatccctcatctcacttccatttctttgttctatttgtgttttcatttgatacttattttaatattaatatatttattaaattaaaattaataatttaaataactctaaatataaattttaatttaatattt

SEQ ID NO: 327132 - DNA, 936 bp, Cannabis indica
ttgcaaaagttaccaattgaatcttctattttgttaaatctattttgttaaataacaaaatagatatttatattttccaaaatcgtacaaaaattatattgttgttaaattatttaagacccatggtagcaccttaatcactataattcaccatagttaatattatgagcctaatgaccccttaaggttagaagggtataatcgacgctctcaacaggactgagtccaggtgagagctaaagaactatgtctcattttgtattaggtcatcctcctcttttattagttgtattttcagtcacactagtagaaattgtaattttagcgcccataatgtggcaaagtgggcgtttacccaccagaggtttggatgtcttcctattcattccatccctgaacaacttctttgtaatgaccgtgaggtctaaatttatttaactaatatatgcacgcttattttcaaaaaaaaaaaaaaaagattatgtatgtgttcttgggatgtatggggttgttctccataaaactccaatgtttttcacatttgatttatgtgtgttctttgtggttgttgaagcaaagtttgggatcaaagatatcaagatagccattagtgaatcaatgtcaagattaggaagtatgttctttattatgctaattaatacccttaataaaatgattgttctagtttggatattgatatgacaaactaacacaaagaacataattaattcatcaaagcaaagactcacctgtgatggaatgaccccacctgcaatatcccattcaacatcatattcaggtatgatgtacttaggtactgcaccagataagaccataccagatatagctgataaatgacaattccggggaaggattagatactctcccggcgaacatgtagccataatggcagcatggattccacaagtggttcca

SEQ ID NO: 327133 - DNA, 1762 bp, Cannabis indica
taaattgcaaacaaaaaattgtatagagaccactattacaactattactgcaaccactttaaaaactcaatccgtaaatttgaaaaaaaaaaataaaaaaataatatataaggtaattctccaaatctaatacaaccatctaatacaaccatatatatctaattgaattaataaatatagtatttttatttagtttagataaataattaaattttatgttatatatatagaaattaatattaaaagtttccttattattaatattattagattggatatatccaatttgataaaataatctaaatggaagaatcttatcactcaatgtattgaatataaatctgaactaatataaataaatatacatgaaaatacatttagaatagaacccatctaatttaacatttcaatgtaaaatttaatatccaacacataattggattggatttagtgaatatgatccaatacatcatatgcctatgcaatagtttttcaagtctatacatatatatatttatatattatatttaaacagaaacatgatacaaatatatatatataccatgacatgtaactaaatatatgattgtgtgctactaattattaattcatatatataactcatatatcctttctaagattatagcatatcaatttctataataaagatcactcgacatatattgtccattactaaatgaataaggtcccatttaaaatagatattgaatttgatctcaatttattgtatatgtatggttgaatgtcatacatatatatgtatgtaacaattaatatgcatgcatgcattagatgtatatatacatttacatatattattttgatagaacgtgagaagggtttaatggcagtggtagacttacatatctatttcaagggaagtgggcggtgcagacatttatctcatatcaacaattaattaattatataatgcgcatatatatatatttatatatttatatatatatatatataagagtatagtgtagtaccccacttctataatgtctagggcaaatatctttgtggatatggactcgacatctttattttgtatgtagttcaagaccaataataatgaagctatatatatatagactagttaaactttatatatatttatatataggtgtatatatatgtactgatcatcaaaattttataaactacttgataacaagacatacgagattattgatctaaacatgatcagaataatatacatacataaataaatatcatatatatacaatattatatcatacaatatatatacattgatcaccttaattagaaatagagataattataagttttgagtttaagttaaccccttattaattattaatataatatatatatatatatatgtatatgttgaaaatgaaatttaattattgtataaattaaatatataagtttaggtaaatgaatgtgactataggaatgtttttggacactcaacatgcatgatagtacgtgctataaatagtatattatatatatatatatatatattatacatagtagacctttttcaaagttatttttattagcaaaaaaataaactattatatattgtatattgagattgatgataatcaatagtaccatattgatcataacgtacctatgttaatcataataataataattaaaaaaaaaaagtttaattattgagtctagaactggtacattaatttgtaaaaaaaaaaacaaaacaaatagtatctgtttcaat

SEQ ID NO: 327134 - DNA, 1006 bp, Cannabis indica
caaatttgacaaatttaacaatttgcatttgactgagtatcaacataatctaatccagcatgactcatttcaccaacgttctgaacatcctaaaaaatgttagaaccatgatttaacgttataacctttcttttcaaattgtgaagatcttttgtcaaaaatatatttttataattttttgaacgcaacccaaattcacagcatttaattttttttcttcaagatcttagatgttgtgagacaattatttattcaacttaaccaaggaataatttttagtacaaatctgtaaccacttaccatacattacgttatataattctgcaaatgcttcctcatcaagttctaacttgtttgaatctgagtcagtttccctttcactgtcatcggtcaaggtattgttcaaacacaggatctttcttttttcctgtaaaccacttgataaaacacttgttacaacaatattttcatcatcaagtttgctactttcagaatcatcattactctaagtaacattaatatccttttttttcattgtattgacgcattcagattgaatatgaccataactttcgtattccttgcactgaataccctttttattgttagaaatcaacgatttagatgaagtgtcctcttttggaatttttgaaaaattactttgatttcaaacctttgtatgtatttttgaaaatttctttttaacaaagccatttcatgatcttcctcgtcatcagaaacatatttttaagaaatcttaaaaggcaataccattgagttgaagaatttagcttacccttttgcttgatttgggtgtttagctcaaatgttctttatgaactcacgagcacttcaaccttccttttaccaaagtcattcgcctcttccattgccaacaatttgtgtcgaacatgttaggaagcacatgaacattaattttctaaagaactactgattcatctaatttttctcccaaagcaaagaactcattagtaatatcagataa

SEQ ID NO: 327135 - DNA, 1118 bp, Cannabis indica
aaaaggaaaaaaaaaaaaaatctttgccaaatgaagagtttgttaaattggaaaattgatccaccaataaatttttatccgttttagtatccgaaataattttttagttatattttttctcatggttatgtaacttatagttatttaagacatcctataaaattttaagaaatttagaaaagttcaacacgccaaaaatgcgttcaaacagtgtgttgcacgcgtgactattttattttatacacgtgtaaaatagactgtttaaacattattttctatattgtaaattattccgaattttttaaaattttgtaggataccttaatagctataatatatatgaatataaaagaaaaattagactaaaaaaatcttctaaatgccgaaacaagtaaagggtacatcaatacatcaattttaagggggtacattgttgaatcatcctgttaaagtaaacataaatatattatgggtacttctacaatgcacgccctaaaagaagtgtactaatgcgcccatatctgcttccgcattcatgagaatttttagtctaatattttttcatagttgtctatgttatagctatttaacatcctccaaagtccaaaatgttaagagacttagggtgcgtttggtaaaacgtttttaattagtttttgtttttaaattaaaaaagtgaaattattttctaaaatcatattctatataactattttaatttttaattaagaatttaaattttgcaaacaaaaaaaaattactttcaaatttttttaaagagttttttaatcaatattttagattttgactccaacttaggccttggaaaccaaatccggacccgcccccggtcccgacctagaacccagccttgaacccaacttaaataaaactaacgaatgaaaatgaaattacataatacgcttttattatttgtttttaaattgaaaaacaaaaatagttataaaacacatttttgtttttcaaacacaaaattttaaaaacaataattttactactttattattgtgattaaaaaatttaaaaattaaagttaccaaacgccaccttaaaataatttaggtaaatttatatggtatactgacttttgtcatttt

SEQ ID NO: 327136 - DNA, 569 bp, Cannabis indica
aatatattcattttaaggggggtgcattatagaattgctaatattttttttataaaaatattttttaaaatgtttgaataaatttaaaattatgtaaattattttaattttaaaaaaaactactcaaaaaaattattagttcttctataagtgcttttaaattagaaaataatttttgattttttaattttaaaagctaaaaaaaacttatagaacatggccaatttaagaaccacataaagcgactgaatctaactatttggattacaggccccctcgaatcaaaggataataaataataatcaaaattactacttaattataaattaacaaatctaatataatttaattatattttttaaatatataaatttaatttaacttttaatttataaaaaatatatttaactattaaataataaaatagataaatgcatagtttataaagtatgattaattaactgaattaatatcaaatttaaatttaaaatatatataaaacatatttaattttatggatatttttaattaaatttaaatatttaaaactattttaaaaaaataattaa

SEQ ID NO: 327137 - DNA, 996 bp, Cannabis indica
cccattaatttctcataaaccaagaatttcagttatataggcagactttatatagaatagatatatcttaattttgtaaatagataaattgatgaaatatgattggggagataggagggagtgagtggggtccaatgaggtgcatgaataatgccacgtggcaggtttgaatggaagttggtatgtgtcgttaccattcacccaaccacaattaatctaaacccaaacttaaaaaacttaaatttttttttaaaaaaaatatctattattattattttctttaataataaagagagtttggataaagagttttcaaccaacattaatcccttcttttacgaaatcttaccaccattcttttctattttatatatagcaaataaattaaattaattctttatataaggtaatgtatagatatatttttttcatatatattaaagaagatatataatattgtgtaattaatttaaaattttaaatttaatattgttttttattaaaatttatccaaccgaacactaaaaattattacatatagtatcttgtaaatcacactaaaattgttttgtttttttttctaatatttaaataataattaaattttcttaattggtatgtgtattatttatatttacatattaaaataataaaaaatatattttttagtataatttatagtattgtgatggtaattgttaaaaaaaatagtattaaaatagtatttttttggtattgatttaacattaaatctaagttgtaccattacaattgcccttatatctataggggaataggaattaattgtatgggattgattctcattcatttgtttactaaattttgaaattggagaaattagtagacccacacaaattaaggagaaaataaagggaaaggttctctcccattttcataaggaatacattttcctttccttaatttactttatattaattatgtttttattaattaaaaataaaaaaagacaaatat

SEQ ID NO: 327138 - DNA, 1138 bp, Cannabis indica
tatatcatatttttatataatactatgttaaactttaatttatactaaaatattatatatttaggtgtctataaaagttaataccacatatagttttacataaaaatattacataaaatacaatataatataatacaatgcaatataatacgacctaatacggcgttccaaacgagtccaataagtccagccgaatacataaagaatacttttctttctctcttcttctcacttctcaccactctagaatatctagatctctcttaaatttacttggacaaaagtaataataataataatgagacagagaaaagaggagagacttaattgtagtagtttcgaatccatgaatccacgtacattcaaaattaaattaataataataataataataaaaaaaacaaaaacagtaagagaaatatatttggggataatattattatgagacaatgtgggtttgtttggattcgtggattgaagcggcggatttcagattatttcagactctttttggctacgcgtccatgcaactctgacgtaacctcttctccatctctattttttcacatctctccaccaataaccgtttcactaattactcacaatacgtttcgataaactcacatccaaccctctaattcttaactcacagacctcttattctttgccacgtgttagtctgatgatgctattggcctttcctttactttacttttactttctcctcctcagtcctctcacttctttttcttggtccgtacgtacaccaagtgtgacacgtggaggctgagagtctgagaccttctaattctgtttttttattttttttaataataataaaaataatgggagctcacgtgggtgtgggccatgaatgactttttacaaatgaggttgtgacacgtgttggtttcttgtttgaaatcgtagctctttggctattttgtagtttctaatagtagtattttctatttgtttttaaagctaaaatagctaaaaattgaaatgaaaagatattattgtgattgttaatgataaaagtgtttttgattgatatagtattaaaaaaagtttagaaaaaaaataagaagttttctatatttagagagtttagttggtaattttttttttttatttt

SEQ ID NO: 327139 - DNA, 874 bp, Cannabis indica
ggggaacaaactcctgagcataattctatggaacatcctccttagcatgttcttgtagaacatactcctgatgagcatggtcttgtagaacataatcttgagcatgttcttcttgaacatactcaccctcattctgttcttgtttgacaacattttttcttctatttaaggagcttttttttttttaatttgtttatctctctctatttttgagccataacatcaaaaacttcccttttcttcctgaaaaaacgtttagactccttgccaattaacttgacaaattaataaataaagttaacaaatatttattttgtctaaataatgaaataatatttttcaagtactaacatatccaacagccctgacacgtctatgatactttggtgtcctaagcgccagcaacagaatatcatttttgcgcctattcatacataaaatctactagttctacttcttggagaatttattcccttgacagtggaaaaggagtcatatctccctcttcagtatcatcaaatgctttcttcttccgtctatcatgatgatctttaggcaagtaccgtctatgatccatataacacatcttgtgtctatttggcaagcgacgagcccatgtattagtgcaacaaatcggataacattcgtaaccttttgtgctcaagtctgataaattactgttgtaggaaattagccaattaccaacaatcaatttaatcagtttaaacaaggtcaatttcaacctttaacaatcccgactttttaaagtcagaagggtcaatacgaccctgttttccttagacaaaaccaaatgatcgagaaccttcccaatcacttccctcagccctaggtttcctcgaaaccctagcaaaga

SEQ ID NO: 327140 - DNA, 904 bp, Cannabis indica
atgggctaccgaaaaacaagatgcaccttgttattgtgacagtcagagcccgtgatccaaaagggaaagaccggtagctgtacaatcgcacaacgtttggggaaggtcatatgtgatgattctgagaatgtgggtatgagactaatagttgaagatggcttaaatggattgattaatactacctatataaaaaagatacatctttattttcagtagcccatcacggtcaagcatgcttgatctgggttaatttctggggtaatttctcaggttgtgtgcgagtgaggacaaaacacgctggaaacactcgtgttgatttgtagggttagtcgtcattccatgaagcaaccagagtgaagtactcgtgtataagagtcattattccgtgagtgtaaggcccaataaaagcttgaagcggggacgttacatttcagttccaggaagacgactcatgtggtgggagatggtatccctcactcgagacatcactacgacgacttggaaagaattttgggatttatttaatgccaagtattataatgaggttgttcgcaatactaaaagaaaaaagttcactgaactaatttactaacaagtatgttgattaacatcctaaatatgaatatctctaaaacaatgaaattaaacacataaaggtttaagaaaaccttacattggttgcagcggaatataatgactcctcccgttcaagatctctagcccttgattcctttctgtagcagagcattatcaagatttgaacttggatctctttctctcattcgggtttggtttggaataattaatgcaggtggttttttacgtgcttcgggcattaatgagtcgtagtccacgcgtctttttttataatgagagttcttgtacagagaatgttcttggtgag

SEQ ID NO: 327141 - DNA, 1041 bp, Cannabis indica
aaaaaaaaaatggttgcactcgttgaagaattaaatatttaaagtagcttgcaacttctccccttttctcagaatctacaaaagcgcctatagtgtgcatcagatgatgtgtcgtcatcaggtacataacaactctattttggagttgttttgtaacttattgcttattctaattggtcatataatcttttatttgtgttcataaacatccaataaaatattttgtgatagtcatggagttggtggataattttcaaatattcaaaggagtatttgaactctataaaaagtcgtcactttctttttagagtgttctcatagtcaggggcggagacaaaaaaaaataccagggggccaactagggctggccgtaaactttagtgggtcatagaaaaaaaaataggcctttatgtaaaaaaattatgatatttttgaaatcaataaaaaaatatgtttatttttaaggtttttttttactcctgagctaggtggatctcaggaacatacttagtccatctatgttcagggtcgagtctgggaccaactaattatttgcaacataagtgtgagagagttatatcttaggtattttcatacaattataaaataaagttttaatacaaaattatattagataattgaaaaaaagtacttacaaatttaataccatacacacaacgaatgataataatatatcgtaataaaaatatatttttttgagtacataataaaaatatcttaaaatcttaatttttgagtatcaaagccacaaactctaatatacataataacataaagaaagatgataagttattttcttttcttttcatatgaaggaatatatataataaaacattgaaattaattttagatcaattattctaaaataaaaggaaagtgaacctcaacacaaaataattacttaataataagtatatagttagaaattagaaaaatccagtaatacacaagtattaaaaaaactgagttaaaaagtcaaaatataataaatatttatatagaggaatgaaaatgagtata

SEQ ID NO: 327142 - DNA, 1059 bp, Cannabis indica
aaaatcgaataggtcaatgcacttcttcacatctaaagtgagattaataattcatctattttccttttgagggtataaattatttaattggtaaattgcagcaaaattctcaaaactttaactttattagcaattaacctccaaaatttaaattttagcaataaaacctccaaaacttatgctctgttagcatttagctattttcatctatcttttagagttaagtaccacgttggctatctatgtttacacagggtattgtccacatgaagatattgtacacgtggcacaatataattggcctgtataaataaatatttaaaaataaaatttaaaataaaatataaatataaatataaaatttgctgaaaaataaaattttaattaataaataaaagaattcaaaatttataaagaaaaccctaaactttaaaaagcttaaactcaaaatttataaagaaaaccctaaaatttaaaaagcttaaattaggcatatctcattttaaatccagttaaaaaacataacaattagcaatataattcccacaaacaataagaacaatccaaattacaattttcattacagtgtaaataatattacaattcaaacatccacaatattaccaaatttacaatttataatatatttctattcacattaaactattaaactcaacataataaaagttgtgattaaagttataccctaagattcacaacaaatcaactattatttcaagagtttgaaacaagattgggaacatctcaaatgatgactagctggagctcctccattcacagctagggatgcacatttttctcatcgggatggggccccgcgaggacctgcccctaatggggcggagatttcccgtctaaattgggaacggggtggggacggggatcaaattttgtcaccgaatgttaaacggggcgggaatggggatgacactccccgccccgacggggccccattaatttattaattttttttaattattttatattttatatatgcatttgtatttttttagttatattaatatcatttttacaatt

SEQ ID NO: 327143 - DNA, 439 bp, Cannabis indica
tatatgatgtcgtctcgtggtggtgctactagcacaattggtgcctgttagtatttctaaaaaacagctagaaacttaatatatgatatatgtaaaagttagataataagtaatttttattttactgtagcaaaaaactaagcaccaaattttctctcttaatattgtctccctccctttgatgctatctcattctcatcaacacgtacgacaagccagagaacctactggtcaacagctgaagacgtataatgtgggtctgggtgtgcacacactaaacttgtcaaatcttatatattttttttttcttcatatttggtacttctctcgatatatatcttaacttctttgttttccttttcagatttgatgattagtgtctttgtgtttcacatgtctctatttgaattctctctgtaggaattttaagatagaattt

SEQ ID NO: 327144 - DNA, 2626 bp, Cannabis indica
ttcactttcaaaaatatatataaaaaaaaaatattaaaaatgagtgtcaaacccacacgcccacaccactgtttaatgtaatatacatcccaactaataaatttatgaatatttattatttacaatacacttaattttatatataaataaaagtctaacgagaccttttattttttattttgtaccctcaaaaagtgtgggccctaagcacagtgtaatcacctatgcttagagcagcctgattacaaatcactctgaataaattgggtaatcttaaaattgtttaactcatttcgtgctgaaactatcctcggcaaattacctagaggaggttggaggataaaagaatttatctaaagaaagtctcaaacatttgagaatggtggaaaaatctcgttctagaaatcaagataaaaatgaggtaaacacttgtaagtctaagttatctctattagctcccaattggctttcatctaaaacaatgtatacatggcatggacaagatgattgcctcccctttgttactactctcttcaaacaaagttaacctgaaaaattttgttgataacatttcctacaaataaaataaagaataaattacattattatcctagaaatggtcatgtgttggaggaggctgagaatccactagtacaactacaagttctcaattagctttcatttaagacaatgtccacatagcataggctatatgatcatcttctcattgttactactttcttttatacaaagctaacttaaaaaaaaaaaaattgttgataacatttcccacaaataacactatattattaaagttaagaattccttaacaattaaaacataaaaacatgctcattataacaatatagcctagggtttctctaaatattttatattgtttgctaggatttttcgtcctaaatctttagccacttgaggttgtcttttttctccggccagacccaccgaccctctttgcgtttaggtgtggctttgtcggggtttttgattttgctactgcaattaatcttgtctttctgatctggttttaagtgtcttttattcaagttactaagattagtcttgtatttgtgacattgttttgtatgttttgttttgtttcgttattgattcgtcttctttgttttttgatgaatcgtcattgaatcactgctagtagttgtgaataacaagttctctgcggctaaaggagttgttagtgttggaaacttattttaccaggatctatatttactaacatgtatgttgattataattctataatctaacatcctaaatatgaaattcctaaaaacgacaaataaacacataagagttatagaaaaacttacattaatggcaccaaaataatatgattcattccgtacaattctctagctcttgattcatgtttgtagcaaaacattatcaaaatctgaacctagatcttctcctccttcaattgtgttcatcacattcatttacaaaggcctaggtatcacctttaatagtgtgggttgatacccaaacacctttagaacaatattttgaaagagaaactatgtaattttcgaaaatcaagagaagaggaataagtgacattaagtttttcaattctcctctctttctttgtataggtattcacataaggttaggtttagatgagatgtgcttggaatgaagacttgggttgaatcttactcttagagtcgaatatacatatgggctttagagttagattttagccattttatttcaactaatgaaacaaaagtgtcttttctaattttagcatttctctcatttaattatttaaatacaagttttattttaataagtataaataattataaaataaaataaatataaaataaaataaaatttaaatatatttattaattagactcacgaagtgtactaattaacaagtaaatccctatttctcttttcttctaaaaaatgcttaaacttggtgaaaattttcaaataagacgtaatctattttcaaattctatttgacttattaaattaattagttgagtctacaagatgatattatccgagacaatatggggaccatgagcctatgtaaccaaacttctaataagtagatccaaaaataaaccaagtaaatttcctaacttattaattcctcttaactccactatagatttggattatactcttgattacatagaacactctatataccagatactgtataaatatattatgaattatccattatttcaatctaaataatcaatgatcctctatatatggtctacattgaatagggacaaaattaccatcttacccttcaatatattttatcctaaaacacttagctacttataaatgatatttcataaaattaatataattaccgaaatgagacattaatgatttaaatgcgtttaaccaagctttaagaaaactatcatttcacttgtatgtacttatagaagctatatattccattgatgtgattaacactcccactcaattgaactactgagttcccaatatataagtattagatcgatcatattggtcagttgtaacgaacaagttaaagaactcgtatagtacaattaagctaaaacttaatcatctcaggattgag

SEQ ID NO: 327145 - DNA, 972 bp, Cannabis indica
ataattaattataaatattaaatcgataaatttgacatttataggattagaattaaaatatgaaatttgtgaaagaaatgataagttgttaaataaatagcgaaattgaaacttgtagggcccaaaataggttcggccaacaaatatttaatcaagctattattttatcttttttaattccatataatttaaatcctaacccttgcaagaatactataaatagataatgataggctgtttgtttaacctgttaactcaaagtcactttgttaaacaaataagagaggctcctataaatttcaaattctcttctcttatcccctctagaatttgaaccatatagggaagagagtatttgctcccataattcaagtcaatactcaattatagtgtggaagattgtgacaaattccatcacccgaaggagatccaagttcagatctttgtagtactctgcgacaaaaaggaacaagggttagagatctaaacggaaggagccattatattacgctgccaccaatgtaaggttttttaaaacttatatgtgtttatttcattattttaggaaatccatatttaggatattagaatatagtcatattatcaacatacatgttagtaaatctagatcctagtaaaataagcgtcaacaccgaattagtgaagacgtcccccaggaaattcgagaattcccgaccaatgtccttcattagctagaccccatttttatttaagatactctccatgacattacgcctattacgaatagtggcaacaatgaaaagaaagaacttagagcatttgtccccatccttaatcaaagaaacatgatatctctgttactagtatgtagctttctgcctcaaagcctcattaaaggcctttctcacttcaactttgttatacctgaaattcggctgccatctcagtggaggacacgtgtcaagataaagggaatatggatcgatgcaa

SEQ ID NO: 327146 - DNA, 953 bp, Cannabis indica
tgtgaagagacatatcaccattggcacagccaaactctccaactcatctctctctctctctctatgcatatatttctattcatacatatttagatagagaccttatccaattggaatgtaatgttgttatatatatattacacaattaaattttattaaatgacaaaatatctctttaaaatgtatagtcacttttcaatatgtatagatattaccgttttgtgtatctgattatgacatttatgtatatattttggactatatgtatttatattttgatcaaaaaggaaaagtgtcatatttcatcaactttgctttcaaagaaaccttttttattattattatttctctactggtccctcctaattatataattttggctttgggctatgtgatgtggtatgtgatctaagcaaataaaagagataatgcaataatatgataatggagaatataaatttatatatatatctactaaatttaatatgagtaataattatataattaagtataaagtatataatgtggttgacctaatgtataaattatagctaaaatatatcaaccatatttgctgtaattatatgctttattagaacttaaaccttattagaaggcaaattaatgacacttgtcaatttgtacttctaaatatactaaaaacaattcatcttaattattacaatgaaatccactatatatgattatgacagtctgtcatgtttatcctaattaataatcgattgtaatttttttaatatactaaagttaaaagagaattactatgtaaattttctttctttttttttttaaggaaactacatacatatgactttagtttcaatgtgaaaaaataaataataatgatttaggtgttataaaataatataaaataatataaagtagatgagaagaaagaataagaagatgaagagagaaagagaaagtgaatg

SEQ ID NO: 327147 - DNA, 549 bp, Cannabis indica
gatatgctcatcatgagaaaagataaatatgtgatcaaaagtatcaaagccaagctcaatagagaatttcggatgaaagatcatggactagttcaaaagatgcttggtattgaagtctcacgggaccagaaggaaggggctattagcttaaagcagtgtgagtacatcaagaaagttattcaaaagttcaacatgaaagaagcaaagagtacatctgttccattagggggtcagtttgttttgtcaaaggaatagtgtcctaacaataggaaagagaaagaagagatgaaggacgtaccttatgttgtggctctaggatgcttaatgtacgtaatggtgagcacaagactgaacatagctcatgctctaaacatcctaagccgattcatgtccaatctaggcaatgaacattggaaggccctcaaatggttattgagaaagcaaaaggagaattagaattgaaagaattcgtggatgaggactaccccttgaatagagataccagaaaatcaaccacttcctacatttcttgacaaactagaactgtat

SEQ ID NO: 327148 - DNA, 701 bp, Cannabis indica
tatcaaactgctcttcctcctcaataattcggaggcgttcgctctcccctagagtaatcttggacagagaacatcacattaaaagcatcagcagtagccgggaaccttctttccacgcacctttactaccccatttcgggcggtcggggccaatttgcaagaaattcacaagccatagtcacattagcccggccccgagcatccacaaagctcccccacttcatcctctcaatttgggctcgaattgtctcaaatcgtggttgacgtctcaaaggattttcagggaattcaataccccgattgaaaccctaattttcagcctcatgaaacgattctgggcctccacattaccaaaccgagttctatcaaacccgtagttggtgggtttgatgacgaaccctcctccacatgcctagttcttttaggtgcctatttttctagaaaaaataaaatattatttttttctttttcttttttttcttttctctcttttttttttggattttcctttttttcctgatatttttttttctaaataatgctaaaaaaaaattgggcagcacctcctcttaattttctatatcccaaaaattcaaaactaaccacaataatccagacaaatacattcatagtccaaaatcacactataaacctaataattcctatatcaaccaatgattccaagaataatcactattttc

SEQ ID NO: 327149 - DNA, 711 bp, Cannabis indica
tatacttatacgatacaaatacatttataatttataataaatatataaaaaatgatgagtacagcttacaagaaagataaatgctttaaaggtaagaaactcggtgacatggccgtgtgtatatgtcgggaagaaatttaatttctcgtttaataactcactatatatatctataaaatattattattaattacaaaagaaaaaccaagtataataattgatgtagattattgggttgtttaggcacatatattaattttaagatatgatctagaaatgtaggttccctacatctttggggttgattattactttctcaggtcattatctctccacctatatataatttatcttctagattaaatgcactcgtcacaaatccaaatgctatgagaacggcgatcaataaaattattataagatattgttcatttttcactgtcaaataatttgatataaattatataattcaatcataagggttggcttgtgcttctggggttaaaaggccatgctttcagccttttcaagcttaggttggtggttctctgcggtcgatgcttaagagggcccgtgctggtgagtctgattctggtggtgtttcttctgttggaacctttgaacaggcgggtgatgcggagcacacccgcccagaaaaaatgagttttatgagttggaatgctcgtggattggggaggtcctcgagcattc

SEQ ID NO: 327150 - DNA, 642 bp, Cannabis indica
aacccaaattattatcatattcattcacgccttaatttctctcaatctaccactagtttcgcccacattgatcttttcagtaggacaaaaaatatgcatagctatactgtaataatctaaggaaaaatacaaattaaaaagataataacaatataagcgcctattacttttctgagcgcgtacaattaaaacattcattaaagtgtgagttcaaaacattgctatgcagtattagggtgtttaacattactatgacctgaccccacatagttaaatacggttttttataattttttaataaaataaaatatataaaatttgatattaaattgtatgaataaagatacagtagaacctctatttaagaataatttattcaaaaataacctctaactttttgtaaaaaaatcaagtcccgatttgggccagttataagttataaataaaaataacttttaaattgttataaattatacattttctaagtcgcgtattaacaaagtatacctctatataagaataattacatcttaataaaatatatacatgtattttgtaaatttatttatgtaaaactaataattttattttaaattataatacatgtatgaaattatatttactctaaaatatttctattat

SEQ ID NO: 327151 - DNA, 588 bp, Cannabis indica
taaatttgattaattgatgaataaaagaggcattttttaacttaccccgctaatcaatggtacgaggaggaatgaaagagttggaaaagctgttttgggctggactctttccatagtgggccctttcattgctacacctaagcccactttagtacctctttttactttatttattattattattattattattattattattattattttgataaatttaactttgaaatttgatattcaaacacattagattagatacataatatgtaattaaaatatttttttattattattaaaattgaaaataattgcgatacatcataaacaacaagaaaactttgtaaagaaataaaagttaaatgatgtaaaatcaatttgataagataatattttgttaaattatgtgaatgttgatatataattaaattaaaggtagttgtgataaaaaaaaaagtaactgtacagtaaaagaaaattaacatgtttaaatgagcatgagttaatgtctcaatttttttttaacttagtatataatatgattatattctttttgttgtacttctatgtttttttttttcttattggtcg

SEQ ID NO: 327152 - DNA, 1404 bp, Cannabis indica
acaatatatttcatacaagcatgtttctattttaaaatatttgagcatgtgtattatataatgaactaaaattacattagtattaataactattcgattatttaactttataccttgtacagatattgcttttagtaactaatttattattcgtattaaattaatgatataaaaaaattcatttttgcatgctaattagcaaatattttgtcactcatctaaccgtaatatatatttgcataacttacttcactacgaatgaatatttaagatattcaaattcatctagcatacatattattccactactcattcaactaaagtataatatattacagaacttacttcactacacgaatgaatatgtaagatattcaaattcttttaagtattcataattaattaataataaaagttagtgaatatatacttgtagctaactaaaaactggtcaacgtcaaataagttgaattcttgcaaattgacctcacaacgtacaatacaaactgctcgtgtagaacatgacagaatgaaaactattcgtgaaagatatggtagattattaactgcttgtatatttcaaaaaaaatgacattggagatgcatgcaactcaatgtatcttaggctaaatcgagatacaaatgtttagattgcgaaataaaagaaaataaacatatttaactcaaaagcaagatgcgaggcataaacagtaaatatataaataagcaaagttggtcatccaacaatgtaaaagtttttacaaaatgccacaagtaagatttggttagtagacagactacctttcccagaggtcaagtgaggatattccaactcattgaaaataacatttctagcaatcacaatatttggtttaaccttcttgaaaatgtagattctataccctttggttctttaggcataacataggaaagatcccttcacggatctaggttccaacttgttaataaattaatgtacatatgttgtacacccaaaagtacttaaatgtgttaagttgggggttctgttgtaccacatttcataaagtgtttttaagtctatcactctatttgggcttgtatttatgagcatccccccaaaaaggtttttctaatctagatctgaacagtaaacatttaacattgttaattaacagggttcggttcatctttttagcaacaccattttgatcagaacaatactaataatgtaattttagttcatgctatatatatagtacacatatgctataatattttaaaatagaaacatggttgtctgaaatgcattgttttacaaccacaccatgcacacatacatgcatgaccacaaacaaataattaattaaagggatcaaatccacaaatagtttttggctacaccactactacaatgttagcttt

SEQ ID NO: 327153 - DNA, 2188 bp, Cannabis indica
aaagaacacgaatacactcttgagattgaacctaatcatatcaggattaagatcatttgatctaggatcaacaggtgatattgaattgaatagatattacggtaaattttaatatatctaatcaaagttcaatatcggtcccttccgatgtatactccatacatccgatactggtaaactttgccaatgtcctggaaaggacataacacttttccaaggtgtaagaatacctatcgctgattataccatgtcagtctaaatccagtgttctgacaaatcagggaataaactttcgaacatataattaagattatattccactgtgctgacaacactataatcattaacaaattcatatgttctggacttaaatagaattcatacattatatataatcatgaaataaatcatgtgaaccatgcaacataaaatgttatttctgatctttattaataagtaaatctgattatattgaaatgggttttatttagggcacaaaacccaacacaaatcactctcggcactgaaattccatccaccacaaacactcaaaggccagttagagatgatactgagcttcaaaacctacgagctgtgctaggacttatgcaaggccacaataacacgttgcacaatgataagcaggatctccgaacagctatcaatattgcctttgatgagcaatgacatcaattcatagaaaattcatgagagctcatcaagcagccattgacaattattctaggcaggccaccatgctgatcagaagggcctaccaagttaccaatcaataaccagtgactgattctagcattccctcgagtaggtcataagagtatgtagctgatcatgctgcacaaacttataacggtcaatcgtccaattaaaggccacaggtttaaactgtgggccaaatggtagacggacagatcttgccgaaccaccccttgggaggaggtactcagacagagatatcacaccaacatctcaatcaagttagtcagacccaaagacctcttggtacattagtgttcgatcgattaggtaccacacatgacctcagaaataatttgaatcgcaggggactagacgggcaaaacatttcaccagccgtccagccaaataattatgcctaagatccagtttaaagagatattaatgtgacacaggtcagtcaacaacatggccaagttcatccacttgtgcaagcaaaaatatatcaattaaaagccttgtacaaggcctggctggcccaaaactcacagatttagaactcggccgggcaagaggatcaccattctcacttgaatcaatgctcttgacttaccccaaagtttaaaatgttagtatggaagatgtacacaggaaaagaagatcctttatctcatttaaaatactttgagatgcaaatggatttacaggggtaagaagcagtgtacggtgcagaatttttccagccaggctagtacaggtcgcctagcaatggtatttaaaggtacctctaggaaagttcaatttatggatttctttctcatttgaattccatgtacaatttttcccctctcatcagcttctctcacaccttgaagactcggtagaagtgaaacaaatgccaagagaacctctaagagcttacattagcaggtttatgactaaagcaacgaaagttaaggggctgactgaggaaggaaggttggccgcaacactgggggcattgagcctctagaagaactgtggaaggatattaagagattaacggtgggataaatggtagagtttttggatcgagcagatggattcattaaacttgaagaggaagtacggtgtgaagatacagtgggacacaagaaaaatttaaacacaccactacaactgctacatccacctagaattcacagaatcccaatagtttgaatcaaaatggaagaaggtcgaacaacggcaatacacagggaaatggaaagaaaagcaagttcaacgacaactctaaacagcatcctatggagaatgcctcaaaattcactactttctcagtcctaatagaatagaaacaatctatgcaactaccttgtctatggtgccatacaagaaaccctctccaatgaaaaaggacatgagcaaaagagacacaaccaagttctgtcattttttcatgcagactacgaccataatgttgggttttatgccc

SEQ ID NO: 327154 - DNA, 726 bp, Cannabis indica
agtaatttaaacttttttttacatatatacatatatataaaaccttcttaatcgggttgatcgggttagttcaagttgattggacaggttggtattattttcaacccacctaatataaatattgggcggtttatattttcgtcgggttatttagtttggattaattgtcaggttatgtcggtttagtttgggcaaattattcaatttaggcagtttataaaaacttatgtacaaccctactctactatgcatctgcttgtattacacaatcaattatgcatttactcgtattacacactcagttatgcatctgctcgtattacacactccgttatgcatctgattataatatacacttcaccatgcatttgctcatatacaacataaactgaccaggtcaaaaaccacttctatatattttagatataaaacagttatttattcttattcaaatgttcaattgtacgtgaaacgtggacatttattagggtttaggccttgaaaagcctgaaaaaatatttcaatttataaataagagttgaacattttcatatattcaatgcttgaatgttaaattattaatttaatattaaatcattatatataagtatcaaaaaatttcttattcatatatgaggttgtgacttgtattatataaagaattaagatcacttgccacaaatataatagttagcaacatattaaagttatataatctttaatcaa

SEQ ID NO: 327155 - DNA, 531 bp, Cannabis indica
aaaaaatcgtatagaaactcttattgcaactagcgctatatgaggctttttcattagaggaattaccatagaataattcccctatatgttgtgtatttgtgtagatttgtttatacagtaggatgtcttaatgggaaggagtctcattgggatatcaaaaattatgtcttattttgtaataatgtaactcccttgtttattggttgtatgtttactaatattagtagattgtgtaactttgtagtccataatgtgttatttgccattcctacaaacttattatataatgacagtaaggtctaattacttttatctatcaaaagtacgcttttaattttttgaatgaagggaagagtttattttcagtactaagaggaattacataataaccaaaaaatttgtagtggacctctggtagattttatttggtcttttatttttttttataattgcattatcgaaaattagacttaaataattatttactatgtgtaaaaaaaaaaagaattacgtaagctaaaaaatatataa

SEQ ID NO: 327156 - DNA, 1887 bp, Cannabis indica
caaaagtcgttaaatttaacaatagtttaaaatttttaatgattaaaaaagttcaggaaatatgatttgatacatgtcaaagttcagagagcatgattataaaagtaatattgttatgttttagtatatatatttaaaaaaaaaatggttaataccattttagacttttgtaaaagttacagaatgaatcttctattttgtcaaataataattcagattttgtattttttcaaaatagtagaagatagatcttgaacttaatattttgttataatacctccaagttaggctattattaaattttaatttgataaaaattaaggttagaatctattttgtactattttgaaaaatactcaattaattaataaattttacaaaatacaaaatttgaaataatatttatcttaaaaaaattatgaaggttttttgtaaaaatgtattatatttgaaaaaaataataattatgatatatttggtttaatttttaatgttgtattatttttgaaactatttctgttgttatgctttatgtaaattttaatatttagttagtaattattaaatatatatacataaaaattaattataaaataataaatgaaaatttttcaaaatttattactatccacttatatataacataaatataattataaagtatcaaaaaattatgtaaaagtattaaaaaattatgtaaaagaacttgaggctagctcaagtagccatgggtgggtgtgtgggttggaggtcatggattcgagtctcaagtataacatggttgtaatatataaacgtttaaataaaaaaaaaatgtaaaagtaaatagagaagtacaaccgtcgtggtcgaattatttcataaatatacaaatacaacaaaaataataatagaaatatagttgtacagaattttaaatgtttttacagtttttaaaattttatttatagaaatataatcttttaatattttcatattatttttatgttgtactgttattattttgttattgatttttattatttgtatattgttttgatgttgtttggatgttattttcctgttactttcacctgatttttttgttatttttgtattgatttaatgaaaaatgtaaaaatgtaaaaaaaaaaatgaacgtaaaagtgtaaaagttttacaaaaaataatactttgtgtaattttctcattattttttcttttgaaaagtatgaacatttttttaatattttttaaaaatactacatatttctttcatgagggagggcccaataatatattttttgtccttaaaacccacaaatattcaagatcggctttttgtatcaccaatttgaattttcattggagatgatctaaatcaaaaaatgttttaaatttagtacatgctaaacgttagactaaattttgcatttaaatattttttttcatatagtttcaatataaatttgatgactataggttgatttggggaattaatttcaccttgtgcatataagtacaattataaaacttgaatcaaatataacatatgatattttttgagcttccttaaaaaaaaaaaggttatctttttagagaattcattataaaaagactaattattacaatttatatataataaaacatatttatattttactatacaataaactatacattttaaaaactggtccagtttgtttactttttttatattatttaattacatattaaaaaaaaacaaattcatatataaaaaattttaaacaatttttaaaattaagaaaatagtttattttgtttgtaaacaaaatagtttatctttgtgtttatctaaactaaacaattaaaaaatatatatatatgtagggatatgattttattccgtgattgtactttcacgga

SEQ ID NO: 327157 - DNA, 1038 bp, Cannabis indica
tattattttttatcatttatctctcatttctttttatgaatttttgctgttttgttgttcaataaagattattataaagtaataacacatatggtgctttaataccaccaccgtacatttttttcaacaccaccatatgtgtacatatggtactcaacaccacccttaaccatatatatacacaagaatactcagcaccatcatatgatactcaactatgtgaatatgagtattattatttgacattttatagtgtccaattaataacattacatcctataattagttaccaataaataactgtataccacctatatgattctttcttagcacaaccatatggtactactttttccaaatatatttatttcacaattggttccaataattagagaggctggtaaaaatcaaccccccattttttctaaggcgagtgtggatatgtagcaaccagcatggaccacatgctatgtgttgattggttcctaagattgtgaaatcctagaccagggtaaatgtttgcccaaaacatgacacgtctaattcaaaggataagaaaattaatatatagttgatcatcttcttcttctcgtgccaagttgttgatgcaaaaattaaaaacaatgaaaaaaaaagaaaaattgaaaacacgtccctttttttattcttttgatatataatgtaggttgttaaacagaaattaaaattctaatcgatggcaatgccataatattccttatatgagaaaaaaaacaaaacaaattgatggagaggatattatttaaagtcaaagctttcatacaaactgacagttcattaaatataatatattgcttatatttgtttgtttgttttttaattttgaaatggataaacatgtatattttaaaacatatatttgttattaaaaaggaaaacatatagttgcatgagcacattatgattaaaaaaaatgaaaaagttacgtgaaatctcttcaattaaaaacaaagttaaactttccggagtagaagaaagatattaattaatggatagaaa

SEQ ID NO: 327158 - DNA, 604 bp, Cannabis indica
tataataatattatgtaattaaaaacataaggaagtacattacagataattaaaaaaaaaaaaaacagtttaaatattttaatattcaaattcagaaatatatcttatttaaatgtgtattcaaattcaggggccacgatcttagggaaaaaaaaacaaatgcatccctaaatatctttttctcattttttttccatttctaaaatataaatatcaacatatttaattttatttaaatgttacttattatttttttttaaaaaaatatatatgattaaaaaaaaaattgatatagctttaatattattataataaaataattatttttatgttattattcattagattaattttttttttcttgttgtactagaaaaaaacaacatatgcgattaaaagagtatgaataacaatacacttttattaatttacgtaatatattatataagtaattaagatttttatttctccgaactttgacatacatgcagggcaggccctaggcgcgggctaggctcacgcctagggcccactcattttaggagcccaaattaaaaaaaaaaaacttaacaaaaaaactgaaatttgaattaacttttacaaa

SEQ ID NO: 327159 - DNA, 812 bp, Cannabis indica
agctttctttggatttttactcaagtactaatttttcaaggtacactttattctaaaacatggcttttttattaaaggaccaagtgcctcactcaaaagatcatccttccttttttaatatattttcaaacttgcagcctctggaccctgcattttcatctttaaactctttcttaggttttcgtgattttgaactagtccccattcccccatcgcctttctcagaggtttgcagttgtccctattttgagcatgtttcttttggcttgggaacttgtgcttcttctcgtgtcgaacctgcgccacctttagcattgtgtccatttgcagtttttcctcccattttggcccctatcaaagaggtgaaagaaggccatgaagcgtcggagcaaagttcaactcaaacgacaatagcctattatccggagttcaatgttgttgctcactttgaggatatcgaagaggtcaatgacttggctgatgattcttcgtcgacgctcaaccccgaagcctcaacccacccagccccctctctctcttcgtctctctcggacccgaagcctcaacccacccagccccctctctcagtcgcgaagcctcaaccctgagaactcgaagcctcaaccccgaagcctcaaccgacggtgacggtgcacggcgcagcggcccccatagccccctctctccgtgcaccagcccctctctctctttgtctctctcaaactgaaaaaaaaactccagtggtccaatggtcggaccatggggtccgaaccaatcggacctatcggacaccatggtccgaccatcggacc

SEQ ID NO: 327160 - DNA, 2862 bp, Cannabis indica
ggggcatttttaggagtctcaatttttacattttatcgatatttagggtattgtcacgccatttatcaatagggagacttttagtgttgaatttaatttctcgaagctaagttagcgagtcacttaccaattttatataaattgtgacttagggcctttaaatcatcgagtagcaattttcagtcaagttgaccgacacacctaaattcaaaataaagataagattagtataataatatatatgcatacatgtttcgtgtacttgtttttataattacctattaattagcatatcaaaaagagtggtattagtgtatttagagttacactgaatatcgacggatatatgattagcattatactatggattgatgatatcacataagtatgactagagtactgaatataggttgatattatgatcaatcatactgtcattaagatcgttcaaaacttatacgcattggacgcaagatatagaatcgtgactaggtgtatgggcacctagttacaatttggttatatgtttatatctatgtttatcttgttgagtatgtccactcacatgtatatttacatgtgtatgtaagggcaaagtaaaggttgaacagtagtgagtcatgaactagatgaagattgtacatatcgaggaggctagacctagagtgttgaggtcttcgagatagttgggctcatattttgatagttgcggggtgacattgttatatgtagcattttgaaataattgtaaaaaaaaaaaccaaatcctgaaattgtataagtttatgtttatttattatatgtttattttatttacgaaaattttaattaatcatgttttttaataaactctttgacaattaaaggagtgcacaataattagaagaaaatactgtagcgtgcctaaataagtagggcgttacaattatcatttacccttccaattatcttttgaattctttaagtaccattaattcataatgaagagtttaatttataatctaattatagatttttggctcaattaaattaactcttagaattaacactttgagggaaataaaattcaatcctatcaaaaatcttagattctacttattgtataacatatacccagtcatccatgttattatgttgccaaaacataagttgtaagaatcgtcttctctgagaaactttaacgagtaaattaaataacttaatgaacacaaataagagttcaggaatactcatgattagatagatataataataattacttatgtgatataaatagctcttttatgataaacgacatactgacaaaagatttttatttctatcaattcagtcatacataataaaattatataaagtacatttgctaaatgtatatccacatatgtgttcccaataaaaatcacatgccactactatttagtgcttagtaaaccatacttggtaattccaaattaaagatttcatatacattgtcaactagttttatatttatggcatgatcttaattctcttatactcttacaagatcatacactttctacatgaatatggaaatattttatatttattaattatttttcaataattaacatattcatttataatatatttatattttatatattcaataatatattatatattgatatctagaattattaaatcatcaaatgtttttcaagatttgaaattaatttgtgattagtccccaatctctattagtcacatctaataaatcattaattactaatcatgataaatgtaacaggcaaaaattcaattcatatttgctcaactagaaccattttttaaaattaggtgattctttgtacgatgtgaagaattccaatagctatttggagtaatttgaaaaggtgggatgttgtaatggtttagtatctttcacaaaatgatgaaaagaaactacgacttcgcaccggaggatcaacactgagactagctaccacgacgtctttcttgatgatctcaggattggttaatgggcaatgaggtcgttgagttgtaattagcttcgtacaacctgtagaaagaagttttaacttctcgaatgttattaaatcagatggccttgttttagaaacgggatcctcgcaggaaaacatttattctaaaggcgcatccttatcacctaaagcctctgcttctttgtctcctcctatcccaatattcgtgtcgtttccacttcaagaaggtaattcaatttcctagtccacctcttcgacctcaccatcatagaagactattgcattaatgtaactgcctcgcgcagagacagttgattcacttcctcgtggtacaaccacgaactggtctatataaaaaggtgatatgatataagaccaatcacaatctatcttttaaaagtggactaagtagatcaagctctggctaaactactataatttgtttgcatcttttacattcttgctgttacattctaataatcgttattttatatttagtattcgcaaatctaggttagtgctcgcagttttgcttgtaagtgttcttacgtagattgaatacttgtagtctttggtgttgtctatatttcttcgacaatacaaccaaataatgtaattcatttaatactacatattctcataaccaatgataattataagttttcaaataattatattctcctttttaatatatcaattaatcaaataattttaaatttctcgtaccaaatgccataaacattccaaatgtgacgacaattaaactaatgtaagagtcgggtatacttataaagaacaaaaaattaatttgtgcataaaacaaaattgaggatttttttttaaataaaaattagaggttttgagagagagagagaga

SEQ ID NO: 327161 - DNA, 783 bp, Cannabis indica
ctctctctctctctctctctctctctctctctctctctctctctctctctctctcttttcttgtcttgccttgtccacgtgaatggattgagaagaactgagaagtgaagatgataaggcaaaggtagtttaatgtcaaacaatattatattattttttaataaggtgttattttttttattatttatattgggctacttttaaaatgggtttgattagaatgagggtaggctcatgaatcatgattaagatattgagtgaaggcttttatgaattgggcgagtgaagtgaatcaatatatatatatatcaatatgtgaaaagtttaatgtatatatttgagtggggcttaagcctacatatggaccaaagtccctccgtccctgccacaccatgcttagatctgaacttgagacctctccgacatcattaatggatatcattgaagcccattatttgtgtctctctcctggtgcaatcagagcatataaacaaagacttgaacgaccaagaagaaaatgaatatttgagtttgtgtatggtttgattttgattccaatgaatgggttgagatctgggtttgggttttattgttttctagtggtctttgaagtcgatggtaaatagggaccatggttgggaatggggtggggtgagagtcacggatggggatgggatggggtgaggggtggggtggggtggggtgagggtcggggtgtgggtttgtatttttcgaattgtcaaattgttttgctttatgatgaagacgaagaagaaaaaaaaa

SEQ ID NO: 327162 - DNA, 762 bp, Cannabis indica
cttgaagcacacttttgaaagacgttggtgcttttatcttgacaagatcttattttgaattgtcttggctccaagttttttgggtgggtgtgtgataataatatgttaaaaataattgtgctttaaaattggattttactgacaaacatgaattacttagtgttgcggcgagttttaacgttgatccatctgttcatggggtccttgtgcaacttcctctgcctcaggtaacataagaatatgtatgtgaattaaccctttctttgctctatatgaactgaaaagcttttattgtatgttattcatttgactttgaggaatctgtataatattaatatttgatggctttgttgtactggaataggtgaatatatgagcattagatatatagaattatgatggaataagatttgattaattccctttggtaaagtttcactaagttaacatgtaaggtaattaatagctgagattttgatacatgaaatatcagaacttgctccttgctcctattgtgtgatgacttacaacagaatgtttgggacaacatttggatgtcagaaaaatttgagaaattagtttgttattgagtagcttttcttaagttttataaattttcttggcctggtgatagaattttgtgtcgttttagagttagtttgttatgatttatttgactttttacttttattatttttagggatattagcggctaaacgacctgaattttacggtttgtaacacttaaccacaaaaaccgaa

SEQ ID NO: 327163 - DNA, 1014 bp, Cannabis indica
aaataaaaagttcccatctttaagaaattagagaaagagagaaaatttatggtagttgttgtgtttattgtgtttgtaccaaaaaaggatgattatatatatacatatatataatatacatatatatatatgaattcctttcttttcttgtgtggaaatattcttggtctctctgcttattaattagctagcttgccttggagaagaaggtgtttgttgtagtagtctttggctttggctcttgttaacctcttcactggttttatatatatgtatatatatatgtatatgttgtatatgtgtatatatggggttttgtcaaattgggttgaagtggattcttttgtactggccttgtctctttccaacgctaagccaactctgttctatatagagcaaaattaaagtgtgaaaaaagctaaaaatatccaaaagctgctttcttcacataaagtaaaggggtaatctcatttggttggttttagttttatgtgataaattaaagaaaaaaaaaagaagcaatttggggatcctaaaattgagaaaaaggaaaaaaaatacagctttacatttatataatatgatttatatatagaaattataataagggtaaatctaataactaaatttataagagattctttagttatagggagagcactattgacctttcaagaatattattgtacactaaaatattgaaattgaagactaaaattctaggcttgttgacctatatttgtatatttaacccctaaagattcatctatcgaatattatttatttaaaggtgaaaattaatggcattttttactttaattaataacttttattataataaaatctaaaattggcgcccagttgatatatatgattaaaagaataaaattaattaaccataggtagctaattaatcacactcacaagttgatcttaattacatttttaatcatttttttatatgcatagtactactaattaataactgttatactttagttttttttttctttt

SEQ ID NO: 327164 - DNA, 1111 bp, Cannabis indica
aaagacatcaattgctagtaagattaattttctagaaaggttatacgattttagaataatttattccctttctttagatgataatattgacaagttaatgagattattgtaggattggctaatataaatcacaagattgatgaagaaagtcaggccatccttttttttgagatcgctcctaatcacatatcaagaagttaaggctgccaccaagtatggcaaagacataattgcattggaggatttcttgacgcactcaagtagaaatatttcaaattacaattggagaaggaatctaagaaaaaggaagtgcatttagcaagaggaagatcacccaggaaaggaagtttgaagagtaaacaccatcattctcaatcaagatcgaagtccaaagagaaaaaaaactcgaaagcgttacttctgtggaaggtctgaacacttgcaaagaatttgcaaaaagtacaaggagcaacaagacttcaacaaatctcatattagagataggaagaacaataggcaacatcaccacatgaaggattcaactgtagtcgtagaaaatcgtgacgaatgctcaacagatggggatcattgttctctatcttagaatctttgataaataggaagtggattcttgacttcagatgcacttatcacatgagtccaagtcgagagtcattttttgattatagatcagatgatggaggtggaatcaaggtgttgacgaatgtaaggcacattccggacttaagatgaaacatcatatccctgagtgcactttaagataaagattacagatacaaatctatgcacggaagcttgagaatcaccaaaggttcgcttatattgatgaaaggtgaaataatcaatggtttatatgttctcttaggagaaattgttgcagtcggagaagcaagtttaataaaagggctacaatcaaatatgcagttgtggtatcataggcttgggcatatcagtgaacaaggcctcaaagaactgcacaaacaaggtataattgaaaatttaaattcttgtgtcttatcattttgtgaagcttgtgttttagggaaacaacataagctgaaattcacttcggcaaggcacacaggggata

SEQ ID NO: 327165 - DNA, 711 bp, Cannabis indica
gtgtttccccttacggatcacgagactactgactgtcacagaaagctcaaagcatacaagaaaatctatcaaatactttctcaaaggtgaagacccatgtagttatgatattaaaacaaccaaactaaacttaataggtattttgcaaaaattatagattagattatatgttttgttaaatgataaaatagattatgtattttttaacatagtacaaataggaccctgagtttaatttttaatatatatattttttttttaatataaccagcttgaagacaattcctaacacgaacagatgcagaaaatttaaccagttttatcataacacctctagttgaattatggttagttttattttgacaaaaatcagtttagaatttaattgtactattttgaaaaatatatggtctattttatcatttaacaaaataaatagtccaatctgtaacttttacaaaacacagagtccaaaataatatttacccaaatttaattagaagcaaacaaagagtagcctttcaaaattaattaagactaatgaaaatataagtatgtaagtagagtttagttagaaggaatgaaaacatataggaatgataatgagaatataaataagaatggaatataatcaaatttaaaatacataaaaaaaataggtaattttttttttgatattttttttttgggaattcagcaagtatattcatt

SEQ ID NO: 327166 - DNA, 774 bp, Cannabis indica
ctctctctctctctctttcgaattatcaagaaccaacaagaagggaagggtttctgctgcaattcaaatgattccaacaaggtttaggtgttctaatctaaggtataactctctagccttcttccctttgattttccttagctcaagatacattttggttcatgattttgtgaattgaagttctgtggttgtgtaatcagtttaatttcgtgttttggagttaggataggattattggagtggttttaagttatgttagtagagtaaggtgttgtttgagaaaaattgaggttagagaactcaacttcgttctctaatggtgttttgaatttctgggtgaattgttgagggttattgctttgttttgggtttattatggtacgtattctgaaagttattgtgaagtttggggttcatttgtgatgttgggagctattttttgggttttcctgcactaaaccggtcgaccggttggtccctaggaaaccccaccgaaccgaaatttcggttggggaatcggtctaccggttggggcagttttgcaaatcctagtttttcctatttttgcaatatttagggtatggtcatgttatccatctataggaaaatttctaattttgattctaagtccccgaaaggtattttagcgtgtctctcatcagaattatgaatattatgatatagggccctgtaaagcgtcgagatgtcatttcactcaggctgaccgcacgtttgaactcagaaacagtaagattagcatagaacatattatat

SEQ ID NO: 327167 - DNA, 1086 bp, Cannabis indica
tacgttcttgagagcccatctttgtctcagtagagtttttcagtggtatatttcagtcctcttccttaattgcttataatatatcgataataaaaaaaataaagtgtctactataacacattatttttgcataaataatcaaattttattattctagaacaataaataatgagagatgtaaaagtaagaatattggtggaaactacatagttaaggtagatcaaaataagagagtgactatgtctaataggacgagaagaaacctaattatttttctgtgatttatagatttaaaaaaatcatcaaaaattattcttaataattttttgactgtataattatcattaaattaataataattattaaatggagtcaaaaattaattaaaaataatcaccaaaaaccagaaatcaaattctaataactctgaaaaaaatttgtcgaaaatagagttcgaaaactaccgcactctccctcactctctggcagtcgcgagtgggcttcgtcccaggagagtgtcttcaacctctaacagcctccatgactgtaaaatgggttttgtgcgacccggtttagacccgatcaggtccggatgaaatttcgacaaaaaaattgacgaacaccgtggaaattatgggttttgtttgagtttcaatttctaagagatatatgaattcaatttcgagtatttatgcataaacttaggtagatctaatacatccaaaaattatgaactaaaataaatccgactatggcaattttgatctcgtccaattcaaacataaatgcgtaggaacattgtaaaataattgttaatgagatatgcacaatcaattttaatttatatccaatagaatcaaaaaatccaaaataaatttcatataatataataatcataaaactctaaacttcaatcttaaaattctcccaatttactcaatgattttatgcaaataatatatcaaaagaaagagaatttcatgagaaataaaatccctaaacttttaagattgaaaaataaaaaattcaacataaaataataacaaaattaatatgtaattgaagaaaattaacatatacatatta

SEQ ID NO: 327168 - DNA, 840 bp, Cannabis indica
aaaaaaaaaaaatgaaagattgcattaaaaaatacatcaattttttcaaacaggcatttagttttggcgtaaccacttatagaggtcaacttcttcaacataattaaaatttgataataataaatttacttcttattttttttttaaattcattaaaaatgaaaaattgttgcaccatggattctttttatttatttatttatttatttattttgacaatatcccaacagctgtattttcgttttttgtttgttgtaccaaaaaactctttaatttagtaggagcaaatatagttagttgctttctcaaaactctcgaaccaatatagtaattaatgagcaataatatctctataatgtttttttcatggtaaatttaattttgagaaatgctaaaaggcaccagtggtgcctaagtatcgagtcccatgtaatttaatataatagcttttagagagtatcgctaaccaatcgcaacgcgacatgtcgcaaagatgctaagcaccactagtgcctaatagcaatgctccttaattttatatatttatactatattcataaattattaatggtggtacattacaattaaaaaatatttatatgaaatgtgttatacaacagaaaagtgtttgattgcacctatctaaaaagaaaaattatcatttccttttacctaattgttaggaaaaatatatttctattattctttttaaataatataatagaaaaaatatttatacttctattattgatttgtgacactattatacctatattgtaatcatggccgggcgctatgatggtgtgcaaggtgggcgtactgcaaagggcccgaaaaaaa

SEQ ID NO: 327169 - DNA, 1920 bp, Cannabis indica
aattcgagatgaggtattgaagttgatggtgtaggctcttttgaacaaggttgatcgacaggagttgttgacacttgcccctgttccacttgtttttgcttacttaactagtttgttagctaattgtgttggaagatattcaacttctgcgtctttctctaccaactttcttgcaactcttgaatttgtttttccaaactcatcgttccaataacaaacactgacatattgttagattcaatgtgctacatttcactaacttccttgagaaagtattctcattatttgtagatggaaaattgcgaaatgagtcactggaacatttaataaaacttttggattgaactgcaaagaaattggggcactcataagctaaacatttttgtacaggctatagttttgagcatactactcgttccatgtactgttttggattattccttaatgctctagttatagcagtggtggttcttatggtattttgaccatgaagacattcccaccttccttcttctttttctcttgaagttcgttcatttatgccattagacgatgtgtatgagttcaattgtgaaaagttaaacccagtacttgcatcatttcttatggacttaggctttgatgtaaatccattagtaggattactttgaaacaatgagatgtttctcacaaggtctgactcaattcctcctatttttcctttacaaggttttctagaaataatcagttctgccccagtatatttggtgtatgacccagccatactattatttagtagctttgtgatgcaaagtgatgaggtaggatctttagtggtcttttgtattgaaaaatctagaccattattttcctcctccgttgaattcaccatgcaagtactggcatcaaccaggctgattggaacgataccgatcattatttgagtcagacattgttgcttaacctttgtggttctaatggaatgccactagattttgttgaatttgtttgaatggactcggaagagttcaacattgcaataaccttcgatgcttgagcaactcctctcttaatggatctgtcattgctcttctttcgacctttggcagcttttccttttaaagccttcacagtttggtgaactctcatgacctttatttcttttagtacatcagtttgagtatgagttccaaatgaaaaatgtcatgcaaaaagtcatctttcttcttttgtctctaaacttggtgtgcacatgtgcgagcttgtggaaaaatactgtttatttctttggtgccatttatatttcctgtaaaatagcacgcctaattacaaaagtgtaaatttttttaattctcaacataattagagatgaaaaggagaatgggtcccattggacatgccaaaaattatgctaagcaaaaatttcacatttagagtactaaaaataaatgtaatacataatttcacctatgtcaaatttacaacataagagtttattaatttaagttcgacccattcagattataaaaataatctcttaattacaatcctttcgtttaaaaaccttctttgattccaattacgatgatattaaatgatttgaaataatttagggaatttcgggtaaatttggaattgcagctgaactcagtcaatttaattaatcgagctacctacataccttctttgtgaaggatcaaaccacttgtagttcaaaatacggtattttagaatttgaatataagaattccagtagatgaccactttcaagaatcctttgctatttgaaaatttagaaaaatttctaggtggatgaccttttatgaaattttaaaatttgtgttttatactattttgcagtatcggtgactgcacttactcttagcaactaagttacctacgtatccttttataggaatcaagtcaaatgtagttccaact

SEQ ID NO: 327170 - DNA, 739 bp, Cannabis indica
atgatggtggtcatcccccctcaacgagggtcccgggggtgttacccccaagtatgggcttaatcctcaaaggtggttgacgaccatgtcacacccataagggacccttgtcatcagtggctccttcaaatgttcaaatcccgcgaaaggctcaaagacagttgtcaacccacgaaaatagcgggatattatcctaaaaatcagactccaactgcctccgaaaatcaaggagacagttgagatagctccgcgttggtcgcgtctcctgaagcgagaagcaccgaccccctcccctatataaggggtcacccatgacctgggagggggatccgcgatctgaaacccttagaaaaataaacacttcttattctttgcaatcaagagcctgttcttgactcttgcaactcagatcaataaaactcaaggggagtaggctattaccgacatccgtggccaaacctctttaaattcaagtatcttttatttacatttattgcaaatttcggtgttattaactgcatttattattgtgattttggtttaatctcatttattacgactccgcgtcagttggctaaaaatccagtcaatattttggtgctttccttgagagcttttgcctaaatctccaagtttttcaccggaaaaaatggtgttaacccgaagatctcaagagcgacctgacgaagagatggaaagtgcccaccaagttccatcagcaagcaatctagctgggaac

SEQ ID NO: 327171 - DNA, 1587 bp, Cannabis indica
atttttagtgattaagtattaaaaatataaactttcaactggtttttttcgccaatatccataggtatatagatatagattactagattagcatcatttgatattgataataattttttttattagttacatgttttgtagttttttagttctatataatatgttaagttttaacataaaaatctaattaaatgataaaaattgagaaaataattatgacaaaagtgtctatataaattgtatttttcttaataaatatatagatatttataaattattgtgcatatttatatgttaattattttaaacattgttaagaattttagaaacttattaaataaaaaacacaatttagaaaagtaaagtaatttaaattcaataaatatttctgtttgttaaaaataattaaagaaattataaagttttgaaaaaacttgaaaaaaatcaagaatatgtgttaaatttatatataaaaactataactaattaagcaagaatcatcaactacatatacaaaaattatgtaatattaattttgcacaaatcaaagtgaaagaaatagtgatctataaatagtctctaagagttcgtttggtatgtcgtattacaccgtattataatgtattgtattatattgaattgtattatatttttatataaaactatatgtggtattaactcttatgagcacttaaatatataatattttagtataaattaaagtttaatatagtattatataaaaatatgatgtataatccaatttaatataatacaataaaatacagtacgacctaataagacgttccaaatgagccctaagtgttataccacattcatttctaaacaatgtagaattttcttttcaaattaactcactaaatagtgaaatcaataaaattttaaaaagtaaataaaaaattataaaatgagaataaaaataaattggaatagaattcctaaaaggcacatgtcccctccttatatagaaaatatatatttaaaacattactaagaattttaaatatttattaaataaaatatataacttaaaaactaaaataactaaaatttagtaaaatatttcaatttattaaaaataattaaggatattgtgaagtttttacaaatttaaaaatgcaagaatatgtgttatatttttctaaaaagtatttaaacaagaatcatcaattacacatacaaaatccatgtaataataagtgaaaaaaatagtgacctataaatagtcttttaagtgttatagtacattcaattttaaataatttgagatttttttttttcaaaataactcactaaagagtaaaattaataacttttaaaaagtaaataaaaatgtaaaaaattaaaaataaagataaattagaatagaatttatagaaggcgttatgttaccgctctatatttcttatttatataaatatataaatagatatagttagatagatacatattaaattattaagttaaagtttttacttatttatttgtttaatgttactttatgttttttataaaaattaaatgttttgcttattgttgaccgaggttttcggcaactattaaaat

SEQ ID NO: 327172 - DNA, 2990 bp, Cannabis indica
agctaggcttgtagccaaaggcttcacacatcgagaagacgtcaattatgacaaaaccttctctcttgtggtgatgcttaaatctattcacattcttctatccttacctgcaacttatgattatgagatatagcaaatggacgtcaagattgattttctaaatggcaatcttcacaagaccatttatatggaacaactagaaggttatgtgcaaccaggggaagatcaaaaggtatgtcaattgcttaaatccatttatggcttcgaacaaaatgaatacaaagcctgtgtatacaaatacattaaaggtaatgtagtggtattactggttctttatgttgatgacattatacttattgggaataatgtagaaaggttatcaaacataaagaaatggttagctgaataattcccattgaaggatttggaagaagtaagctatgttcttggcattaaatttgtggagatataaagcgaagaacattagcacttttccaagaaaattatatagataaggttctagaaagattctccatagagaattccaagaaaggatagttaccatccagataagaaatttctctttgcaaggatcaatgtccaaagactcctctggagatagaggacatgagaaagtatccttatgcattagcagttgggagcttactatatacaatgttgtgtacaaggcttgacacatgttatgttgttgggattgttattcatgaccaattaaatccaagtttcgaacactggatagctgtgaagcatattctcaggtatctttagagaacgagagatctcaagcttatatattctggaaaaagacagtgattgtgctttttaattacacaaagatagtcaaaatttgatatttgggatagtattcactctttgtggtagagtttgttggattatattttaccaggacctagatttactaacaagtatgtttattaacacctaaatttgaatttctaaaataataaaatttaaacacatataaagtttgagtaaccttacattaattgcagcggaatataatgactcctcccattcagatctctaacccttgttcctttctgtcgcagagtattatcaagatctgagcctgattctccttaagttatttggattcttcaaagtcttacacactatgattgagtactagacttgctatgggtgggcatgtactcactcactaaggctcgaaaatttatgaagaacactggaagagtttcaaaaattagaagaaagaagaggaaggagtctcaagaactctctagttgtctgacaagttgtaaactaggttatgagttattagttggattatgagaccatcctattctttatatactaattcacttagggttaggattggattatatagaataaaaaatataaaataaatatagaataaaaaatgataaaataatagcaaaaatagggacttagtggccggccatgtatgtggccccactaattatatttttgccattttaaaatcatttatctattatttcacaagtttcatattttctaattttaatcctataaataccaaaaatatttatttaataattataatcatcaaataaaataatcatttatattatttattaattagactccacaaggtctcttaattaacaaataaaccctaaaatctttattcacaattaagccataacttagtgaaaatttgtaaataagacatagtccaatttagaattataattgattaattaaaatcaattagctgagtcttaaaagcagtattgtctcgactagtatggagaccatgagcctatataatcgagcttccaataagtagatctagaatttaccaagtaaattccttagcttattaattcctccttgcaccactatagatttggaattacactctcaattatatagagcgctccatatgttccacgatatagttacgctatgaattatccatttttagattcctaataaacaatgatcctctatagatgatctacattgagtagggataaatttaccgttacacttttcaatgtattttatccttaaaacacttagctacctataaataatatttcaatgaaataatataattaataaaatgagtacttaactatttatctctattaagtcaagctcgaaagaaattatcgtttcacttctatgtccaaagagaagctatagattctgtatctatgattagcactcccactcaattgaactaccatattcttaatctatatgtcacgagaagatctatttgtcaaatttaacgagcagattgaagtacataaataatacaactgaactagaacctaaccatctcaagattgagatcatttgatctaagatcaactaggttatattgaattgaatagatactacggtaagtttattatatcttatccaagttcaatattggtcccttctgatgcatactctatacatcaaacccaagcttactttaaccaatgccctggaaaggacataacacttatccaaggtgcaagcaaaatacattgtagattatcctatcaactaaaccctgtgtactgataaatcacaggagtacattcaatcacacaatcttgattactttccactgtgttgacaacacaataaacaagaatattaatgtgataaggattcagatgaatttataaatcaaacaagtgatcacatgaaccaaataacacattaaataagtaataaaaataaatttgtttctttatagataaatgaatataaaagattacattgaaatagagttttatttagggcacaatgcccaacaaactcccacttgcactaacataaaacaatcagtacatttcaattaatcctagattcagtctgtgtttttcaaatataattatagtcaaatttctagtgaatggatcaacttagttgccttcagtatcaactttcttcaccagtatgtccctttttgccacatattctctgatgatgtggtattt

SEQ ID NO: 327173 - DNA, 912 bp, Cannabis indica
tataaaattttattttatatttgggaaataaattgttcattatatagtttaataatattcattatttaaattgagtaatattttataattacatattagttttagagagaaatttctatattgattgaaaagttaagtaaaacagagtgcaatggcttaatatatttatatgaccaagacagagttattttgatataacaacttgcaactcaaataattaacctcctaactagcatagttaactaattaaattagagtttaataggccccctctgaattgtaaaagtttattacattcatcttggaaaacagttaatgaaaatgattgaaaaagagtggttttgtaaggatgtcggctatgttagatttgaaggaggcatggttcattttaattgtgctattattgatcttctctcaaataaggtgacagtctatttccacatgctttgtacgtaatgatacactagattttcaaagatgtgtattgctgtattgttgtcacagaaccgagtagagaatagcctagtgtgaatgccaaaatcgtgatggattgagtgaagccatgttaactctcaggcaacgttggccattgatctgtactctgtttctcttgaggagcgtgatacaattggttgctttttggacttccatgagatgagatacttgccaaggaatacacaataacctgaaatggagcgcctagtgtctaggcaggtaccctaatatgcatctgcaaaagcctgtaggtggagaggttctagagtggaggcacagaagaaaaggccttgtctagaatgctttttcaatattgtagaaatcttgtagctgcttgaagatgaggttcccttggattttgtagatattggctgagtttgttgacagaaaaagagatatttggtcttgttattgtga

SEQ ID NO: 327174 - DNA, 590 bp, Cannabis indica
atgtggacaaacacctcaagttttaatggtacaaaaaaattgaatttacttataataacaattaacatcaaacctcaaaaaattcaatccttacccttaacacaaacaataaattactgtctctctaccaaactatgtagcataacaagaaaaaaccttctgaggctattgttgaatctattaagggcattgtatctcacaaaagtatattcatagacattttataagaaagtacctaagcatgtgaagcaccagaaaatataaaattcatatgtttgtaggtaagactttcaaaatactccgtaaagctaacaactgaactatacggataactattgttcaactaatgaacttccatgtttgggttccaattcattctcaaagttgaaaaatatagaatttgaaagagagcattttcttgaatgtggagtggaggctacttatgtctctgtgcaattaaattgggagaatttgaaaagaataaaaaaaatcttcctaatacttacatcttggaaacatgatagtacaattgagtgggagcactaatcatagatatagaatctatagttttataattatatagaagtgaa

SEQ ID NO: 327175 - DNA, 864 bp, Cannabis indica
aataataataataatatcggaattttcttaaataatttattttgtaacacttgactttttatgtaaaatatttagcaaaaaaattacatatcattactgatttgttacaattcatttattatttcatttattattgttaagtctattaagtttaactaaaattgacacataatagcatcaaactaaccaaaaactaattttaattcaatgatgaatatagtaataaaataaatatataaaattcattttaaatttaaaaagtaaagaaaaaaatatatagtttctaatcaagaacttttgtaaaatttgattaaaaatatgtagtttctagattttaagattaaaaacttgatttttatttttcttaaggtgcgtttggtaatacttttttaatatattatttgttttataaattagaaaagtaaaaatattttttaaaatcacgttctataaaaatgttttccactttttaatttttaaattgagaatcaaaattttagaaacaaaacaaagtaactgtcaaaatttttttatagtttttttatcttaattaatattttggactccgaccccaacctagaccttggaactcggatccaaatccagaccccgacatcgtgacacaaacccgaacctcgaacttgaacttggacccgaacccggactcggatcccaacatcgtgacccaaacccggaccctgaaactgtaacccaaaccccgacccgcacccaaacctcggacccatatctggacccgaacccagacctcagacccagatcccgacccggacccagactccggactcagaccctagactcggatctcgaacctagaccccagccccgaacccgaacctagaccct

SEQ ID NO: 327176 - DNA, 715 bp, Cannabis indica
gctcaagggctgacgtcgatggtctcaaggaccctaaaccagttctctgatctgaaaacccagaacccacccccatctctcctcctcgctccctctcttccatttttcccggacaatgacaactaggccagacaactgttcaccgccgtgggtggtccaacagaccacgggatcattttccttaggtgccaaaacttaaaaacccaattcttttatgctttggtggtcatgaatcgaaggaacaataattttagaggatctgggtcattggattcgtcatcagacgattcgattaggtcaccgacgacgatcttttggttcagtatttgattttgggtttggattttcatagcatgtggtgtttgatattgttctgacatcttctttgtaacatttctctatgatgtgaccaagaattttgcaatgagtggagaaggacatgttcctcttaatgggatatgacttgtttccatttgaatctaatttgttagagttgcctttatctccttaaaaggaagaaaccatgactgggttttgattaaccacagtagaagagtgttctctttgattttcttcctgtgtaaccagatggaaaattcgattaacctcaggcagaggatccatgatgttacttttgacatgcgaaaaaagaatctgaaagacccattagaaatgacattatatactccacgtggtggtgttcttggagcttttt

SEQ ID NO: 327177 - DNA, 647 bp, Cannabis indica
aaccttgaacccaaatccagtgcaaatctagaatttaacaaaatgctaatcataccataaatatatccaaaaacaatttttgataagctaacttagttgtaatgatgtttgtagaacttttgtcctttttatagttggcataagttcgaatctcgataagaatgtatactttgttattttttttttttattttttattattagatacttatgtcactaaaaaattattgaatttatattgcaataatcccttcaatgtataacatgtttacttgaagatttgtttctctataaatgcttaaccattatggtaattttatgagatgattcatatttgatactttttcaaattgctatggccagtctaatacaatttttgaaaaagctcaagttgatttatttatttttgaaaaaattgtgccgtaaaggtgtttaattagtaaaaaatttcaaattagcttattgaaaaatttatggagacgttacagttaaaatttaaaactatagtaaaacccaacttttaaaaatagttgttttgattagaaaacctgttgaaaattattttactaggatcttagatctactcacaagtatgttgattaacacccaaaatatgaactttctgaaacgatgaaataaacacatata

SEQ ID NO: 327178 - DNA, 636 bp, Cannabis indica
aaatttataaatcaaataaatgataatgaaataaacatatgaaccaaataacacatcaaataagtaatgaaataaatttatttctttattgataaatgaatattcaagattatattgaaatatgattttatttagggtacaaaactcaacatgttccagtccctacgaatggtcccaatgttacaaaataatttagaagaacggtcactcgtccaacccacctccaaaactatctttgtgagttttctactacttatcccatctcaaatttcatctcctatgataaattttcgtgttgccattataagtgcttatttggtctttaaatcaactagttattcttaagctaaatttcccatgtggagaaaaacgatagatactgaaattattacacttacagctaataaaatttggattgatatctctcttctcgctagctaccatttcattggctgtaactgagtatataaaataaaatataatgaaaaaaaataaaattgaacgatataaagctcgtttagtgtagctaaagggttctcccaacaatttgatacttttagaggaggatttatgattaagcaactccactttatttttttatttttttgggttatcttttttatttatttatttatt

SEQ ID NO: 327179 - DNA, 1703 bp, Cannabis indica
gggctcgcatgcgagcccatgtgtagtgtgtgtttgtgtgtgtgttgttgttgtgtatgtaaggtgaaggatggaatttgtatacatggtgaagagaatgtcgttgaagaagaaaccaaaggacaaggcgtgcaagggaaaagcctacgaccatgccttttacaagctttgaaagcaaggaggtacgagtagtggaggcactgtacctgtaaggttcgtggacccgaccaagggtatgctacagccaccatctctgcgacctgggaccacctgacatcagacaagggtacgaggtgtaagaccacctcctgcacctatagtttgcagcccaaaagcgataacttgtctcttttggacgactatgtaactcaggctattatagcctataaatacccattttcaagtgtgagaaggggtttgaaaattgatcttgtaactcatatattagatgcaactcaagaaatctcccagctatttaaacttgcatttcatttcaccttcatcttatttttgagttttacgtttagattttaattttccgaccacaaggttagttgacgagttcttaacgtcaacaattatttttgataagttgaattagtaaaattgcaaaaagaagattaatgatggtaaaaagtaaaaataacaaaaaaaaaaagtattattaaataataataataataaaaagagaattacataaattgttatttttaataaaattttacacttttatatttaaagttttttttaatatttttacgatattctataaaacataagaaaataacaacaaacaaataaaaaaaaataacaaacaaaaaattaataacaaaataataaaagtacaatataaggctcgatactttcctaattgttcattctaggaggccgagttgggtggcaacccgagctttatatggcgtagtgtctttgagtcacaagcgttgctcagggacgatgctcgtaggagaacaagacctggttcatctactgaggtgcttaacacaccttggcttttgtttgaggctagcccgtgtggaatctaatcatctggcactggccaattgtaaagtgtctcaactcatgaagccagatagtagacaatgggacttggagcttattgaggacttgtttgatccccgcgatgttgagctcatcaaacaggtgcctttgagtgttaatcttgcaagtgatagttggtattggaacaaggacccaactggttttttcactgtcaaaagctcatataatcacttacagtcggtcaatggtagttggaactcatccatggaggatgatgtttggaagatgctgtggaagattaaagcccctccaaaggttttacattttgtttggaaagctctttcgggttgtttgcctacacgtactcaacttcatagtaaacatgttcctgtggctttacattgtgtgttgtgtaacatggggaagagtcaatattccatgttttggttcaatgttcctttgctcattcatgttggctccgatctgcattaggtgttggccattctgcagcaactaatttttttgactggttttatggaagtgttggcagtaggcaatacggggttagttgaagaagctgtcatggttggttgggcaatttggaaggctcggaatgatatgttttggaatggtaaaagttgtagtgctgctgatgttgtttggctggctcgtaccactct

SEQ ID NO: 327180 - DNA, 1341 bp, Cannabis indica
ggttacactcaaaaaatatggcattgactatcttgacacttatgcacctgttgctaagttcaacacttgaaatcctctgcccttgctgcaatacaaaattgggaactccatcaaatggacataaacaatgcgttccttcatggcaacttacatgaagaaatctacatgaaacttccttcaggttataaacctgccaccaaacttccccccaatgcagtttgcaaactccaaaagagcatctatggtcttaaacaggcttcgagacaatggtatgctaaaataagcactaccttaatctctaatggttttgctcaatcccaatctgatcattccttgttccgtaaatccactcccaaactcttcatggctgttctcatctatgtagatgacattgtcattgctagtagcaatgcctcagcaacagttgagttcaaaaaatttctgaatgctaaatacaaattaaaagaccttggccaacttagattttttcttggcatagaggtgagtcgatcacctactggaatttacatctctcaaaggccttttactctccaattattgaatgaaaccggttatcttggttccaaacccgtttctaccccaatggagcctaatctcaaattgagctccactgatggacaacctttatccaatcctactacttatcgtagtctcataggcaagcttttatatcttaccatcacgcgacctgatctctcatacacagttaataggctaagtcaatacttggcatctccacgaaaacctcacttgcttgctgctcaacgaattctgcaatatcttaaaaccacccctggtcagggattatttttttccaacaaatccgagtctcatgtctctgcttacgcagaaacaagtctcaatatcaaagtcttctctgatgcagattggggcagctgcattgacactaggaggtcaatttctggctattgcgtgttcattggcaactcattagtatcctggaaatccaagaaacaggccactgtttctcgatcttcagctgaagctgaatatcgagcaatggctcatgctacttgtgaaataacttggatacttgctatcttaaaagactttcacattgcccacaacacacttgccaccctctattgtgataatgatgctgcaatacacatatcagaaaatccagtcttccatgagcgcaccaagcatgtagatatcgattgccatatcgtaagggaaaaggttcaacaagggacaatcaaaatgatgcacgtttcctccaacaacaacgtagcagacatcttcaccaaagctctatgtaaagcccgcttagttaatttggaaattagcagttgttta

SEQ ID NO: 327181 - DNA, 1373 bp, Cannabis indica
ttttttataatattaaaaataaaaacaattagtatattggtaattaggcaatataactgctcttcgcacggctaatttaattttttaagtattataataaatggttacttaaaaatataattttaatgtatggtaaaaattataaataaattaacttagtatattgcttagtgtaacattgagcattaatgaaaattttaagagaaattcaaatacaagaaaaaaagcttacgaaaaataagtataacaatgcaatgaacctctcaaaaaaattacaatcaataaaaggtagttgggaatgatgtagcaaatagaaagaaaaattatatattaagaagtcgttaaaagaatattaaattagttgtatattgatcaataagaataggcatacctttaggaattaggatgtgagagtgaataaaaatcgttattaatgatagattttatatagattaagaaaaatcacaattacattaattttttttctaattaattaatcaattatatatagttttttttctaaaaaataataattagtttatgttagatatttttatggaaacttttttaaaataatagtaaatattaatttgtagattaataaaatgttaaaaaaagaaaaaattaagaggttaagagaaaaatagttttgggattttaaaccgcaacatcaccgcctcatactgagcataatattattgttcattatattttacatgttggtcttttttctcttttatttttcttattcaactcaaaatgttacagtagaaaaaaagtattatttaacttaatttctatcaacaaatatctaattcttgtaagtttattattacgtatatagtagagattataactttctataaatttgccatttttcaccctaccatagagcttttattattaatcattttttcatttatacatttatatttggcaaagttcacttgtgagtttatataaagcaaataaagggtataatttggatctctagtttatgtgggagaaactcacattgtttatatgcttttgttaattctaaaacactctaaagtcaagagttatagtataaataaactaatacattttaatttgaaaggtaaacaaatttaataacactacttaagatttttgaaaaggatacgatccgatttcccatctcaaaggtatattctaatttcaacttctttgcactagcgtttggttggaggtaatgaaatggaatggaatggaaaggaaataattttcattccattcctttgtttggttgcattttaaagtattggaatggcattccaatggaatgctctttccaccattttggtggaatggctattccattttaaaaatgaaggaatgaccattccaatgta

SEQ ID NO: 327182 - DNA, 598 bp, Cannabis indica
tcttcttttcttgttctacccaaagcactatccccagaaaataacaaagctttcagcttgatactcaaaaaaaccaaacccagaaattactcacacctctcggccacaaaatatacacacaatatcagaaatcaaattagggttatgagaaaacaaacagtgcaacatcaaggagttcacccaacaatggctacgtctctgttccaactttgtctctattagttttcaaaaagagttctttctggctaatgaacgaatacctaatctttaaatagactatgttctgtgaaaatattgatctagcagagccatgaataataattacctacccattttggagagccattttataaataaagttctttttttgcttgaacattttataaataaagttgaaatgtcacctaaaatatgcaagcatatataaataataaaatcacaaaattttctttgtcttcactaaaaaaaatttacaaaaagattgtgactaaaataatatatcattaaaaagtccaaggaatcaataataaggggtaagttgaaaaatactttttttattaatgaattaattaaatttacctctaattttatatttatt

SEQ ID NO: 327183 - DNA, 528 bp, Cannabis indica
gtctagcccaagcggggacacagatagatccttactttagggatcctgtaggaagcttcagactgtagtagagttggaagaagtggaggatgatcccacttacccaataagaagtctaaagatcggtaaaggtttgtctccagaaatcaagtcaattttgatagaatatctaaagacaagcctgaacctgttcgcatggtcagaatcaacccctccgtgataacccatgcactgaacattgatccaagcatccaacctgtttagtaaacaaaggggctatttgaccaggagcatgcccaggcgctcaaagaaaaagtcaaaagttagaggcccaatgacttcattacagaagcattctaccctctattggtatccaatcaagtgccgatacctaattccaataagaagtggagagtctacatcgacttcactaacctgaacaaagcatgtccaaaggactgctttttgctgcccaagattgacctgcaagtagatgccatgaagtcctgagtttcatggacgcatatt

SEQ ID NO: 327184 - DNA, 726 bp, Cannabis indica
attcattttcttattaatgtaaaaaaaatgttagatattattaataaagatttcagcaagaagcatatctctaagacaacaactcatcaaatcaaacatcaaaaatattgtttaatgtcatttcttttgattttattgcttaattctttaatgtttttgttgttatccaatcatagagaaacatgttgcctccacatggtgtatttaatccaacctggtaatgcgcaaaaggcctttgatttgaccttgggctttggatgtactcatatcttatgatttttaaagtttttttttttttttaaaaaaaaaaaacgaaaagaaaaaaagtacccaatcatccattccatccaactaatattatacataataaaaaaaattataaaagaaagtttttccactgagacatccctacttgaaaaatacttgctacctccccaaatttgataggcaatggcaccattgccttgattggggaaaaaagaaattatatataaatatagggattaaattttgtcccttgaaaatataccttttgtaatctttataattattgaatcaattaatctagttaatataacagctaaaagttaaagaacatcaaactaaatttaaagtacattttaccttaaaatttaaatatgttatgaaatacatttttacttttttaataataataataataaataaaaaaaaagaagatacgtatatataatatttattcaatta

SEQ ID NO: 327185 - DNA, 1043 bp, Cannabis indica
taatttgtatattatttttatgttgttttgatgttattattctgttacgtagtattttttttttattttaatattatttttataagacgtcgtaaaaatataaatattatatatttgaacgtaaaagtgtaataaatttactaaaaataatactttgtgtaaatttctttttttttaagggtaatatgttaaaaattgttgaatttagttacaactcaccagttaccatttataactagtaatagttatgttagttacacactactgccaactcacttatccaagtgaatagggtatctcggccttgaccgtttcctatataagggagtgtttttttctcattcactctcaacttagttaataatgagattaattaggaaggatgttaaaggtttggtgtgtgtttaatcaccaacacctcatgtgagaaccgatgtaattatgttcttttattagttcttaagttttgctctctgttttagttttgtaattgtagctcagttcatattaaaaattaataaagcaaacacaatttaatcttccctctggtgtgatgtgtctctagtgcttttcaattcaagtttgattctcattgtttgtcaatttggtatgctttgttgttcggtttaagtaatttttgatcttggaattatgagttcttattgtgttgttctgaggtgattcggatcataacaagtggtattagaatttggttgaaggtgcttcaagaatttaagaacagtttaaagatttcaagaactctactcaagaatgacatcgacaaagtttgaaatgaaaaagatcattgggactaattaggggtgcacacgggtccggttttcggggtttcgagttcgggttttcgggctttgagtcttggaaatgcacaatcgaactcggttttcgggtgtacggatgcgccgggtttcgggtcgggttaagcccgaatgtttaatttatgagctgaaataaaatttaatttttaaaattaccattttttttatttttaacaggaccttttttttttatataattaatatttt

SEQ ID NO: 327186 - DNA, 1306 bp, Cannabis indica
agtccacgagtctttgttattaatgagagtatttcttgtatagagatgttcttggtgtgtttttctctctccttttttcgatccccttctcatttttatcaggggtatttatagagattggtgggaatagttaaaaaagggtaacttgtctttgagtgctaattatgaataagcacaagttcccaaaaaatataaaatagggcatgcattacttatttagtaggtgtcatagagattaagtgagattaaccttcatccttccatgattgatgtgattcttcataatggagctgttactagcccctttgattatcgtgtaatttccctaaataaggcttacgatgtctgacctgtcctctaatgggtgtttccagacgctttccccatgctccattaaatgcgaggtgactgttcgaataggcccctctcgtcccggagatgccttactatatctcaactcccggagaagaagtggtgccttttgcactggtccgggagcttactctcctcaaaccacacttcttctcttctatacgatttttaactaattttcaagtgaggtgtcctcttggtccatgtgtcatacatagccgtggccatgtattttgggaaaaaaattgaggcaacaagcttttatatagaaagcaaggagaagagaagttagttacaataggaagttagttacaaataagaataagacagctcacaataacagaaaaataacaaactatagtaactaacgggcaaattgtgaagaaaaaaatttgggggggctaattgctaataattgtatataatatttttttcttacatatctttatttttatatataaaaagtggctatctaactatttttgttggtttaacaaaatatattttaaaaataaaagaatatttcattaaatttaacagatgttattacaactgtttactttataaatattaatattattttatttaagtttttttttaattttatttttacgtatatgaattatataagactaatattttaatttgattttattatttaattttaattaatttaaataatatttttttaaaatttgataaaataaatttttctttgagctgatattattaaaataaatttaattaaaaattagagatttactaccattaaaaggtagattaatttgttacccaaataataacaagtacaaaataatactagtattttatcatatatatagtaactttaatatacttttgacatgtaaattgtacctttcattttaacttatgtattatttatatattatttaattattataacattttaaaa

SEQ ID NO: 327187 - DNA, 1218 bp, Cannabis indica
attgaagtcgaccttccggcccagacctcaaacacgctctaatcagaaacataatggacctcaaatcttacggaaatgagagcgaaaagaggacgggcaaaaacagaaacacccaaaaattaaaaaaaactaattaataaaaaaagaaaaaccaaaataaagaaaggaaaaagaaaaaaaaaattagggttgaggggtgcgcactacgccacccgcgtacactagtattcatcccctttatttctgggaccttcggtttccgtcctctatatcccccgttatctccttttcttgacgcccaattcgttctccttcgtttcacacagatctgagattgcttcgttttctccatcctagacttgcttcgtctcgccgcgattggacgctgaaatcgcatatttttgccgaatttcgtcgatttcggccatattttcaggtatttcgttcaatttcatgccaaattctattttttcgatcgaatctggtcggttttgatgtttattttgtatttgagtacgtttctctgtctatttgattggtataacgccatcgtgaagtcgatggattttgatttggacggaggagaggaaattagggttttggattcgacgatttttgtcaaaatcgatttaatttgatgatcggtggacatttttgcgtttcaggtttttgcgttgaagtgatttttaagctatgcgggcatacgatagagaagttagtactcttcaaatctgtacctttgttgcgtattgttctttttctatttttttttcttattatatttggcaatttcaatttttttttttgtgcaggaacggcatccacaaatggaagatgaatatgaagattacgatgattctggatacggatatgaggaagaaggtgatgaggaggagggggaagaagaagagtatgaagaagaagatccaaatcttagcaaagaacggttggagtaccttgcgtacagacaacgtgtaaaagaacgaatcagaaagcagaggaagaaagaaggtggttctggtcccaacaattcttatggcgataggaagaagcttccgtatgataagtgagtgatttagttcactgttgatggcacttttgtttcagaagtataccataccccatatgtgattctaacattttgatcaatcggtatcttgtttaaggatttgtaaattttgtaactcacggattagggtttgtagaagtcatattggt

SEQ ID NO: 327188 - DNA, 1251 bp, Cannabis indica
aagtgaccgttcacctccaacttcactagcccagagaaactcgagacaacaataattataaaccctaattatttaccattaggcttatcgggatataacacagagttaactttcttgtaatcaacaaagttttcaagagtaggacacatatgatatgtgcatccagattcaagaatccattctccaatgattctttgatctgaaaccatatacaggtctccattagatgaaaattgatctgtatcttccacatttgaagctgaatcatgcttcttttccctttcttctttgagtttattcttaaactcaatacagaatctcttgatgtgtccaacttttccacaaaagtaacattttctgtctttgtgatatttccctttggatttggatctcgactaaaatctgtgatgactcttagattgatcccgcctctgttatgctctcttcctcgagctagtgctccatggacatcatcaagggtgagagtatcccttccatacatgatcacaagtttatgctcctggtatgctactgttatagatcgaaggagaatgacagcttggctctcctcatctactgtgtacttcatgtttgccaaacctataatgatttgattaaagcatcaagattatcatctagagacaaattagaaatcttttcaaaaccatataaagattccaaaaaattaatcttgttagttagagatggtttcatgtagatttcttcaagtttattccacgattctcgagctgtcttcatgctctggaccttccttgtatctgtgttagacagatacattatgatagtataataggacaattcttccataccattgagttcttcttgatttaacttcttagtcaattcttctttggttttaagcctttgcaaccttttgacgaataagtatttccttcaagctttctctcgaaaagggcaaaatcccttattccattgaacgtcacgagttcaaaccatgctattgcaatcatgatcgtgcagatgaattcttgattggaccttgaactttcctttctcaatgcaaatcataaaccaaagctctgatttgttgtaaattcaaattgacaacaccaacaataagctgcaacacaatcaaggaatttactagcagcaaattaatcaaacacacacaaatcacaaataactagaacaaaattcaagagagtaagaagacatagcggtgtccacaaagtatccgatccaatccaatccaatccgcaaaatgcggat

SEQ ID NO: 327189 - DNA, 929 bp, Cannabis indica
ctagagatctgaatggaagagtcatatatccactgcactcaatgtaaggtttccttaaactcttatgtgttattcattgttttagaattcatattaggatgttaatgaaacatacatggtagtaaatctagatcctggtaaaatatttccaacaaaagctacatcttaaggaatgtagtgtttaatgagttagagtttccattcaaacttggtttgtaaacaattaccaagctgaaaaaccagtcataattcaaagttcctcttggtcagttctgccatcttctcaacctcctgctggttttctgctcgtagaccagcaactccctcatcatccttgagcatacctgaagaagcactctcacaccaacacactctcaggtaatactcactcttttaactctctgcatcctatacctgttgcttcacatgagtctccagttgcagaaaatgagaggggaattactatcagtcctgctgctatttttcaggatgattttataatacaatttgctgaaaacagaacattcaacaagaaactctccaggtccagtacagactacagatgatcctcaaacatctggtcatcccatgattactcgagcaaaagctagaatcttcaaacctcgggtattcatgggacaaactcactgcaatacagaaacaaaagaacctggcagtgttgaggaagcactttctcatcctggttggaacaaagcaatgcaaagtgaaaataatgctctcaaggacaaccacacctgggtacttgtacctcccaaaccagatcagaacttgataggcaacaagtgggtttttcgggaaaaattaaacttagatggctcacatcaaaggttcaaagctcgcttggttgctaagggttttcaccaaaggcctggaatcgattttggagagacctttagtccagttattaa

SEQ ID NO: 327190 - DNA, 676 bp, Cannabis indica
aaatgaaataatgtttacaaatgcactactcgtttgttctatatatagttaactaaaaccaatcattctcctagtaggagtagagttaaaatttaaaaataaaaataaaaatcattcaaataaaatatatatcttttcaatatctattcgagtttcaatttctggacaaaacaaacagcccttcgtcctcttcaaagtcatagcacaattctttcgtttgtgctaagtttattttggtagacgcacacaaacccaatagaaggtctgagaagcttctagaagactgaatgattgtctcactctctcccttccgttacgacttaagatgagaacttaccagaaccttcaactgctactaatatatataaacccactcatcccaattcatagacaagaaaaacaattcacaactccctatatctcttggctaattatactccctatttgcaaaaagcaaacaaagtaatttattgtgtttcagagtgttatttttgtcgtttttcacaaattaataatgtaacctaacccagctgttaagtctcgatccatctgtaaaagtatttccttcaaaaactagcaaaacatagttaacaagttttttgttacaaggtacattccgacgactcaagtcgactcaagtcatactaaattaaattattaggagactttttttttt

SEQ ID NO: 327191 - DNA, 2517 bp, Cannabis indica
gcatttcttctccctttaatagcagacagaaagaaaaacttagagcacttatccccttctttgagccaggaaatccttgctctttgtttccaatagatcgctttcctttcccgggattcgtttaaagcgcggcgaatgtcacactcccgattccagtctcggaacccagcgggaaggctctgcaaagagttgagttgattttctaggtgtttgatctcctaatcaagcttgccaaattgagtgcggttccagtttaggagagcaactctcgtggcgcctacttttttaaacactcgcacaggggcccaagagtgattaaccgacttccaagcgcttgctaccaccaatcttcttctctcatcacgagtccacccctcctcaaacttgaagcatctctttatcttaggttggactccacccgactgaaggaacagcggcctgtggtcggaattactagtatggaccgagcttagagtagctctaggaaagagattgaaccaagcaccgttggctaaacctttatcgagggcagacttaacatgacccctaccagaacgatgattatcccaagtcattatatctccttggatagccatattgataagaccacgggagtcaatgagattcgagattatcgggatgaaagggtcccatggaatattatattggtcttatcatcttgtccccatatacctattattattaaaatacaatgacatgcatctaggtttgcaaggatttcatcgcatacaataacccccacattagttatatcatgtgatgacaaccgtcttttcaatagtacgtctaatagagaatcacgatccataatagtcatcatctttctatcttcaccgttcatcatcatcatcatcatacctctcttctgatattgatatgatatatattttgaattatatatgatttgatttcttgattgatgagctccctatttttatatgtttgtatatcatttctacatattatcattctattatatagtagtatactacaactacttcaattcaatatgttgatcatactaattattttatcatgacatttatgagttttgatctctttttcctcaactatatattaattaagagtattgctttgaggcatcagtggtgcctaacaccttctcgatatgtcgccttgtgattggttagcgatactccctaaaagctattatattaaattatatgggactcgatacttagttggaccaataacgatattgatatatatgaggctgctaggaaccactagtgcgctttagcatttctcattataattaatacaaagataattgttattgattaatgatgggagattttatattcaacaaagatgagccctcattaatagccatatctcatctcttactgtactatatatatatataattttaggtgattttcttctgagtataatttagatttatttaaaattttatgaatatattaataggattaatagttttaaacattccaaattaaagagtgaagtgtataatatagctttttggaacaaaaaaagtgtatacaaacataaaaatttatatatttataatttaaatacttaaattttataaatataaaataattaacatatttatgccgctaaaaaaataacttcagaattttaagtactacaatcgctaaattaattaagatatgtataatatgccatattatttatttgagcattgcgttggacatcaagtatcacaaaaattaaaataataaaaaaaaaattaggaagcagtgcctattataatatagaaaataattactataataggtaataatatgtaatataactagtagaagaattgtactaatctggattaaagtagtttttcttcttgcagttccacgacaatggcgccaaaaatttattgttacaaaaaatagtacgtttatcatttatcaactcgcaaatgcacgaatctttattgtaatgtagagattgtgaagaatgaggtcgaacccatagaaattgcgtgaaaacgaaaaaatacttatttaatctaagctattaaaactctaacctagtcctgaaaatggtaagattttttgtaacaaaataaaataaaacatttaatggtaaaaatgacagtagcagatattttcagtgatatttagggatattatttaggattcagaatctacttaagtgtatataaaaatatttatgtttatattgattttcataattttttaatacaatgtatattgtattacttaattaatacataataaattatccgtattagcttgtattataatatttataaaagatttgggatcaactccaatctttgacccgaacccaaacttgaacccaggacctagaccaagacccagacccggatcaggattggacccaaactcggacccaaacccgacctgagacctagacctggacctggacctagacccggacccaaaccaagacctagacctgaacccagacccagaccaagactcggacttggacccggacccagac

SEQ ID NO: 327192 - DNA, 1439 bp, Cannabis indica
tgaggcgttttcaactatttcttttgttagttgccaacccgagattgtagaaattctaagtgtcaaagaggcacttagttggataaattggcataataagtcgaatgtcattttagagacagattgcatcttagttgttcaagctattcttagttcgatagctatgccttctatttttggtctcttcgttaaagattgtcaatttattttatcttctttaagtaatgtttctattggtcatgttaaacggtctgctaataaagtcgcgcactgtatggtacgtggtgcttgttattggtcaggtcgtcgttttactgagagcgatgctcccattgcttttcaggcctttgtattagccgatgtttctgtctaataaagattattttcattcaaaataataataataataataataataataataataataataataataataataataattgttaagttggatagaatattcaacttaaagtggggacgctccattatgttacttaaattccgatcaaatatatggtccacgtataatatgtgccaactttgcatggattttgaataaaggaaatataattttttttttttttgatagaaaaatgaaaaataaattagtgttgaaaaactgactactttctctcttgtcgttttgataatcttttttaagcataaaagccactttcgttgttaaaaatgctgtgcctaatcaaaatgatgtaatgcattatgatgtctataaactgaccgtacttcaagtttatgatgatgtttatataaactgaactagcattgtaagcataatgaatttatttcagttattacttataagtacatttttatgaaaaataaataaaaaagattcttctaaacaaaagagtaactagttacttttcttagggttgccataaaaatccctcttcgttttcatgggtccaattctaccacgaccacaaaatcccaaaaccaatttgtgaaaagcaacaatttaaggaaatatatcttttttcaaaaaataaaaaataaaaaaatatatttacattttaaaataattacctatccaaatcaatgagtcacaacaaggaaggaagataatgaaattagaggtatttattggaccacattaatatttttaggtttattcacatccgatctaattatatattaaatgttaaattttaccatccgatatgatccaattaatttcagtcatacatttcatctaacatctattggatgttagattaaatttgttctatcccttagatgtatttcatatatatatttattggtttaatttagatttatcaaatattttagacgtagtatatttgggaaatttacatgatatactaaattttgctatttttttacaaaagttactgtcaggccggtattttttacttttttactatattttttagggtaaatagtggcat

SEQ ID NO: 327193 - DNA, 1011 bp, Cannabis indica
gttagtttttttatttttttttttttatatatatgtataaatatatatatagaaaatataaatttttattcataaatataaaatggtccccaaggatataagaatgtgcaaggaccataaagtatatacctttcttcaactttttatttattactattatttatttatttatttttatttttgtgactagtgattacaaatttacaatagggaatttcatagaaatatttcaagtggcattttatttggcacataccacaaaaatagtgtgtgcttgtaaaaagaataaaatgaaagtcactttaatttaatcattatttatatttcaaaaaagaaaaataaataaataaagttatcaagattgaacaatataggaaaattttcaacaacaagaattctactttatgaaaagctaaaactactcaacttgtttcttgcaaacttgtcaaattaacaatattttgttgactattttttttatccttaggccaattatatttatatatatatatgtatatattaattatttataccctttagagaaagaagtttaaagaataatattttgatcatgaaatataccaattcctcttattttggaaggtagttgataaatgacagagttgagtatatttcaaaaaccacacatcattttcaacaaaagttacttttttttcttgttagagtaaccaaactaaaccaaatgtaagaaaatgattcatacattattgtataaatacatatatttttatatgatgatgcaaacccaattggcaaaatgtgtacacttgtcttttgaatcaaatctcactaataagaaaatcatgtggtgcaaatttttctatttttttagttttgataattgtaggaccacatgttagttatagagattttataactcatcttactttaattgagtcataagtatacacctcaaggattttcattctattaagaatgacacgctacagtaaattaattatacaaaagaccaaacataattgagaattc

SEQ ID NO: 327194 - DNA, 664 bp, Cannabis indica
aatctaattactaattgaattagatcaaatatctacccctagatgtttaaacttatatatgtatcatgtccctcttgcgaggggctttcaatatacattttgcctagatcgtgttataaagatatgttagtattgttgtgtccaacactattataatgagttaacgatcaataaatagttaataattttttataatatctaataaattaaaatatatagaaactgataattaattatatactcataaaatattttaatatcttgtagataacaattatgtaattatttatatctaccacatgtataaataatatcttaattacaatatcttacttaggaaaagtttggagatgtcttttggacatattggtaagagtacttttgtttttatttggtaggtaaagaaaatttatttgaaactattatttatatgagtgtatatttagttgttagttagaaaattacataaattttatgtaattaaaaataattttcaaaataataatttaacatgcctataaaatagacttcataataacttatttttaaatttttaaaatatgaataagttactttttattttatctattctatataaagtgtgcctataaaacagaatttttggtttatgagaaattcatgggtgactttttatttatattaa

SEQ ID NO: 327195 - DNA, 612 bp, Cannabis indica
aagttatggatattacatatctgtcacggcctagagctcgggtcgtgacaattacaactggtggaggtgttcaatggtgatggtattggtcgcaaggaacaaaattaagttcgttaatagaaaattacttgtactagatgctaaagacgatgattattaggatatgtggtgttaatgtaacaacgtatagcgatcttttggatactttgatgcgacaacataatgtacttggagaatgttgtagatattttgttagaactgcaagaatgttttcatgaccaaaagaataatgcccctcgtgttttcaaagctaagagagttatgcacacattttggaatcctaactttcctaacgaatcaaatgctagttctctttaagtgttaattctataactgaaatgttgttcacaaatttaaatggaatctaaattatacttccactagtgaattattggtactaaaggataaaaaataattaaataaaacagtaatttgatcaaaactaactacgaaccaacacatagagggttaatcactagaattgattaaatcaatagacactgtagtaaaactcagtaaatataatctataattactaagagttcaattcta

SEQ ID NO: 327196 - DNA, 1504 bp, Cannabis indica
aaaattaattattttttaaataagaaaaatattttaaaaaaattaatttttattatatataaaaactatgtatatatatacattctttaaactccagttttagtaataacaaaatggatcaaagtaagttaacacgaatatgatacgattttttatggatcaggttagggtggaaaaaattaaacgcgagtcaaaaacaggtccgatacatctaacacgaaacataagcaagttaaataaaatataacacaaacacaacatgatgacaaattttttcattcctacatagagttaaatccaacattcttttgccgcacgcgaagcgcagattgtttactagttattttataatttttttttttaaaatttaacacaacaaataaattaaagtaagtaaaataaataaaaaaataataaaaatatcaatatctaagagaacttctttttttttttagagagagtgagctaaatcgcactatgaaaatcgtcaacgcagaagaatttccagtcaaacaagctaattgtctagccaaagatatacagagtcagaatatgagtaactacaaaaaagtgacttatataagaccaagttatctcagaaatttagacaaaataacttgagaccaccttcaagacgcatctgatgtaaacaaacacctggatcaaaactacctacaaaataaatagatggataaatgtggattagcacactatacaacgataatgttgtgaatttttaaattaaggataaaatgcaattattgttataacaagaaaaaacttatctttgaagcctttttattgtaagagctaagtctaccaaagtagaactatactagccaatataacttacaacatacataatatttaagagattaatcaaactaaataaatcaaatcccaaataaattaacaattttttaaaaaatgtaagaaaactcaattgcctaataaataaatgacacgaaaataatgatataatataaattaaaattaaaatttaaaacttatctatgaaaatctacaatagcactctttgaggttgaatccacgcgcaaacgagctaacaacaaactgcaaactaactaaataatatagtacaaaattgccaacacaaaatggcacaaactagccaaaaatggcacaaactacaaacataaactataaaataaactatccccatagaaccaaactagataataaataaataaatataaattattttttatatattacgaaaatttataaaataattatttattaatataattaaaaactcaattactaaaatatataaagtaaaaataatttaaaaatattaaaacttaataaaatataattaaagcacatttaaagatataaatatcaaataaaatactaataattcattaaatatatacatacatactacaatgactttaaatatgtatactatttaccttaaaaaatagtttaagaaatagtaaatattgataattgttgaccgagattttcggcaactatt

SEQ ID NO: 327197 - DNA, 641 bp, Cannabis indica
tccactgcactcctcgcaaattagcctttctaaaggaaaacaactgaattccccaggtgccatagactttatgacacaaccttttctctacttgataccgtaggactttagaatgctgccaacataggccccagttgacctaaccttggattcgatgagttcagccttgaaggtgacactgggatcctgtggggtctttgacttacaaagcttaagagacataatgtcaaacccaaggtcacctggtgaaaaagcaacaatgagtttaggtaaaaataatggtctcacgagtggaataaaagataatattgtgggttcaggtcaggttgcatctcataaaaaatgacgtttgccttcagaaatctcttgtagaaattgcctaaaatgactggcaatttcttcctggttgacttaatcaaatggtctttaattttggcatcgtttatctctgatttggaccgaggttggaaatttcttggtttgaatgggaaggctaattgcctaggatattttgtttctagggactttggagaataaacttctgaactagattggggcatttctacaaaaaagaacaatcctaattcccggataaaatttattaaaccagaggcttaaagaatatgataaacctaaattta

SEQ ID NO: 327198 - DNA, 1010 bp, Cannabis indica
atattacagtaagtttattatatcttgtccaagttcaatatcggtcccttccgatgcatatgccatatatctaatccaagcttactttaccaatgctctagaaaggacatagcacttatccaacgtgcaagcaaactacgctgtagattatcatatcagtttaatcctgtatactgataaatcataggaattcatttaatcgcataatcttgattactttctaatgtgttgacatcacaataatcaagaatatcaatgtgataaagatttggatggatttataaatcaaacaaatgatcatgaaataaacatgtgaaccaaataacacattaaacaagtaatgaaataaacctgtttctttattgataaatgaatatagaagattacattgaaatagaattttatttaggtcacaaaacctaacaggaataccttatgaaagttatgaaaaaaaaaagtaaatactttgaacttctactttgttaaatgacaatttagattatgttttacaaagtggtacaaagtagtacctcaacttaatttttgttaaatttaaactacctgatctagaagtcgcgagagagtctaatttgtcatttaacaaaaaaaaaaagagtctaaccgatactatttactgaggaagagaattaaatatctttggcttattaaaacatctctttaattttttttaaaaaaaaattaggcacaagaatcaacaccctagggcatatacacctattgatgacaaatattttaattttaatttaaaataaaatttgtacttattaggttaaattggatttgtattgtcatttttttattatggcatcgtaagagttaggttggattaaattaactaatgattattatgtatcttgaatttaggggtgttcataaaatagtcgatccaatccaatccaatctgcaaagtgcggatatccgcacttgtgcggatttgattggattagaaaattcaaaatctgcacttgtgcggattggatgttgattga

SEQ ID NO: 327199 - DNA, 2450 bp, Cannabis indica
actccgtctcggtcggtcctctcttctccgccttctctatctctccccagattcctctctcctctgccccttctttctttctcattccctttcagtcagacaacctccttcttctccaacggtggcgacaactctttcgttcttccccatcatcttctccttaggtgagaatcatcttcttctatcatcattctcagtatttttgtttgctacgtgtaagttttaatctatattgtgtataatttgtgtattttataatacctaaataggctaaatcaaattttatttggggcttagggattgatatttcttggtctatttctatatatatatcaaccgacccgttcttcccatttcctggtaagtaaaaatatgtttatattttggtgatttaagagtgtgtattttttttaccagttatagtttatatgttgtgtatcttattttgttttgttttgtgcttagtgttttcctctcaaactaagatagcaattgtagtaattcaaaggaataaggccttgtatcggctaaattagtaatttacaaatgtcaacaaagttaaattattttggggatgcatacttgagcaaaaattgttaatcttgcctaactttttgactaaaattttgtgaaacaagtaagataagatatattgaaattcagcaattagaagatttagtttttctcatctgttcatttgtagtaagattatttaatattctgttgagaaaatgtagtgtttgaaatgtagtttgctgtttgtagagttgtatgcattttgttttaccagttatagttggttgatatattgtgttattttttttttttggaaatagagtttaagaagatcaacactaagcttctttttaaaaccactagttgaaattttcatcactagttgaaattttcttaacatggaattttattctgatgagcaaaaggagtgtatttcagcttgtttcagtatgtaagcttttttctgtactaaaattttgacaagtactttgatgatcaaatcagttttatgagatttcaaaactcttttctcttctataaagaaattaagctttattcatattcatttttggatggtcttatcatagtgtgtttcaaaatacttatcttgttatgttccattggatgtatatatatagagagagtgaaggctggtaagtaaagttttttcctttatcattttcccaacttgggtataaggcttaatattagagtatggatattaaagattgaacctttttggtcttgcccatttgcaaattgagtaaataaatacatgcagggacatgattacatatttgttagagctttcgtcccttttgtagcgagtttgatcgtgaaggcttggaaggagagtgatgataggagtgatatgaaggtcagattaggtggtatggctcctatgaatgatgaacgtgaatggttcaagaaagaggcctttaagtggggtgttcaactctttcacccacttcttccccacaaaccaaaccaggaaatattgcaggtacatatacatattatttcatacttttgtgcttaatatggtggaaaaatatgatcttggtaatgagagaattatttattgttctgttatttttcactaacattaataagtttctagtcttattatgcattattagtgagatcttttagtcaaattaattagactgatttgattgtgaagaatagaaacaattgttaatggatgaatttggaattaatatgatcttctctttcttatagtacacacaacacaatacattacataatgctcatttatctaatcttttaaattttaatatatatacatcaccaaacatacaaatttttacatttatattcttagaaaaagaatattaaggaaagagaagagaaaaactatctaaaaatatttagtgttatgataattgatgagtttcgttttataaatgtgggaaaatatagtaacaaaatattaaaaagaaatttcttattttggtatgcttgtcttgttttgttccattggacttgttatgtttcattggattcgtagttagtttgagcattttagtttctataataggatatatatgtataaagtttagtcatacactatagttctattactctgtttttttattgttatttttttttactattatgcataaagtagttatttaaatgacaaacattgtgaattgttatcttttgcatatgttattaggttatatttagattacgatatatatggaatttaagttttaggatcgattatataaacaattttggtattgtgtgattagttaatagaatcgattactaattttatgtaagttttaaaaatgttattttaacttttttttgtattatgtatttactattatataaagttattgcatgaaaaatttgtaattttcccttgcttatatttgtgcttcattttataagtgacgcaa

SEQ ID NO: 327200 - DNA, 530 bp, Cannabis indica
accgaaccacctccatagccgaacaagatttattatgccacgaaaacttccatctcgcatggttttcaacattcacaccagctgaagacatatcttgcaacagtttataagcacttttcacggtgtaaaaccccgatgattcacaactccaataccaatcatccttcacagctgtagcactaagctgaatagaaacaataagatttttatctctagcttcaaacatatcctccaccaattctaagtcccaagccaaaactcccatccgaaacagactagaaaccctttgattgaccaacccaagattaaccgaagtaacatatgggttatccaagtctggcaaccacgggtcttggagaatactaacatcggacaatagtttctagtaaacgacaatgaattaaaacgacgaaagttctggaaaagtgaccattttaataatggacataattaatattcatgttaatctttgagacatatagagtaatttatgttataaatacttaatttaaaaaaaatacttaaattaa

SEQ ID NO: 327201 - DNA, 664 bp, Cannabis indica
tatttgttaatcatcaaaacaaggagatataaaagtttgagttaacatatgagttggaaagagttgaggagggtgagggtgagggtgagagtgagggtgaggatggatcgtagtataggaggtaatgtgtatggggtgaaacaaagaaaaatggaaaaaaaaaaaataaactaagaaaaattaactgacatgacaaaggtcaaattaacaaaataaaagtaagttattttttttttaaaaaaaaatacagtaattttaaaaatgatatacaatataaaagtaaattatacagtataccaatacaaaagaaaaaaacctcataattttagtatttagtgtaaaattttgaataatttttttggacctttttatgaaatgaataagtgatatttttttgtttagtaaatttcaattatactcataacatttatcaaattacgtggaattttttattaattattaaaaaatgtgtattaaaataattttttttcttttgaggccttgggttgggtaagctgtaagcccaagccaaatctgccttagccaaaagatcgactctaaattgaattaattggattagtttgaatcatgtacattcctactatttaccctaattttattcggttattttaaatttaaaaattttagggaaatttacatggta

SEQ ID NO: 327202 - DNA, 2183 bp, Cannabis indica
cctgttaatttgttgattttttattatttgcatgttattttttgatgttattttcatgttacttttatacgttttttttgttatttttgtgttatttttatggaaaaccgtaaaaatgtaaaaaaaaaaattaaacgtaaaattataattttcttacaaaaaattgtgcattatgtaattatccctaatataattatgtaaatatatatatatatatatatttagtgattcaatattaagttaaaaatttaaatttaattttctttaaaaattttagaaaatttaatttttattatatatatataaataataaatatgtatacataaatatatataagttttctaatagaagttaaatctatcattttctctacaattccagcagtaatagtaaaacgagtcaaagtgagtcaacacgacataattttttacaggtcagattaaggttgagaaaattagacacgagtcaaacaacaggttgacacgactgacacgaaatataaaagcgggtcatataaaatataacacgaacacaatatgataatatattttgctacccctactcgtacatgaactatgtggggtattaaataatatgttgagttgtaatatagtgctcatttttttttatcaaacgagtgctataatattaaatatatatgatcctataggaccttctcattttaaaattggacttgaaagttttctgccaagtagctacattaaataaagctaaaaagagaattttcactttcaaaatctatataaccttcaattttctctttactcaagttcctaaagaagtgttaagcaaaaaaattcacatttaaaatatcaaaataaatacaaaacacaatttcatctatgctaaattcacaacataagagtttattgattttagcctgacccatctaagcttataagaatattctcttaattacactcttttttatttaaaggaattaccttttgattctaattatgatgatattaaatgatttgaaataatttaaggagaatttgggtgaatttagagtgaatttagaattgtagttgaattcggtaaatttaattaactgagctgtctacatacctcctttatgaaagatcaagccacttgtagtttggaatatagtattttaggatttaaatagaataattctggtatatgaccctttccagaaattatttgctatttgaaaatttagaaaaatttcgaggtgaatgacattttatagaattttaagatttattgattcatagcattttgtggtattgatgactagtgctgtaaataagagtcggactttttgacacgatacaaaatcggcacgagcacgactaggcacaaaaagatacgagcttgggtatgacatgatatgatgctacaaatcggcacaacacgacacaaaagatatgttcttaagcacgaaaggcacgacacgtaagtacgaatagactagctcgaaaaggacgacacacgacaagctcaaaaagtacgacatgacatatttaaaatttttataatttattaataataataagatataaatttatcaattataaataagttaaaataatattaaaacataaatataatactaaatatcatagttctataatataaacatgaaaaaaaaaaataagattatatattaatttatttatagggtgatataaaaatttgagtatttataagtaaatattcaaattctcataatttacttgtaacacccaactagtatgtgcgtgttatcgtgattttatattaattgtacaatttgttgctaatcagcggatttatagaaaatcgtgatttattaaaacttttactcaattactctttaaatgaaaataaatatcttttacataatcggaatcccgtatttaaattatttacaatcataatacaaaatacttgatacaaaagttatcgcttagcagccatttaaaatacagcctgctgtcccaaagatcgtacgctacaagtctaaccgccttgacatgtataatcttcactcgctcgctctcacatctgcttagctttagcttttcttttacctacacatgcaaacaatatttgtgagttgaaagactcagtaagaaatgcataatcataacacagatataaacaggattacgattaggcacccatacccccaaccataacccttccccgcatc

SEQ ID NO: 327203 - DNA, 1217 bp, Cannabis indica
agggctagagatctgaacggaaggagtcatattattccgctgcacccactgtaaggttttctaactttatatgtgtttattttcattgttttagaattcatattaggttgttaatccaacatacttgttattaaatctagatcctggtaaaataatttccaacaatttcattctcaggcatgcatattgccgatcgagacgcaacaccaagatcaccccctctatttcttctcaacaaccgataagttttcttcaccgtttacttgttgtagagttcttagggagctatgcatgttgtgtgtgactatttgccctggaataatggcaccgtgcctgcagtctctattatggggagtgagagttctggggtcctgtgttacactgacttgttttgcctttgtatcaatttttgacaggtatattaggtctgcaatggataggactagttcttccaaagcggtatgcaatagtgcccctggtaggaaaaggcagaggcttgaggcggccacttctaaaatcggggcccacccctagcatcatgatctaccattgaggttgggccaacctcggtcgtaccacccctcgaccattccaaaaataccctccgaggggttcgctttcccaaggaataccattccttttaattcccttgatatgtagaaggagagggaagtgaacagggtcctgaaggggcgcttggaggtggagaagctgcaagtttgtagatgggccaccatgctctcagtggtgcgaaaggctaaaatcttggatggcttgcacaccctactctctactaggcctaccatggaagtagaggccttagataagcgcctggctttcaaggtagggagggaggtcgctccctttgtcgctgaactcctagatcaggtggccgggaacgcttcagagttaccaatggagatttgggcatcatgaagcagcgtggatgtctttacattggcccactctgccaagcagtaggcgttgggtaaggcctcaagatattttctttatcttttcttaaaatgattaaggaccatgtgcatttacgaggtttcaaaatatacttggtattggcatgacgaatatttagttgatcatccatatccatttaggaagcggggggtagatgatatttagggtaatgatttcaatgatcatccattggacttgtttgatgaagcacatgaggaatttcttaatgatcttgaaaaatt

SEQ ID NO: 327204 - DNA, 1450 bp, Cannabis indica
ctctctctctctctctttcccacttctctttttctctcttcgaagcttcaaagaagccataaccaccaccaccaccatcacttttcgacgaccactcttcgacgatcgtctgaccccacatgccagaccatttaaacccgcaggcaccgacgacctcaagccccaagcagtgttgtcctttttatcgctgttagcttgagatcgcaagttaaagtttggaggttcaaactttgaacataattttttgccacctccggtgtttgtttgacgagtcgtcttcaccactagactcagctcatcaaggagaacaacctacactaagccattttgcccagcctgctactttttccagtgatgtttttgtagctctagccctttccgatgattttctagcgatatcgtgtaccgtttcgacaaatagttggcatgtgtgtgatctactcgtcgaggtggtcattttgatacatactactcctattttcgaaaacatttctaacacactgaatttttactgccaccgatagttaatgtgcaccgcttaggtgaatttttggaactttaaactttaaatatagtcatatatatgttgttggactcgattttgaatatagaataaaatgatgataattacttaaccatttaatggtatatgtcagagtgatatctaagactggactaaacaattggagctcgggattgagagcttagattatcttctcagcaatcactcttcggccaccgtctgaccccacacaccggatcattcaaattcttaggcactgatgacctcaacccctaagtagcgccacccattttgccgctgttagcctgagattacaagtcaaagtttagaggttcaaactttgaacagattttctggccacctccggtatctgtttgacgagtcattttcaccactagactcagcttgtcgaggagaacaacctacattaagccattttttccagcctgctacttttccagggacatttttgtagctccgcctttttctagcgactttctggcaatatcatgtatcgttttgacaaatggttaatatgggtgtgatctactcgtcgaggtggtcattttgataaatactatccctatttttagtgatatttcggtacactgatttctaccgtcaccaataattaatgtgcaatggttaggtgaggttttagaactccaaactttaaatacagtcatactatatgttgttggacccgattttgaatgtagaatgcaatgatgataattatttacccatttgatggtatatgtaagagtgatatctaagattagactaaacaatcagaacttgggcttgagagcttaggatcatcttttggacaaagtttaataatgacttgagagaggtaaggactcaacttgattattggacttgattttatatgtgttgaataacattagacatattctaattttt

SEQ ID NO: 327205 - DNA, 636 bp, Cannabis indica
ttttgataaatccttcaaaaaccgtaaaaggagggttaacacctaagacgatacatacaataacatttttccaaaacaaagcctcaacctcaatctcttctaggtcaagtttggccacaatctgatcacctacacaaataggtttagtatacttgagtctagatgaaggagtaggtacctggttagcattgaacttactccatatctcttttgcatttgactgaaaatcaactttctcaacctcctcagcccagcttcaagttctcggcgaaatataagagctctgttcctcaccaccaagctctattccagtatctaacatcaagttctcataggtgtcatggaattcttcgacctgttcaccttcagaaactaacccttggatcgaaggggtctcttcgatggaatcattgttgaccgtgactgaattggcaggcttttgggtgatcctcttcttcttcgccatggaggaagtaggggtacctcacacgccttagaaataaacacactttctaacatgtttgaggtgagtacatttcataatgtacatactgttgggttttatgccttaaataaaactcatttcatataattagatttacttattaataaagataagaaataacattttatgtt

SEQ ID NO: 327206 - DNA, 650 bp, Cannabis indica
tctttgaatgattaccttctaaagatcaaaggcatagttgatcttcttgccactattggtcataagcaatcttcccaagatcacgtcgaagtaatctttaatggtttgcctcctgaatacgatgtgtttgttacttctgtaacaacaagaaaagagtcctactctgttgctgaaatagaagctctattaatggcacaatctgttcgaattgagaaaaacaccaaagccctggatatcaacaaaagtgaagccaatttagcccacacaaaaccagctcaggggagttttgccaacagaaatcacttttcaaactctcaaataccaacaggttatagttgtggagctccctacaggtatcttgttcctaattctcaaatgcaatctatgcatcaaaataactacactaatggtcgtggccaaacctctcacagtggtcgaggaaactccacagctggtcgtggtgcttctcaatcttggacacagaaacctcagtgccaattatgtcacaaattggggcacacggtcaagcaatgtttttataggtttgacaaatcatttactggccctgagtgttttggacaattccctgctactgctaatattgttgaaagtcaagcctatattgccacacctgaaactgtccaagatga

SEQ ID NO: 327207 - DNA, 1345 bp, Cannabis indica
tgtgaatgtccatttgccttatttttatttaaataattgtattaggctaattatactagtttaacctaattaaaattgcattagcaacataattaattttgaaataaatagaattaatttttcattagattattttaaaattaatttagaaaaataactttagtttaaagaaaaattctagatagtgatttctagtaactaatttatattttctaatatttaattaagtagaaaaatatattaattaatttttgacgaacataatttaggatatttttcttagaacttaattagaattaataattaagttgatttttgttaacacagattttcgttaatgattatgagcctattttcgcaataaatttgaaaaattataagaaatttgagaaaattaatagaaacaaaaataacaccaggtgtttatgtggttttgcagtaaactctacatagtccacgagtctatcttattctgatatttcttgatacaacattagggttttacaattagtaaacttcttttttctcaaaggtttttttttgtcacctttttctgtataatctgcccctatttatagtaacatagctaggcagttaattatttttaaattcgaatcccataataatattccccaaaattttgggcttaaaatacgctccatttaaatacgtgtaaattatatatatatatttttttgataaatcagagaattgtattgcacaaaccaatatttacatcctattagcaccccatcaagggcctaagagatctatacaaattccattgcttttttctatacattttacatctataaagcatgaaacaaatctctatctacactcttgattttctttggcaagaacatagcaattcaaagccttaaactccatttagtatcctcgatcatcctggaggaatttaaaggattctcttgccaaataataccatttctagctaaaaatgctgtaaaccagagcagcaattgctgcagcaaacaccagttttttgaatttagaaattttgccttaccgatccatctcaccagttgaggaaggctattggctcttgcattccaatccagccatctatccttggtttttaatcgattaagcattgccaaccatagtatcacactatgttttggggagttccatccagcccatacttcatgactccagagcaacctattttgaggaggagagagcagcttgtatgcagttgcaatggtgtatttttgcctctgaaactctgcaatatctgctacattttttatctggtcttttagagctaccatcttcttccagtaccagctggaatggacagaagcagagtagctccaccact

SEQ ID NO: 327208 - DNA, 1667 bp, Cannabis indica
atattttatatgacttagaatataaaatattcaatttcatgtaaattattatgctattcaatttcatgacttataatataaattattatgctatttcatgtaaattgttcaatttatatgtttgtgttcggaagctgtggaaagcgacgtcaggcctttagagagtcatattttatatgacttagaatattattatcggggtatcattgttgggtattggaggtgttggaattttcggagtttggaaaaatgactagtttacccttggaagttagtaactattttaatttagttaaagggcaaaaaggtcatttccttggttaattatttggcctttagtggctttggaggggctggctatatcttttattaagatacaaatgaattaacttaaattagaaataagagtaaacttaaaattgaaggaaaacttagaaatttccaagcctctctccttctctctcgaacaccaaggaaaccagctgggaattgttgtggttacctcaatttgtgtgatcttggttgattagaacactccaattcaaggtaaataactctagctctcctttccatgatttttttcctaagcttaatgtaagttttatgcatgaacttgggtgtttagggtactgtaggtttgggatggtttgttttcgtgtttcgtgttttgggattaggtgggagtatgttgtttgatttgagctgatatggtaggctttgttaaggtttggctaaggtttgagtttgagaactcaaatcttgacctttaaaggtgaattgattattagtgtttgttgttgagttttattgcttggttttagtttattatggtatgtacaggtattctggaagttattggagagcttgggattgaattgaagtgtggggatcggttttagggttcccagcacagaaccggtcgaccggttggtacccaggaaccgggattccggttggggaccgatctgccggttggggcttcttcccgaaccctagtttttcccgtttttacgtaatttaaagtattagcatcctatttatcgatagggttattcttagtttcgattttaaatccccgataagtgtttagcgtgtctctcatagaattctgaatattatggtttagggccctgtaaagcgtcgagctatgtttccactcaggctgaccgacacacttgagcacggaacgaggtaagaatagcatagaacatattatataagcatgttgtatttatggttgtatacgttttgggtgatatcatagcggaacaaccattgtgtcggttcggcagtacaggcatcgtactggttaagagtgatattcaccccagagggtattaattggcgctatcatagcggcacaaccattgtgtcggttcggcagtacgggcacagtactggttaagagtgatatcatggccaattatactcttgggtgctattgatgctatcatagcagtacgaacatagtgtcgatcccgcagtgcgatcatagtgctggtggtgggtgatatcatggtcaatagcaccaacctttaagaacgttctatccatttggcgagcttaatattgagctcagggtggcttaatcacaaagccggcatcgcattacttatatatatgttttgcatatcttactgagtgtgttggctcatcagtttgctacc

SEQ ID NO: 327209 - DNA, 516 bp, Cannabis indica
gggaccaacttaccaaaacttatgtaatttggggaccaatttgctcaaaaaataaaatttggagaccagcttaccaaaatttatataatttagggacctgcagtagaaaaaagcctaaattttattaaatactataaaataataccataaaataattttttttttgaaaaaaataaataaagtaatgttacatggctgttgccaaatctagacaataatgttgataaaattgcattaaaaatgatgaccaaattacatatatggcaaaaataattgcatgagtaacccgcattggagatgctctaatgtaactcatatgtcaaatttgcaatttagaagttgggaagcgacagatagggtgtatgttttatgtttatttcatgggataattttataaaggataaatactattttggaccctgtgttttgtaaaagttattaattggaccctctgttttgttaaatgacaaaatagaccatatattttctaaaatggtaaaaataggaccctaagct

SEQ ID NO: 327210 - DNA, 1143 bp, Cannabis indica
tttttttaaagcaaaaaattacttaaaatatatatttcttctataaatatcaaaggagcatttattatagtttcatacttttagtaattttgcattgtattagaggtaagagcacaattacaaatattttaccaaatacaaaatataataattaaatttagcataatttttgtattcaatattgtaccctatcttccctctttaaaaataaataacattgtccatttgtacccttatattatcataattttttggtaaaattgttactattgttttttatttccttcctaaaatggatgatcactattgtccttatttaccatactataataagggtaagtaattttttttttcttaaagaaaagggagtgaggaaatgggtcctataagtggagataaacacttgagcacattttaaaaagaagagaaaagagaagagaccaaaggaaaacacaacaattggattcatgattgtcacacaaccccactaaacaatgcatttaagcactctattcttatcaaagtacatcatagtagactccttaccctccaacaaacaatctcataccctccacatacatagaaagttgactaaagtgacaaaaggtcattttttcaaagtgggcccactacattccttctcaattgagttatctattttaatattttgtaattttttaatagaattagtgcacctcactataaaatatatatataaaaattatacatcttaatttaataaataatataaaaaattactaattaattatgagataacattttatcgaaatattgtaaaaaaacttattgttatgtagttttaatagaaatagtgcacctcaatatataatatcgcaaaaataattaataaattatatattttaatttttataaaagattattaaaaattatacgagaatatattagtatagtgttaaacattttaaaatataaagtactgtaaggacatctccaatactaattttttgatgttgcttgtgagagaatgagccccatacacaacataaaatatttgatttttcaataaatacatgagtattgtaagttatttttaaattgtaaaaaaataagtcagtgtgctaaggcagacagtagagtttgaattggagatggcaaaaaata

SEQ ID NO: 327211 - DNA, 888 bp, Cannabis indica
tagcccattagctaattccaaccgtaccaccatcactgtcatatccctcctcacaattcccagccgcctgcctttcagttcaccatctcagttcacccatcaccattcgaaccacaataacccctgcgctccaccctaaccattggaccgagcccagcaccagagtccacttcaacaaccttcagtcgaacctcctactgacttcgagcaacccaattttgtccctgcaccaacccgaagcatcatccttaatcaccattctcttcaacgtgaaccaaaaccaacgcgacccagctcgcacgattcaacaccagatttcaccaacccagaacccatattcaattcaaaccagcaacctgaacttataacagctccaccgaagccttcttcacccaaatcgcacctcaccattcaaccaccagtttcgaactcacccctgcacgaacccaacagcaacccagcaaccaaacctccgtctctccaagccaagactccaatcgaccttcaccagactcacgagcggtcagttttcccaaatcgatcaccttcagcaacctccgaaagccagctgactacattcatcactccacactcactggtttgtcaagagtgagctgttagttttgaattttgtatttggaaaatttcttggctgtcgcgtagtgagtggttatgtgtggatgtttgttttggataaaattgaatttggaattgttgaagtggttcaattggtggtgtagttctttgatttggaattgatattttggaatggtgtagttcataattggtggtgtggctttgcaatttttctggagtgacattagaattttggtgtgactttgaaccaggggctgcttgttgtgattatttgggtgaattggaatttgt

SEQ ID NO: 327212 - DNA, 514 bp, Cannabis indica
ttctagttgtgggtaagctttctattcccaccattcacttgatttagttgatttttccatgaatgcaagaaccttgttctttgctttgaatgtcttttaattcccatgttagattgtaatcctttcagcattctgatccacatggtagtcttaagatttgtaatgtgtgatttctagacaaaaaatatctaattctgaccttaactctttgagtcacgaagaacatgaagagcgcaaagcacatgtttaagctcttgaaaaaacaaatggtcggatcatgtacacctttgggccaactaaggaggtcttgttcaagacctggccggccaagggcggccaccatgggatctggccagccaagggtggtaccctacaagctggctggactatgcttggaagtgaagttcctggccagccctaggctgggtcatgggacctggccgatggaaacactgcttagttttaatttggaattagcagataattagggtttaattatgaaactagaatatta

SEQ ID NO: 327213 - DNA, 559 bp, Cannabis indica
cacacacacacacacacaattaattcattctacacatgcacttaagagttcaaaattactaagactctctccttttcttatcacttcacaagttttctcatactttttcttattactgtatcaatgaagagagccctagcttgaaattgcaaggtttcagcctttaatttgcatgatattatctcaagagtaaatacaacaaaaggggagtatgtcattacctgatcaaaggggccaaacctctataaattattgtgtcatttatatttattatcattccgcacgtgaccgttaaacaaaatttgatcgtagtcagactccatatcaattggttgaattccaagtcgacaatgtgattaattaaagaaaaatagtatgaaatagttcgagtgtaaataattagaaaatataaaatagagaaaaagaaatatattagtgtttatattttttttaaaaaataataaaataaaattttctgagagagtgaaaaagggttagaaaaaaatataaaaatatacatttattatatatatttttatatatataacgataaaaaatt

SEQ ID NO: 327214 - DNA, 772 bp, Cannabis indica
ggttcgtcgtttatctgatcactttgcttcttgtaattgtagaaataaagaaggttatcacttggttttggttcttctggaaatttctctgtttcttcacctatttcgacaaagtttcttgtaggatgtgttcttgaatctattgtacttacaaagcacttgatgaaatgggacaaaacaaaaaaaaaagtagaaaataagtaaatttgtaagtaataacacatatttctatatagagagactatcatgacatgtatccatcgttcaatttcaacgactcggataattgatatatttatatatagggccggtcttagttatagacggactaagtttgcgcgtgtttatgagccacactttttgggacccaaaataatttttatttctttgagcatgtacagtaaataacaaacattcacaatttagttaattggggtatatgatacattggtaaagtccgagtctcgtgatactctctttcaaaaagttggtattaggttagtactttttaaaagaaattttgcagtaacaaatgtcatatttattgaataagtcatgaagacataattttaataatgaattgtaatattaattgaaatgtgtctaggccttatttatttatatatatatatatatatatatactactcaatggttacatttttatgtaaccatgatggttatattttttctttgatatgtaatagcaggttactaataagttaatttttttttagaattaattaattgatcataattaataatttttctaa

SEQ ID NO: 327215 - DNA, 1530 bp, Cannabis indica
ctccactagattacttcaatcaataaatacttggaaagacggataaatatgaatctaataatagacctaagaatataaactccactaagttactccaatcataaagacacataaacaacttcaatatcaattctacaacaaaaaaaatcaaaaagtaagttgcaaagcaaccattttaaaccaaaagataggaccaatatgcttccacttctttacgagataaaatagcacgcacaagtcatacaaaacactccaaaggaaaactactagaatcacgaacaagaacatcaatgccaataatctcattatcattggtaatggtagcattcacatttcactttaatagtagaatgagttatccaatgaacaactcttggtagaagagtgatttttgtagcctaagagtgtgatttttgggcttttaaccaactatcgtaataatgacttgcccatcttaagacatctgaagcatctgtgaatgggggtgccatgtttttgctttattttgttctccccatgtactccatttgaggatgataaacaaataggattggtgcggagaaaaaacaaagaacaaataaataaccatactgacaatgtgccaaaggagacttggcttgaccagcttccaaacttgaattgatagagggcaaaaagagggcatgtatcaaataattttatcacggagccaacaacaataaaaagcaaaatatagagactagaacatattgagataagagtgaagaaccagtgagaagggtattatgacatactcgcaaagcaaaaatcttactataccatttagtaaaggaattgaagaagacgagtttggggtgaaaagattaaacgctaggtatacatgctatttactctccactttcttcatgtgccacgtaacatgtattaaaaactcatttttaataagagaaagaaataaaattagaaatcacacatatggaagcaaactgttttaggaacttaaaaactattgttattcaagaaataattgaaataaaacttaaaaaactaaaaaaaaaacctaaagaaaacaaatagtgaacaccaaaatatgagaggcacgctaggatattctatcaaacagggttgccccactaggcctaaaaaactctttgacaaaaaggtcccaaatttattttttaaaaataccatatattttatttttactattatttattaaaaaaatatactattttctaaaataaaaacttaatttattttttaagatgttacatttaatattttattaagaaaaaatgcctaattatattttcaaagtattatattttagaattttaccactatatatacaaaaaaaaaataacaaaaaacataaagattttcatattaaaaaagcgcaattagattttttggcccaaggtcccaattagcttgatacgggtctgctatcaaatagttataatttgtttacctagaaacttgttagaaattattttaccaggatcttagatctagtcacaagtatgttgattaacaccctaaatatgaact

SEQ ID NO: 327216 - DNA, 1962 bp, Cannabis indica
ggtagtgaagatgaggatggtgacagagaagatgaaaaagaagacaaagaaggacatgtctttgccccgaggaagagagctagctccgagttgggtggagatagcaaaagatcgaaggatgaagctaaagataagctctaacaactagctgtttctctgaggcaaagttcagacgtccatggacaaagaggtgctgatgttcccaaaagtgaaaaatctactaggtggaacactcgttccagcaaatgcatagtcaacactcaaccttcgtctgtcccacctgctccactagtttcaagttcttccgctcaactacctagagaaaaaacaagtttacctccccttcctccttgtaatattttctttccaatctgtcctacttcactactagaggaggttcgtcctgaactagacgttgtcgacaaacttttccacaaaagaattaacttcatatacgaaaaaataaggaaaaattcatcctttccaatcttgattataaaattcacgtctgtgggttgcaatgttaacttctactggtaacattgctttcgagccgaatgtcaacgagaatagaatgtgtcccgtcactattttctctattgttctgtgagcccaaagtacttgtggaagttcatctacccatcttcctttagcagcgtccaacttcttcttaatagtgtcttttaaggttttattaacagcttctacttgttcgtttgcttggggtcttgatactgacgagaagcttttaataatcttattcctttcacagaattcattgaatagttctccatcaaactgagttttgttaccagacactattttaattggtactccaaatctacaaatgatattcttgataacaaaatcaagaactttttgcaagttatggaaattagaggttcaacctttgtccattttgtgaagaagtcaactactactactacgtactttgctcctcctcgccctgtgggtaatgccccgatcaggtcaattccccatattacaaatgggtatggcgaggtcatcattctcaattctgttggtggtacgcgaggtatatgtgaaaatcttttgcatttttcgcatctcttaacaaattcatgtgtgtctttgtttattgttggccaatagtatcattgacggataattttctttgacaaactttgccaacttgcatagtctccacaaaagccttcatgaatttcttttattatttcactagcttctgttggtaacacacatcgtaagagagacattgaatatcctctctagtataattttccctcgattatagtatagcgaggtactgaatacaagagtttgcgcgcctcgactttgtctgtaagaagttccccgctgagtagatatttgattatgggtgtcatttatgttggcgaagcctctatcatctaaacttctttcttttcacacatacttggttcactcataacttcgattggtaccaaattcaacttattgagttcgttttacgaggccaattttgccagtgtgtcggcattagagttgtattttcttagaatttgttcaatcttaaaataatcaaactttttaaagttctttcgaaccttctctagatattttttcatcttgaatcattttgcttgatattcacctagaacttaattcataatcagttgagagtcactatagcatattagattcttaacttttaatgctttagctattctcaaaccagccaacaaaggttcatattttgctttattgtttgaagtttcaaattggaatcttaatgcgcagtggaatttgaagttggcaggcgacattattatgacctcctacccccgagccattctcattcgaagccccatctacatataatttccaagttttggtatcgctcttgatgaatgggtcttcttttgagattattccttcaattagaaagttggccaaagcttggcctttgattgatgttct

SEQ ID NO: 327217 - DNA, 496 bp, Cannabis indica
taaaataatttccaacatggttcccacactcccctcatgtatggcagatagggggccatccaagagtccttactggttactacatatgcctgctcctcttcgatggtaggcctctctagatactccacgagtattgattctaaggtgtcaatatcccgggttgatgccaactttgccaatgcatcagcattgacgttgtcctctcggggtatctattgcattacgtagtgttgtgcctgctctaaataattttcaccctagccaagtacgcgacaatcctactcctctttgcctggtattctcctttgacttgacaaacgaatagctgcgaatcactatagatgtctagattgatgatttttaattctttcgccaaatccaggccaactagtagggcctcgtactcaacataaatattagaagctttaaatccaaatcttactatgcaatacatattctggcctttgggcgagatcgtgactaccgccctagggcc

SEQ ID NO: 327218 - DNA, 1681 bp, Cannabis indica
aggttctagacttacccaagtgactaaacggccatccatcgcatttttccgttattgccaagcaaaaatcataaaaattacaaatgcataaataacttaaataatacctcaagtttagtaaaatctctgaaattgagaaattataactcaaatgcccatttctaaaaatgggcccacaacataatatattcatgcataatataaaaatatcaataattaacgctaataatctgctaatttccaagttaaagttaagcgatctttatagagggcttgcatggtcatttcaccaaagagcagaggcagaagaactcctagtcaaccaaatacgacgatctaaattaccaaccttctccaccattacatctccttagtcacaaaatccttgatattgtgaaattcctttacacatgtctactcctctactggattatttactatttggcaactatatctttgttagttaggaagtaacactagtagttaatccatcggtggaataatgtcaaaaaatatatagaaacttccacaggctgaataattatcatgtagccttcctggcaactttaacgttcactctctctagcagagttagagactttaggttggtctttacacttcaccaaaaatcactgctccaactccagagtaatcaccatctcataagtagactttcttgcattaacgcaagtctagaaacctaatttagtgtagtttaagagtaataaaatacaacccttatcgactaacatatagttgctcttttgatcttaatatttatttgattgtcctccagtgttccttttttggattaaattgatacatattcataactcccactcaatagcaggtgtctagtctaatgaatttcaaagcatacacgagacttctcactgttgatccttatggaattccttcatgaattttatctattctggaatagttgaaactattcctaagataaataaaatctatgtctaggagctaaaaggcttcctttgaaattagccattagaaaaattctctagcatcttacaaaagtaagttgcttgcacgacagtaagtaaattaccaggtataccataagtcatatgtttagataaacttaaacctataatactaggatcacgaagttttgttaagtccattgaatagatttagtttttgaaatttccattcttgtccttgaaatagaaagctttttggttactccatgtaaatagttttaaccatagttctcttggctttgattcttagttccttattctaactatccattacctatttaaactaacaatggatttttatcacatgtgtctcccaagtgataaaaggatgggttccttaaaatcctcccaatacgataaggtaccgtgactttctatctaggaacattaattgtattgccctcatcagttgtgtgaatacaacaaaggcagtgggaccatcttatgtagcatcagaagataaaacacttttggaatgtaactcctctactttgctactttcttttcaaatttattcatattcttagaaaagtagtatttgttgaaacaaacacttcgttatcttaatgacaatatgatggtccacccctaatcactttagaatagctaccaaacttgcaaacttaagttaacagttctagcttttcttaagttcacgattaggacatccatga

SEQ ID NO: 327219 - DNA, 931 bp, Cannabis indica
ggtcaccattaagaaaagcattgcttacatctagttgtttgacatcccaatgtgaagtcactgcaagtgttagaacagccctcactgttgttggtttgaccacaggactataggtttcttgataatctattccaggtgtttgtagatagcctttagcaacaagtcttgatttataggtgttgagagatccatcagcattaagctttatcctatagacccacttgttatcaatcacagtcatataaggctcatggggaaccaaagtccatgtctttgccttaactaaggctttgttttctgtttgcattgatttgaaccatttgagatctttgagtgcttgcttgacagatttaggttcactcggcagtagagattctttgagaggatgcttggtggaaagatatgctttaggcttacgaatcccactttgaggtcttgttttcatggtgtgagtgcgagaagtggtagttacttcaggttcagctgctgttataccagcagaaattggtactggtgcagaaatgggaatggtaccatcagagggaaggttgctggggaaaggtggtgttggtatagtggttggattggcatttgtggtgatggtttctggtgtgaggttggttattatgggagtgggatcagtgttggggttgggaatggtggtaatggttgctggtgtagcgacattttgtggtgatgttggtggaggaacaggctcacgggttgggtgtgtagttgaagaagcaccaaaaccagtagaaaagaaagtattagtggcaacagtaggaagagaaaaagtagcagtaggtaaattttgagattgatatagaggtacatgaggtgatgcagcagtagagattgcaggaaagtgttgttcattaaaaacaacattgcgtgcaatgtatattctgccttgagagttctcacacat

SEQ ID NO: 327220 - DNA, 508 bp, Cannabis indica
acatccaaatgtcttgaaaaaaaaatacttaaactcaacacgtgggcagaaaatttaactactcatgttagcaatgaaaatatatacaagatgacaagttcattaaaaatatatttgaatatgcttaaaataagattatttctgacgatcgcgagatggaatcggtgattgctcgcagattgaggaatggccagataagctgctcgcacgtaaagtaggaaattaactacttaacgtcagaggaaaggacaatcaatggaaaaccctaataaactttatgcatgtgatagtttatattgtcaataaaatgcaagcaaacatctgcataataaagtttaaacttaaaagtgtgaggtattaaaaagcaaagttggccatccaaccttgcaaatctatatttacaaaaaagtgtcgctaagggcaaaaccattgtctctgtcaaagggccatttccgaaaaagagaatagagagataaataaaccaagtctacatgctgggagacttgga

SEQ ID NO: 327221 - DNA, 1276 bp, Cannabis indica
tggatcgattactttttgagatcaaacaacatccaatccgcacaagtgcggatatccgcatttcgcggattggattggattggatcgtgcggattggattggatcggatactttgtgaacacccctaaaaagaagaatacagtggtaaggaaacaatcgctgtgagaaatggtaataaacttcctattcatcatattgggcttggctctctgcatactttgtttgcatctccattagtcctaaaagaaattttacatgtaccccaaattaccaaaaacctacttagcattttaaaacttatatttgacaataatgtgtatgttggattcttctctgatttgtgtcttgtgaagaacaaggaggcaaaagcaggtcgtactctaaaggaggcttaaagatgtactctataagtttacattctacattcaacatcacatcttgcttcaaatccattggcatcttgtttttcttatttatttattttttttgtcttataatttcttccaatcctaatgctgcttagcctgtagctagataaagtgtttgttcaatcaaagatagatggcataagagattaggccatccatctagtcgtgtacttgaagttgtttcaaccacaattaaaaaaatcaaaagcggtaatcattctctccgtttttgtgatgcctttaaattgggaattaatctcatacactaccatataaaaataaccttcttcgtgcatttaaacctcttgtgcatacagatctatgaggatcatctcccgtaatatctaacactaattttagatttcatatccactttgtgaatgaatacaaccaatatacttggatctaccccttgagaaccaaatttgaggcatttaatgcttttactcactttaaatctctggttgaaaactaatttaatttttatatcaaagcattcactcagtttttgaatgatcatggtattgagttcacacactcaagttcatatactttagctcaaaatgattgagttgaacaagacttacattttttgctcaaccacatgttcctcaaaaaaaattggtgggatgctttaaaaacatccacttacctaattaactaattgcctactcttgttttgaaccaaaaatattaccctttgaactcagtattaattaacttttacttttgaactatttttaacctttcacctgaattgtaaaaaaaaaaaaaagaatataaaaaaaaaaaaaaaagttaaaattactagaaatattaatatggaacaataatatatatatatatat

SEQ ID NO: 327222 - DNA, 718 bp, Cannabis indica
ttttttttttcctgaaagaaattatgttaaatattatgtacaactttatgtggaaatttagtaatggaccacaagtatggtgatataaatttgattattaaacatataattgtagttttttttttattttattttttttttttgaagctaattttaattgaaacagtctatttgtgctttaaaatatagaaactaatttagaaaagtaaaaaaaattggcaatttttcataggccgtttaggcccatctgataaatataggtcaacaatttcataaaaaaatggctggtctatttaggcccggcacaagtccgacccaacacaaataatttgtgcttatgggctgggttaggcttactttaaaaatatgggtcaggcccagcccaacccgtttataaaatgggaggccggactcatataaaaaaagtgggcttttataaaaacaggctgggtcgcccgaatgtacagctttagcctctttataatagagattctttaaattttttagctaaatgtcataaaaaatgcctccatcaactcctttatatcatagttgtgtaatagagatacactcaaaccaatgtaatttgttcaatatgtagagaatgaataatgcatgctctacacttattttaataatatatgaataatattttatttatgtatgctgtatatatgttcaaaaattattattttaataatgtaaaaataaatataaa

SEQ ID NO: 327223 - DNA, 2124 bp, Cannabis indica
cttgaagcggtttttctgacttagccaataggcactctaactaaaattaccggtaagcagaacgcttaccaaatacgataatcaccccctcgttccagagttctaatcaatgtccaccgaaaacagtccttaaccaccttctcattccaacttctgttccaggtatgaaaagatccatgactctccataaaggttggtttcgttggaattggaagttggctttaatatcttctaagcctcgccttggaagctaaggtctatcccaaatttcgcatgagccatcagctatcagtataccagccccattcacgcaaatctctctggcctctaaaatactcttccaacaccttgaatcattcccatttttctccacagcccacatatcattgtgtttacaatatttatctctgagtagtttcacccacggctcatcctttttctccataaccatcaaacaaagtttagccagtaaagccaaattcatatccttaaatcttcagaatccaagtcccccgcatctcttcggttgacataactcactccagcttcttagagcacaataattcttttatccacacaaccaatccattagaacttgcaaccacccgatccagctcctcacacaaagtagtaggaactttcactgttgacataaagtaattggggatgctttggagaacggaacttgccaaagtagtccttcccgcttgggagagatacttcgccttccaaccttccagtttgcctaggattttgtctttcaagaacgaaaaatcattcctcttcttagccgagaaaaagaaaggatttccaagatatttctcctttggattcaaatttttgaagcccaaaatccctttgatttcctctctgcataagctctttgtgttaggagagaacactactccactcttggcactgcttacacgttgtcccgaccaactttcatacttatgaagacaattcagcaaagcacccgcattttttgcattagcactacaaaagaaaatggagtcgtcggcataaaacagatgagttatcggggtagtgttccttgccacactaactcctttcaaatcaccattcttttcagctcggagaataagtttcgataaaacttcactgcagagtatgaacagaaacggtgaaagagggtctccttggtggaggccccgtttgggattgaagggagccaagggtgcaccattgagcaaaatagaatatctaactgtcgtaacacactccatcagcagagtacagatcttgttgttaaatccattcgctttcaagacccgtagaaggaatccccactcaagatgatcataagctttgttcatgtccgtcttaaccgccacgactccctctttacctctctttcctttcatggaatgaagaacttcctgagccacaagggaacactccgcaatccatggccaggtatgaaagtcgattggaaaagggacacgagccaatctaaacaacctttgagacgatccgtcagtatacgagaaataattttatagccaaaattgcatagactgataggtataaattgatcaaaagtgttggcacttgcagtcttgggtatcaggcttagaaaagtctcatttacactttccatcatccgcccagttaagaaaaattgttgaaccatcgaacaaaccgattcaccaactgtatcccaatactttctgaagaaaattcgagggaatccatctggccctagagctttgaggggatgcatcttgtattcccatcaccaaaccggagccaattctcgcgagacttttggcgccaaatcctacctattttctcctccatatcaaggatttccatttgaatttctgcttctttagaaaccgtagaatgatcaataggcatcttttgaattctctccaattgggcccgaagctgtttcaactttttgtcacagaaaccaaaaacattttggttccaaaccttcagctctcttttagttgtacttagcttttgagggagccccacaatgcttcggttatcacaatctttcttccaggcactttcaacaactaatctacaatcttctctcgtagtccagacctcaagaaaacggaatgggtagttcagcttcacagtatcccccca

SEQ ID NO: 327224 - DNA, 781 bp, Cannabis indica
gtcccgtgatgtactttcacggaatgtattccgtggtacattagatgggtcttagggtacattaaatgagtgttaggatacgtttttactttttaaccttaattacccttagatcaatctcagcagtcaaattaaataactctctcatctgacggttgccgtacatcacggattacaatccgtgaaagtacaataataggacaaaatcatatccttatatataacaaataaaaatctaatttaatttttgtcaaaagactattcaaactttgcctaatggcttgtacaagcttaagacggtccccgcgcgcccggtactatcactaccaccatgatatattatatataaaaataataaaggtacacacatacttaatttatatatatattaaaaacgatatgtaggacttatcaaaaaaacgatatgtaggtgtagggtacatacccaagtaccatccataaataatttcataaaacagtcgaatttaactaatcatgaaagtatatataaatatttatttatatgtattatacttcattaaaaatgaagaggaattaagaaaccaataatatgatgtgacccttctccattttgaataataataaaaaaagggagaagcatctatatagaaaaaatctctttttattatgatatattcaatttgtaacatccaataaattgaaaatttagataagaaaaacacatgcatggtattaacatgtaccaacaccatctcctcaaaaaaaaaaaaaaaacaatgtaccaacaccatacgaatgt

SEQ ID NO: 327225 - DNA, 621 bp, Cannabis indica
ttaattttttgggtttaattattgggtttatttttaagtatattctgttaaaccaagaatgttaaaccagaaatgtcgttagataggcattttaatatataaagatatattttgagaaatcgttatatatctgttattaaagatctgctatatatctatagatatttaataaattagaacaaatatatttacggtggtttttttatcttaaaaaatgaatttaaatttgaattttatatatatttataagggaattcaaataaaatatttaaaacagagataattggaggctagggctcttgattttatcttttatataaataagaatgagtatagcaatatatctttaattaagaaataagtaattaaaaacacatttaaagataattgaaggcttaggtcgttgattcttttttttaaaaaaaaaataaaataaaaataaaaaaagtagtgaatataattcgaatttaattaaggaaaaaaaaacaatcaacccctactatatatatggatgaagactaatgtattattcattatttacttttataacaaaaaaaaaaaaagaaaataagtagatagaataatggggttcagccaatgcatgaaacaagatgatggcga

SEQ ID NO: 327226 - DNA, 1128 bp, Cannabis indica
cccctcctcttgattttgttctagatggcccccacaaatctgagtgtagatagtcaacaattcccttggtagtatgcttcccaattccaaacttgactttggtagctttccaaagtatgcattgctcacacagttccattggatgtatctgatccttaccaaatactcgaagtttgctcaaaatcttcaaaccaccatagctgatgtggctcagtcttctgtgccagattagagttggttcttcacccttcggagccactgtattgacttgatttctgaatgtattaccctaaagtacatagattccattcatcacagtagccctcacgaccacccttgaaccttttgtcacctttaatgagccattttcaaccattactgagtatccatcttgatctaacattgccattgagatcagatttctctttatttttggtacatgtctcacatgttctaacattgtaactccatcaccagtcatttgaagcttggcagatccaattccaacaattggacatgaatgattgtaacccaatttgacagtgccactattaacagttctgtagttgatgaattgcttcttgtcaggacagatatggaaggaacatcctgaatcgatgattcaacctgtatttgacttgtctttataaattaccaacacactagcaatgtcataaccatcactatcatctccatcagatacaacatctgcatttccattcttcttggagatataatctttcaagattggataatcctttttcagatggcttatcttattacaaagaaaacatattctcttgagcttggcattagacttgtctttgtttccactgctttgatcactgttctccttctttgaaccctttcctctgacaaagagcccttcactagcattgtcatcttgtttatctacctttctcttcatctcctttgacattagtgcactctgtacctcctctaatgtcaaagattctctaccatacgtcatggtgtcaacaaaatgctcgtagctttctgttggaagagaattcaacacaatgatagcctggttttcatcctcccccttgattccaatattctctaaatcaaggatcactttattgaaatcatccaaatgatcttcaa

SEQ ID NO: 327227 - DNA, 603 bp, Cannabis indica
agagagcattttaatgcagctaactttcctgatctcaactagcagcaaagctaagattaaaggactctgagtctgctcctcaacacttaagactcataattctgttgtcttatctaaataaactcattatgaatttcaagaacttgattttacagttgagcttaataaacaaaagaagcagaaatagccattgaagaaaccaaatattcttgaatatttaatgtacaactctatttgcagatttcagacttaacatacactcttggagaatcaatttatacataaacatacactaatttaatccgaatagcacatatgtaaacacaaatcataatatctaatcttaaacagttctcataattttaatcattccaacaatatacatacctcgacgcagtgacgaagccagaaatttagttgagtgagggcttgaataaatattaagtcaaaactaataaaaataatgataaatgtatctttcaaattttcatcttcaacaaaataaaataatactattgacaaaaataaaataaaatattatcaatggtattattttattttttaataaagtattatttttttattatttgtattggactactt

SEQ ID NO: 327228 - DNA, 511 bp, Cannabis indica
cttcccctttttgctggactttgttgtttctttggaaatgaaaattgtacaaaatagtcaccaatattgttctgtagattaaatgagtatagttagtagtgagtatacttactcatatttctccttgttgaatttaacaaagccagtcttcattctctcaactgcatcataccctcctattttgccatcagctggggtctgtaattctactgttatttgctccaatttcaaagctgctgtagttttcaactctccattttcactgctgttatttttacttgagaagaaatctgtttgttcattactcacaacacaagtcattcatcattcatttattagagcttaaactttcctctattatgcataattgaatcactcatttattcattataacaaaaattcaattattcattgaaaaccttagtttccaaccttatctattattaaagtaaaattgaaaaaaaaaattaccatcacacccttataattctcttcattaaaaataaattga

SEQ ID NO: 327229 - DNA, 941 bp, Cannabis indica
tgtgttttatatagctttgtttaagttattttgggaacaacacatttgaatttgattcttattttgaattaagagcttactaactgtgtttgtttcacttcatctatcgcagttgcacacagcttaagaggctttcgtacggagatttctactttcaaaaccaacaaggtacatggttgagttagaaatttagattccatctgctttcgtggtcggatatatgtgaacgaacaagggattaacgctcaggtactgttggtaagtggggttggtggggctgtttttttgctgcagcaggttgtttattactgcttttctttgctgcagtagcctgttttggaggttcttggcctcctttgtattgttttgctgtgtttgaataaaaagttcctctttggctcaaaaaaaatattagttagttttccattccacaagttaaaatcttttctaatgttaactcaaagcatgtctctgtaaattagaaggaaaaagcttcactttagataaaatgttctcaaagtgtaacttaaaaaagaataaaaagcttcactttaggcaattattaggaaaaataataaaaagcttcactttagataaaagtttctcaaagtgtaacttaaaaattaagaaaagatcatttatttaagaacggtatagataggagttataaggtttggtgtcaccacaaagaaaaaataagaaatttgtgtgcggtaccctctaggaaggacaagtttgttcattacccaatggttgatttgtccctgaaatccactgtaaggaaatttataatttaatatatgtaaatatatatcaattatggagttgactaaactttttaattatgtgtagtgaatattggacggtgataatcattcaggctgctactcagtgagtggcacttcttgacccaaagaatatgccaattcagaatgaaatta

SEQ ID NO: 327230 - DNA, 707 bp, Cannabis indica
ttgaccaggaaattaaagaagaatcaacaacaaatgcttccactgaaacatactcctttcctgtttcccaaagagaacttgagcagggagataatgacgacaagtcctctgtaacttcctaagacagctcgggacagggggcagtgacgaagattctccctttatttccaataatcatcatcaggagcagagaagtagcagtgaagatgtatcctatatatgagtcttctgaagatattaaccaagaaagtaacactggagactcctagtgagagagggagggaccttatattgtcacatctaagatcctgctatgactgccacttgaatctggtgctaataccaaggtaccaaaacatggagcatctaaaatcatcaataaagtaactattacctagacaaataggttggatcccaaaacaaacaggttggatcatgctatgactgccacttgaatcaggtgctaataccaaggtaccagaacatggagcatctaagatcatcaataaaggaactgttccctagacagttcacttcacagtgagatccactttaccttgtgcaagtgaatcgatcgcctctcgaaactaaaagatgcagcgaagtcatctataggtcaagaggtccatcgccaagttatggcccctacattactagcccaatagagcatcagtatagtgggaatcaacttagcttctttgataaaa

SEQ ID NO: 327231 - DNA, 1019 bp, Cannabis indica
tattctacgtgtagtcgatattattctaaaaaaacttactctgatacataataaaaatcaaacaatgaatatgactacatatttttatacataatgatttgaaaaaatctataaaaaatgaaaatacaacattgaatctaaaaattaattgaaaacttactatacaatatttgtaattatactttgtacttaattatatattttaattattcatgattatttaattataaaaatagacctaaaaatattaaaaaatatatatagaaaaataaaaatacagcgttgaatcaagtacaatatttgtaattataatttatacttaattttatattttaattagtttttttaattattaataattataatttatatatatgattagagtcagaatacttttaattagtaattataataataagaagttaatttattattagatattattatatatagattaagttgttattataatgtcgcgtttttaaagtttaacttacgtaagattttagtttgaaatatatatttttttttatgaatcagaagttgtattagcttaaaaaactgtttgcatacactcaaatagcacccgttaagggcctaaaataatcatctatacattttagtttgcatggaccttgtaattgatttctgtatctcactacaagaattatgcattttaatgaggacaaatttcgtcagtaaaaggtatgtatttcgtcagtaatgaatatcaatggcgacatgccgtcagtaaaaagtcgttagtgatacttcgtcggtgataggtattattacttgacgacatttaaagtcgtcagtgataaaaataattaccaacaattttatcgttggcaaaaagaagcaatttttaaatttttttaatccgtaagtctatcaatgacaactttttcatctttgataatatatcgccattgatttatttattttaaaaaaattatagataaaaaataatttttattaaataatttcttaattaaacaatattcaaaataattaaa

SEQ ID NO: 327232 - DNA, 649 bp, Cannabis indica
aaagctctaattcatatatacgcatctttccataaaagagacaattattcacaattgaaatagcatcattcacatatataaaggtaacatccacacaaaataatatataagagacaagactttcattgatcaatattgatattactgttatggattttttacgcaactatacgtatcgattttaagtaatataatgttaagtagaatatagtttcctcgaggattgtagttaaatactaacaaattaatttttttattctatttacttggcaataaattaagaaaaaatatgaaaatctaaatcaagtaaaagcaattaatttagaataaatattaacaatgattagaatttagagttattaacttttatttttgaatggaaataatactttattaaataaccatctctgctaccaaaataggtaacaaatcagttggaacaaactccaaactgaaagtgcaagcaggatagaatatagaaattctaacaaagttattatgagccgccatattagctgatcgtctaacaaaataaaaaactacatcttttaaatccttaagcatacccttacaaacattcaccacttgaccaaacatggatctcatatcaattgtgcttcgtaaggcttgaaccaccggaaggcaatcc

SEQ ID NO: 327233 - DNA, 695 bp, Cannabis indica
atttttttttttaatttttgctctattatataaatctcttcaaacaatgtaaaacaataatatataactcatttaaggttagtaaaacgatccaaaaatatctaaaccccttttctctcagagtgaaaaccaagaagcctggtaaagtattctattattaagacaaaaaggagaggagacataggatccccttgtggaagtctttttttctcttcaaaattgtcttgaattctaccattcagcataaggtggtagttcgttctcttcaaacatgtcattatccaattaataaaccgagaaggaaagcatagaagccttagcaaatcttccacaaactacaacttaacagtgtcagaagccttactgaggtcaattttcatgatgtatcttgcagagatgttcttccttgtgtaatcctttaggagatcctgaaagatcgtgatattgtgagcaagaagtctatttttgacaaaagcaccttgattgctttaggcaatagtaggaagcacttcagggagagccaaaccttggtttttagttacaatgaatttgatatattattgtgaaaattgatatatattattcatactagatagatgttacgtgccaagtcacgtatgttaattttattttaatttttagttttttttaatatcataattttaaaattactaatattcaatgtagtgataatc

SEQ ID NO: 327234 - DNA, 521 bp, Cannabis indica
aagaaagaaaaaaaaaatagtaacatatttggtttacttgttagttgctcttgtgtaatataatcaatggtaaacttgacaagaattaaaataaaaaaaatgattttcgagtcaacaaaattgttagtaatataattaattaataatccaagttgttggatgcaaaaaccttgactttaatgttgtctcacgaccttatctctcacgtattaaatcaacctataaatattatttttttttatatataaaatataaattaaaaatttgagaaatataaatttgacatttaagttgaaaattctgttttatttattaaaaaaaaaaatcaaatttctatattaaaactgaaaaatgataccgttattaccatgaaaaagtggtataaatttaattgaaaaaaattagggttgcttaattgggttcataatcttattagtagaatttacgtggagtatgggttttttaaaccttttatgataaatatggcataattaattatggacactttatatggctttttt

SEQ ID NO: 327235 - DNA, 688 bp, Cannabis indica
aaccatgtcaatagacatgaacctctaatatttattttttctgtttttaataatttaaagttataattaaaacggttgagtaacaaaaattaattaccaatacataaaataaaatatctataatagagaattattatggttggggccattgattgtagcgtaattgttttggttgatgtaatttttgactgagcagacttgtgttatgatcaatcgacttatttacaattttaaatttattgaattgattatataattaagctggtaattataaataacttaatttagaaaataatagtatatttagtcattaatatttatataaaaaaatttaatacatatttatttctcacgaaggattttaataagaaatgaagagtataattagaatgttaattttttttttttttttttataattatacaattactatgtatataattacataatttgaaatattagtttttttataattaaacaatacactatctttgttttaaaaaaaaaaaaaaacaaatacactatatctttccaatggaaacacactctaaatatattatatatgtaattaatcatgatcatgataatgatatccaaatatagccataaatctcattgtttttgcttgttgttttttttttactttttttctttttgagtagaagcatgcacatgtaagtaatcaaaa

SEQ ID NO: 327236 - DNA, 1026 bp, Cannabis indica
gtgaatgtcgatagattatcgacgttaatacaaaaatattgaaaacttttaaacagtaaacacgaaataagtaaaaagttttaaacataagtaaagactaaacaaattttaaaactaaccactaaacaatcacaacaatttaaaagtcttcactatgagggtgatgttcgcaatatggacacaacgattcaggcttgatcggttcgccattaaaataacctaatctgcaacgaagacactcttttgagaaccctgctggtggatatggataagccagccactcatcattttttggctgcgaaggaaccttcattcgtttgccaggttttcattttcaaaacgtttaaaaaattatatatattcttgtatttctaaagtaacttcatcactaggttcatgtttgatctctttactagacatttagaatttataagagaagaacactctaagattaaagaataagaaacatatataacttatgaagtaaatgttaggaaaatatgagatatcaatagaagaataacaataagatgaacaaagagaccaagaaaattacaactctatgcaacaaaattacaaggactatagattaaataaaagttacaattccaaagcacaaaatacaaataaagagaaagaaagaatgaggacaaagttacaactcaaagcaaaatatacatataaatgtaaaagcaataagagaaaatatatatataataaagaaatatatatgtatgatatatagtagatatatagtgtatatatattagtgtatatagaagagatataatatatgaataaagaggagaagagagcagaaaataaatagaaaatagaagatgaagaagaacacaactaagcaaatggggatcacaaaaagtgtaataccctagaattaaggaatggattagcaaaaccctaattagataattatgaataattaaggaattatattattatataattcagtatatgtaaattaatatgatttatttgattaattatatgttaagatcccgttggtga

SEQ ID NO: 327237 - DNA, 773 bp, Cannabis indica
tcttttaaaaccttaatcgtatccttgcaaacattcaccacttgaccaaacatggatctcatatcaattgtgcttcgtaaggcttgaaccatcggtaggcaatctgtttcgatacacacatttgtccattgtttcttcttaatccaactcaacacctctcataatcccatggcttcggctgtagcaggagaaacttggccttggaacaatttagtgcaaccttcaattagcattccttgagtatcacgagcaaccaatccgactccaaactgtcgggtttcgttgaacaaagccgcgtcaacatttatcttaacactattaacatgtggaggcactaacacactgcagcatcttcggttatataaccagaaaatgtagtctcaatgactgattctagtgcgtttttccattggttaagaaagctttttgctaacgaaacaatgctatccactctgactcttttatcttgccacaccttgtcatttctcgcattccaaattgaccaacacaaagccaccaacaacccatttttttctttttccagctgctgaaatcagttgatgcaccacaccagaaacgtgtcttcctgctatactacagttcttattcccactcggtcccaacacctcttagcagtaggacaagttacaagagcatgcaaagttgattcatcttctaaagagcagatcaggcaaagagtttcaactggtacatgcttgaaacaaagctgtaacattgttggaagacaaccacttcctgttgggttttatgcc

SEQ ID NO: 327238 - DNA, 774 bp, Cannabis indica
tcagattcattgtcaactcaagatggattgaagcaaatacagagaaaagatcaaggcattgtaagacatgaagtcactgttgcggataaaagacgtgcaaatccttattggaagaattactgtactaagcagatttgtctccaagtacactaacaagtgttttctcttcttcaatctactcagaggtagcaatatgggatttgaatggacaagtgagtgtgagcaagccttcaagcaatcaagcatcacttagccaaactttccatataatccaatccaatagatggtgataaactatgcatctacttagcaatcactaagaatgcagccactgctgctgtggtggatgagaaagaaggaatgcaacacccagtgtactacattgacaagcgtctcattggggccgagtctaggtatcccccattgagaaattggcttattacttatcattggcccattgaaaactaaggccatactttgaagcccgcccactcaaagtgttaactgtccaaccactaaggcaagttttgaagaagcaataagcattaggacgttactcaaatcagcagtagagctaggttaattcaaaatcacataccaaccttgcacaataatcaatggatagacattaagagatttcatttgtaaagaccgctcagtttaacttggaaattagcagttaattatgtttaattagggaaaattatttatagatatttaaataattatttatgctattattattgaattctgaaatacattttatgtcatata

SEQ ID NO: 327239 - DNA, 637 bp, Cannabis indica
tttaattttttattagttttatattattcttcacacacgattaatcattacactatgattattttttttttctaaaatataaatcaataatcacaaaaataatcacaataagtgtaattataaagaaatattataatctatatatttattggaataatcatcgactgactttgcagatcaacacgaatttttccagcgtgctttgtctcgctcgttcacttcttgaaaaactttcttacataataattaataaattaaaataattgaaacattaataacataaataaataaaacagagtgccttagatttttagcaatcataactaaatagtgtgaattttataatcacactatacatacatacttaattaacatgaatgttataaacatattatttaaatatatagtagatagtatattaaataacaaacaataaagtgtcaagcacaagaccttaattaatttttcttttacaattcttactcttcctatgaatattattacatacaaaaaacttattttactacttagggcccgtttggcacagctttcggaaaagctaaaagctgcttttcaaaaaatctgtgacaaaaaggtgtttggtaaacagttagaaaacaacttattgaagaattta

SEQ ID NO: 327240 - DNA, 1248 bp, Cannabis indica
aaggataaaaatacattgaggggtgaaacggtaaatttgtccctacttggtgtaaattatctatagaggatctttgattatttggattagaacgatggttaaattttcataatgtatctatatcgtggaacatatagagcgttctatataattgagagtgcaactccaaatctatagtggtgcaaggaggaattaataagttagggaatttacttggtaaattctagatttgcttattgaaagctcagttatataggcccatggtccccatactagttaagacaatactacttgtaagactcagtcaattgattttatttaatcaactataattctaaaattagactatgtcttatttataaaaacattttttgcttttggttgcatgtgtacacttgggctaatcagctttggaaaatggacgtaagacattgttgatgttgtcagcattcgagcatactataccccctaaatgatctgggaattctggccttaaattcccatttgtttggaatccaatctatgcccttttccagtcctcgtggaggagatttgagtgcgattttgacatgctctgggagacataccattcttccaagccatgtctcccctccccatgactacttggaagggggttcttgaaagtgtcatagccatttctaggcttttgtgagaaaaagccgtggggtcactggcaaaaacccagttgtataattgatctgaaatgatccctccgtgacatggacctcgtaaaggaaagcataggctacttgcgatgtggcatgatcttagtttctcggaaggacagctggacctgtaccctcccacggtcaattctccgcaccaaggttcgtatcagtaaacgagagcaacgctgaatctcgtgatggcaaactttcgactttcatttaggaaaggctaaaagttcacaagagatttaaacactgaatttgcttgcaagagccagaaagtaattcattgtcaggtgagtgagagtcatgttaaatttttatgaggcacgcttcggcttctgcgaaggaaggctgaagttgcataaaaattcaagcttagagtttgattaaaaagataagagagaaagcatcacggggagtaagaaagacttaaagcagtcctttcatttcaggaaggtgggtttaagatgtatcgtacccccggtgatctttcttgcacgcgagaatcatgttgaatttttatcaagcaaactttggcttccgtgaaggaaggctg

SEQ ID NO: 327241 - DNA, 1104 bp, Cannabis indica
cccgcataaatacactatattttcagtcattattttcgaaatccaatggaggtatcgacattaaagctgctcttagaggtaaagtcccttgccgtataacttctgatgataataatgccttgctgaaaccatttaccagcgaagaaataaaggccactatattccaaattcatcctctaaaagctctgggaaaggatgggttaccaggtctttttttccaaaaaaattggaacttaattgaggaagaatttactgctgcctgccttgatatattgaaccacaattcagattgcagaaaaataaatgagacccttatttgcctcattccaaaggtgaaacaacctacaaagatgtcggaattccgtcctattagcctttgtaatgtggtttataaggtggtgtctaaatgtctcgcaaaccgaatgagaataagtatgaattcagcaatctttgaaaaccaaagtgcctttattggtggtaggatcatacaagataatgccattattgggttcgagggccttcatagtatgaggaaaggtcggtgtggtaatggaagtaaaatggctttaaaacttgacatgtctaaggcgtatgatcgagtagaatgggactttttagaagcgatgatggaatgccttggttatgaggatgagtggaaaaaaaaaattatgaactgtgttcgatcggtctccttctctgtattattgaatggatcggccaaagggttctttcatccgggtaggggattaagacaaggagatcccctctctccttttctttttctcctatgttctgaaggtcttacttgtcttatcaatgaagcggaaagggctggtcaaataacaggtttacgttttggcaacttagctcaacgactttcccacttatttttttgcagatgatagtctcgtctttcttgaagctaatatggacgagtgtaaggtgattaaagaagctttggagaggtatgagtccttatctggccaaagtattaattttgataaatctaaaatgtgtgtgggctgcaaaattgatacaagcttagcggagaacctgttggattttatgccctaaataaaactctttacaatctgattagttatc

SEQ ID NO: 327242 - DNA, 1729 bp, Cannabis indica
gtgtcattccttggatggttatcggagacctaaattgcattagtaactctaaagaaaggttgggggagccagagttaaatactgtggcacaaaatggttgttggattttttcaccacactggaggtgttgaccgcttctttaaagggaacaaatttactttgcagaataaaagattcaagggtggcttaatttgtgagagactcgacagagccataggcttttgcaattggatttctagatatccttctccgggtatactaaattttccaattacaattttagatcatgcccccattcttttttactttccatatgtttgctaaaagaggatatatcccctttcacttttttgaagtctggtccacaaaggcctcatgttgagaagaaatagttagggcctgtcatcactctaatactgaggcctgaatatctcttcttcataacattgatagtaccaggaaaagcattaggcttggaaaaaatactttatgggcaatgatgagaggttgatcaaatgcctagaaaaaagaatacaatggcttcaaaatcaaccaattttagttaactatagataggaagaaagtaagattcaagatcaattgaaggaggcttgggcttggagagaaagtatgtggaggcaaaaatccaaagaggtgtggcttcaacttggaggtacgaataccagattcttccatgcattaactctcattagaagaagaagaaattatttctggtctctcaaggataggaatggcaaagcttggaatgacaaaaagcatattgaaggtattattaactcccattttcttcagctctatccctcttcgaacccttcttttggtccagactttgatgaattttttacaaaaaaagttagctctcaagataatagtgcctttatcgaaattcctaccgatgatgaaataaagggtgtggtgtttaatgatctccatccccttaaggcttcgggaccagatggcctttcgagatgcttttttttttttttttgaagtattgggatgtggtgggaaataatttatgtgatgcaatcaaggaagtatttctaaaaggggttgttaaccctgaactcaattctatgttcgtttctctaatcccaaaagtggagtatccctcaaccattgaccaatttaggcctatgagtctttgcaacttcgcttataaggtttttgcaaagattctctccaatagactgaaaccacttatggatggtttggtgtcacccactcaattggcatttagtctagggtgttggatagctaaatcctccattctcactcaagaattgttcataaaattcatcatcataggggttcaagaagcctcgtggctttaaagcatgaaatgcataaggctttcgataaaatggaatgaaattttcttgaacaggtcctttcgacttctagttttaatgagaaaagttactgccttttgatgacttgtgtgagaagtgtttcttactcggttctcttgaatggcactccacttaggaattttttcctcaaagaggcctacgccaaggggaccccatctccccttcttattcttgctttgtgaggatgttttatcaaagatcattcttataagagataaagaggaaagtctcatccatggcattaagattgcaagatctgtcccttcaatctctcacctaatgttcgcggatgatactatcttgtttccctatgcaaatgagagagagagagagag

SEQ ID NO: 327243 - DNA, 1526 bp, Cannabis indica
ctctctctctctctctctcgcgctgacgccccaagggctctccctctcctcttttcatctctctcacatgcctaccctaggttgtccaacaccctaagctgtttaacacttgagatctgcccactaattcatactttgtaatcctaaaggtgctataacagatcccacctacagtaatctagatagtatttccctcggtataaatacaaccaagaggggagtaggttattacccgctatcataaggggatcgaacctctataacaaatctctgtgtttattatttttcattctttgtttgtgtaacatgtggcaagcatcagatccttacgaccccactggtggttgatcactttttgaggtctacactaacggtcttgaggtcatatcaaaggagggtatggttgagattattttctcttattttgatgagtttttctttgcttctaatattaatgaagaagctttgaattctacacttgcaataattccaactataatcacacctaaaatgaattgactctttaatcaagcctttcacaagcaacgaaatcttagcagctctacaaaccatgagcccagaaaaaagcccgagaagcgatggcatgtctacaatgttttatcaaaaatattggaattgtggtgatgttgtaataagagtcatccttagtgtgttgaatgaaggtcagagtatgcaatcgattaaccactcaataattaccttgattcaaaaaatcaaattaccacatggtatgagtgattttcgcccaatcagtttgtgtaatgttatatacaaaatcatctcaaaagctttaccaaacagatttaaagaggtcctacttttagtcatctccaaaaatcaaagtgcttttctctcaaatagactcatcacatacaatattctagtcgcttttgagttgatccaccacctgaaacataaaacatgtgaaactaggggttacacatttctaaagttggacatgagcaaagcatttgatagagtaaagtggatttatattagagaggttatgcgtaagatggggtttcatatcaaatggattgaagtgatacaaagttgttatgctctacaagattctctttatgctcaatggtgaagttgtaggccatattcaaccaacaagaggtcttagacaaggtgacctattatccccttattctttttcagatttactcggaaggactttctgttgggttttatgccctaaataaaactcatttcaatataatcagatttacttattaatatagatcagaaataacatttaatgttgcatggttcacatgatttatttcatgattatatgtacataatgtatgaattcgtctgaaacccttttcacatacttgatcctgtttattgtgctgtcaacacattggaaagtaaacatgactatgtgaataaagtttcctagatttatcagacatagggttttactgatatgataatctacaacaagagtttacttgcatttggagaaatgttatgttctttccagagcattggtt

SEQ ID NO: 327244 - DNA, 844 bp, Cannabis indica
tttctttttataaatatacatatgtttttagtaatttttttaaaaataacatatatcttttaatatttatttttcttaaggcctacccaattgtctcacaaattgaaattatggtttttttaaatagggttgtgatgggtctatattattggatgaaacaagctcactcaagggggagaaaaatgcagtgcctaataaaaattcagtgagaggttatgaggttattgacagtatcaaatctgatgttgagaaagcttgcccatcaaccgtttcttgcactgacattctcactcttgcttctagagatgctgttgttttcgtaagattctaaacttttattaataatattggtatttttgtaattttggtatttgacattgggcctgtgtataggctggaggcccattttggaacgttcagttgggccgtagagatagtagaacagctagtgatgaggatggagttgtgaagcagttaccgtcgccttttgagcccttagctaatatcactgctaaattcacttcgaaaggttttgactcaaaggacgttgttgttctttcaggtttgtttatagtcactttaaatgaaaatgttattattcaaaataaaaagttttgtatgccaaaagtgttgacagaaagaaagtaaatttcctcgtacttgtgaattataatagtggaaattgtaccctatatccttttttggttaacccattttatttttacttttcttttatatgtatttaatttatggggacttttatttacatttcataaaattataaatacaccttattattaaaaaaatataaacttaaataatttttaaaaattattcttgatat

SEQ ID NO: 327245 - DNA, 1131 bp, Cannabis indica
gggcacaaaacccaacagaaacagtgtcagaactcttctcgctgcttatccaatgactctcacaaattcctttagaagttagcaaaggactcctttagatgctcaaccttaagtttgggcagaagctcctcttggtgctccatgggatcctctttgaggtctataggctcctcatcaaggtcctcacgtggctcacctagtgtcacaggaccatcagtgtcgttgccagctcctattattgtcctatttagtggtctcgagtcagggactctcgacctaccgcttgaagctcagtcaatcgaagcatcacaacaagcattggtggccctatttgtcaccgtatttttggaagtccttaggttttcgtacttgaattactttcagaatgaagcatttattcaaacactaaaaacttaaaggcaacaaagggccttgagtggtatttttaatgaaagcaccaaaatgttaactttgaaaagtgatcaactctgtactgtctgataacgatagcgaccaatgaatgtatgaacataaagtaaaactatagtagttcaccaaaattatagtatttcacttcacttatcctgaaggtaatggagctatgtctactttgagctttcattattacaaaaactcaatttccttacaagagaactctggataaaattactaagtctaccttcgcttcacaatttctagagagagtgaagctacgaccttgtagagaggagataaagtgtgaaaaatgaattaggagaactctcctttaataggtaaggcgcggtccaattaaattacaataaaataataggaaaattttcacaaaatttgttggataattcaaactagcccgcaagtcaattttcaggcctaaaacttcagaattgcagcgagggtgtgagccacttagacgtgcctttgaatagctttaatttgccacttgaattttgtcatttggataaaaattgagaatttatggccatttttactgagtagtgtgcactgcaaaaaaaagttctgccaaaacaacctgactattgggtgtctaggttgacataaatgtcaatctacccatgttgacatgaattttaacctaacgagcgctaaagacttggagtttgtttggctgta

SEQ ID NO: 327246 - DNA, 1861 bp, Cannabis indica
gcataatttttctgcctgctttgggaaacaagtattttgaccttgatcttctctatagcctctatggtccactaaaatgacttcaacctaagtattttctttctccggtctcttcttagtgagttggagattgacactttcttccatacaatatttcatagggagctatcactatcatactctgataaccattattgtatgaaaactatgtcaatggcagatacttgttccatgagccttcaaaacccatcacacagattcgtaacatatcctctaatatttgaattattctctcaaattggccatccttctaggggtggaaaactgtactaaacttcagcttcgtacccatggccctttagagactttcccaaaacttagaggcaaacttcggatccctgtccgatataatagactttgaagccccatgaagacgtactatttgttttacatataacttttcatattgatctactgtataagttgttttcacatgtagatagtgggctgacttagtaaactgatccataatacccatatggaatcaaacatactcgtgattctaggcaatccaaccatgaaattcatagtgacattctcccacttccattcgagaaatttcaaagactacaacaaccctacaggtctttgatgtccagtcttaatctattggcaagttaagcatgcatttggatacataatctaccacatccttcttcatattgcaccatcagaaataagatttcaaatcttggtacatattagtggtaccgggatgtaaggaatagggagtgatatatatttcatctatgatctcctttttaagctcaggattgcttggaacacaaaaccgagttttttatagtaacattcccctgtctactaccgagaaatctttggcctggccagctaagacttcttctcgagtttttactaaatcagaactaccaactgagcacttttgattctttctaacaagactaattgaggtgtcaaattattaagcctaccaaccacaaactcaattcttgacctgaccatgtcaaccgttaaccgagaagaaatcaaaacctgcccgggacctttcatgcttagggcattcgccactacatttgccttcccgagatgatagagaattttccagttgtaatctttaactagctccaaccatcgtctatgcctcatattcaaatctttatgagtaaagaaatatttaaaactcttattgtcagtatagatttcacacttttctccgaagagatagtgtcgccaaatcttcagggcaaagactacgacaacaagttctaagtcatgagttgggtaacattgttcatacccctttagccgacgagaagcataagcaaaaatcatattaacttgcatcaaaacgcatctagaccttttttggatgcatcacaataggctacaaacttctcttgatctgatggcaaagccaacattaatattaatgtacattttttttatttacattattgtcatttagtttaatgatttactttaatacactttttttaattacattgttatcattatttttaaaaaaatatatttaataatattacttattatttttattgttagttacatcttagcttgctattatacattgaaacacaattataaaatatatgccaaatatagaatttattaattttttttatgtcaaatttaatatacttttcaccacatacattggagataataacaatatttgagttgttgttgctgttcacaagtgttgtatattattttcttctttttaagaaaaaacataaaacatgataatgggctaaaaatggtagtttattataaaataatataaaataatataaagtagatg

SEQ ID NO: 327247 - DNA, 1300 bp, Cannabis indica
gaagaatgtcgttagttgaaagatgagatagaaggcctcatagcgcgaggacactttcagcaatatgtaaaggggcaggacaatgcccatgatgagcccgatccacccagtaacccaagcgactagggaccataaccttcctttgtaggaggaaaggatacctcagttattttgggagggaacatgttgcaagaaaaattggacaaggggcagttagtctggtaaagtaattatgcaaaagaattgcgaggtaattaaatagcggctcacaatggctgttgtacagagctgctacaaagaaaagctggttgtcaaccagcggcagttaagacaaacaactaaaactaagatcaattcacctggaacctggggatatggcgaaaattgaccctggatatagaaacaattgtgggaatatgttagggattgaccctgaacataagaattcgttttatcaaaatcggatgcttctggaaggttgataaaataagcaattaaactgggaaagttcttatgagattaatgattgtaaatcgcatcactaatgtaatattttgaacttcatttatgaataaagtaatcatttctttcaacaagtaattataaagcataaccctttacaattacttgagggacatatatgtatgatcaaccgaaatttatctggaaatacatgatataatgcaaacccaccacttgaagaaaaaattgaaaacattttaaaggttctcgaccaaacctttttgatgaaagaggggtcgaactgttataactccctgaccaaactttttctgacgagaaagggatcaaacaattataatgttttgattaaaaacctatctgacaggaaaggaaaatacaaaaataaataaatagagatacaactcataactcgcatataaagttagtaacactaacgactcgcactaaaggaaagtattaaacgagacatcaaggtgccttgaaaaatagtacttaaacctaacgcgtgggtagaagatctaactactcatataagcaataagaatatataaaaagagacaaggacattgaaaatatattcaagtttccttgaaacaagattactactaatgatcgcgaagcagaatcaatgactgctcgagaatcgagtgcagggcatatgatacactgcttgcgcataaagtaggatattaactacttaatgtcaaagagatatatgaccaatggaaactccaaaaaaacattatgcaatgatcaaatatgattgttaaaattgtgaataaacacaagcaaacaactgcatattgaagttcaaaca

SEQ ID NO: 327248 - DNA, 850 bp, Cannabis indica
tccaacatttcagcctttgttttcttactcatgagactagagcctatttcctttgcactaaatctcactactaatttgcaaagatcaaacttatataccttccatgaggtaggtgagaaatatatcatacatatatattcatccattttttgtcttctatcttccaaaataaacataattataaattataaaatgatgtaaaaaaagaagttgcatatatttttattaaattacaattaagaaactaatataaaaatttattacctggtagttcatgaaggtctcaattagttctactgtttgataagaaccaaaaagagttgactgatacctgaaaattaaaacaatggttgcaagttacataggagaaaagattaagaacatctttacaaacaagataggctcaggtttttgtgtgtagcaacaccgacaacaagaacataccatccaacagtgttgttgtcaacgttaacctctctcaaacatctcatcatctcaagctgatagttagcaccttctgcttcaatctcctcatcctcttctcttatctgaatgattatatcataccaagcatagatacagaagtcagataacaagacagttaataatataaataggcaattttctagattggccctaaaagtaccgtaccggaaaagggaagcaattagtaacttcaagaacactgccaacatccaatccaagaagttggcctgtgactagagctggtgaaaactccttgcaatgcttgattatctttaatatagcctgttcaacaaaatacataaataaattaaaaagtctctagcacacaaattgaaaaataaactgaattagattcaaccataaa

SEQ ID NO: 327249 - DNA, 1324 bp, Cannabis indica
atgtcaaaagacaagacctttctcgttacattttaatagcttctttctctgccacttattccacaccaccagcttagccttagtgaagcacttgtactgaaaaccaatacgtcatagaattaacattattattaattctaatataaatcataaaatatttgcacacatattatttctcaaatatgtcacatattattactcaactaataattttaaaaaataagtacaaaataaaattgacaatagcttgttttacttaaaaaaacatatgttagtacgatttttattttaagataacatatgtcatagtaaatagtaaaagtagttctataaaaaataaagagcattgttattcagtattatggtgcccaacatcatacagatttggcgcgttgttagtggctaatagatttctatataatttatcaaatcaaaatatgtgagacctaatattaaattgcacggtataccacctcttatagtacttgacaccttaaattgtctcttaatatttcttaaaaacaaataaataaattgctgttaaaaataaataactaaataaaaatacaatttactttactaatttaaaatattattttaatagatcatatacaataataaaattatattgggtcggttactaattttattaaattttttactcttgttttttttatgaagatatataaccataggatatctaaaagggaaatttaaaaaaaaatatgcataaaataccttaatttttttctaaatccataataccccatattccccataatacccctctcatttgaaatcccaaacccaaactgcctcctctctcctcctctcgcccaaactgtctcctctctcttcctctcgcccaaacccacggtgaacccatcccaaacccatcgatttaaaccatggtgacggtgcccctactatcgacgatggacccaatcttaaaccgactgcgacggcgcccccttgctcgcgatttggacctgtgatttttcgtccggcccgatgctcatgcgaatgggttcgagaagatgaagatctgatgggtccaatggggacccgatggggtccgatgcttgtgttagaaattatatttctcattgggtccgatggcacccgatgctgggtccgatggggcccgatggtgttgagtgatttttcaaaaaaaatgtgtttggtctgatggttctgatggtgggtccgatggggcccgatgcctatgtgttgttatcttttttttggtgtgttgggtctgatgggccaatggtaggggtcggctgcatggacggtgggggcggtcgggtgtgggcggcttgcg

SEQ ID NO: 327250 - DNA, 777 bp, Cannabis indica
attatttagggcgttacaagtttcatacgtagacaacaagacagaccacaagtaggcatcaaaaatccatgaaaataaaaggaaaatatctattttcaaagagcattatgtattttattaatttgatttgtaaataatagcttatttgatctatttctaagggatttaaagggtgtaagctatcctatataaagagttttagtcaaatcctaaaatcttaaattctaagttattaagtctcaaatcctaatctctaatctaactttcaaatatagcttaaaacaatactatatctaatattatgtatggatgatactttattgaatatataataattataagagttttatttgcatagtataaaatgataagtgtacctcaaaattttttaaaaaataaagttaaaataatttttaaaaattacttttaatattttttaaaaaaatttcacatattattttgtgtaaatttcaatacttattttagttttatattttttttaataaaatttcatataattttttatttttttactataatatttaaaatttcatttatttttgtttaatagttatacttcctgagactatgaattggaataataatattaataaaaattaatataattagagatataaatttgatatgaaataaaaattattaaattaggtacatttataaattttgtgtgcaaataaaataattactaaaagcatgtttgatattgttttttattttttgttttcaaaaaagtgtgtttaaaaatgagaacaaaaa

SEQ ID NO: 327251 - DNA, 871 bp, Cannabis indica
aaaagatttggacatccacataattaataatatttataacacaaacatatttttaacaatacaatatataggtaagaatggtcaacagtgtatgattaagaatggcaagaaatgacaattttagttagataatgattatatatttgtatttgttgaattaattgatggagaccattataataaaaatcaatgaacaccggtcacaccacgtcttatacaaagtcaaatcaagtgtgtttttgtagaaatattaaggggtattttattctggaaagctgacatattgtttttaatgtaaattaatattaaattttatataatttaatttaataaataataaaaaaaaattaataattaattgcatcgcgctacagtattgtaacctaaaaacgtgaccccatactaaaatggaggcatcacatctgaagttttatattctttaatatactgtatatatatatatatagaacacgactatagggatgactaaatgttttaatggtaagacactttttgagcttgatgatctatctaatggttatgaagaagtaaggtgtaagataaagtatagatattagtatattatataatttgctcttaatattttaataataaataatatttaaattttaaagtttattcattttttttgtactataatatcattttttttattagaataaatgagtatgtatgcttattttctttttttttttaacaaaaaaaaaaaaacaatgctaaatattttaataaaatttttgaaaatacatatttaaactatttgttaacaacacactcaacttaaaactatttttaaaaaaaaattaaacttaaaattaatttctattatgttaataatatttaattgttg

SEQ ID NO: 327252 - DNA, 883 bp, Cannabis indica
tcaggcaaatgggccttcacaattgcggtagttcatgtgaggggggagttgggttcagtatgtcgtacccacttctattggcccccatctctcacattgccaaatctagtgaagcttcgtacacctcctcctgaccgagccttgggaacccagtttctcatcttagtcgcagctttcccgggcaccgcacgagatgtcccaatcaactttttcctcgagccactcacaacattggtcgtccccctcgccgcggcaccaccgttgctcgtaccagatggcgacccttcaagaatcgagctcactggcagaagctccagtcactgaaccggcgcaggcttcgtcacagcgcttgagaagacgtcatgatacttggactcagtagatagccaaggaccaaacataggaaagggggcaccttcaaggctctcgacagtaactggagaagaaagagagcaacctttcctttaatgtcccaaacagccacagaagcagcaaaatatacctattttttcaaacttgaactataaccatcttttcaccccattagctaaatcaaaaaaaaatccaaataccaaaggtttttcaagattaattcccagcaaaaccctgagaaatagcttccaagacatcggtttgtcctcctccaaatcaacattgatcaccttcccgattaaaccaccaacaggttaccgtttgtgagagagaagtactcatgaggtaaattgtgaatttgtacccatatcttgatgctatcaatacaaaccgatccatcacagctgggactccacgaacgcaatgcaaaggtataacctttgaaagaccatggacagtagtggaactaacacttattaggtggaggggccgatgtacatattaattttaa

SEQ ID NO: 327253 - DNA, 812 bp, Cannabis indica
gagtgaaaggcatctttgatcttaagtccaccactatagcctattcaaggttgaaattatactatatgggtgtctacttatgttaatttatgcttgtaatagtaagttgaataaataaaatttgtctccctagggctataatttttctagagttttgtctctaatttttttgttgccaaattttttattttaaaaattgtttcaaatattcctcttcaatcacattcttctcattttcttaaacaatttgttgagacagcaataatattagatcaatcttgcgcaattcaagagtctgcacaaaaataaaagaattatttcatatttaactaaaaaaatactgaaatataattgtacagaatttaaatatttttattgtttataagttttttaataataatacagactattgattcacatcgttgtttccttgttattttcttgtatttttttgttattcttatgttgtttttctgtaatttttttattgttttcttgttgttttataactataaaaatataattaaaaaattgtaaaattaaaagaaaaaaattatttaatcgtataaatgttacaattttgttaaaaataatactttgggtaaattttcctcaaaataaatacataaagagtagttttataataagtaatgggaatatatatacatatgcattcttaaaggttttagttttaatgataacataaaagtattttcttaaaatctacaaaatctataaaatatatatatatatatatatatatatactaggtgaatatacgtaccgagccacgtattgctagtttcatttaa

SEQ ID NO: 327254 - DNA, 704 bp, Cannabis indica
tagagggactatagcctataatggtgtgacatttaattatatctaaccaatagatatcaagaaaaaattcaaccattcaacccatttaattcccttaccattatgattgttttaattcagtgacaatagtgtagggtttatactacattatattttcccctattatttcggtcatatccaaatacatattttagatttttccatgcaagaagtatataatgtatatgttgtgtattgtatataacataattttagtttaatttagtttttttttttttttttttgccgtcctcttttataagggtgttatttttagattagattttactaaccactctagttttatatgattaagacaacctttttttaaaaaaagaaataaaaaaactttagaaggccaataatggtgaacaaaccatactcataatcccctcaccaaaatattgaaaagaccttctgtaatcaatggatatggtgctaatatgattgctttatattataaaaataaatgaataaaataaaattgatgttgtttaccttgcgtaatcacagttctttttatttagaaataatataaaaagatgagaaactacacatatgtgagaaaataggaggttgtagttgtacgtacaattaaatttcttttatgacgtttaattatggaaaaaaacagaaaaatataaaaaaggaaaaaaattacaaaa

SEQ ID NO: 327255 - DNA, 1513 bp, Cannabis indica
ttagactttttaactaaaattagaaaaaagtccttaaatccaataatctcaatagttcaaggtgtattttcaacgaccttaaaagttcaaagggcatttttaacgaccttaaaagtttaggaggcataatttagtacatgtcaaagttcaagggacaaaaatcgtaattagccatattattatatgagtaattctatagatataaaacattataatttttttttaatacaaatgatgtgtatttaatttttatccctttaactatatggttaaagttaaattatgcatcatttagatagtgtatgcaagttaaatgtcacaatcattgctcttattatatttattaactagaaaacaagtcgcatttcacttgctttagtattaatttaatagtaaaattaaattaaataatttcgaatttatttatatttataatttttgttaattaatataatgaatttttctacactattttatttataaaagcatggctataaaaattcattaacataattaaaaataagaataatgataacaaactcttaaattatattttatttcatatttatcacataacaaactaatatttattttttattataaaaataataaaataatatttaatatttgattattaattttaagtttaattttttttattacaaattgacaataataaaattataatttaggtgtaaatgctacatacttaaataaatatctattcaaattatagtttaagtttgctacttactagtacatatctttttaaattataatttaatatcaagccctccattattttaagttgttcacattaatttattctacttgtagtatcactatatttaagttcgttactatttctgtatcacacctatagtgtcactatatttaaccattctcatcattatcacatctcacttgtaattctttctaataaatttgttctgtacataaaataaattaagaaatcaactagctactcgtttataatagtaaaaaatattattaaaattcaatttattatttgataagagactaaataataacaacaaaagacatatgaaatcaataaaacaaaatgatgtgtttaacacatcctcaaaccaacatatttatttaacttacaatctaacactacaacattaaggaccaatagcggcgggcccctcggccgctattggtccacaaactggccgctaaagggcaatagcggcggacctcggccgctattggtccgccgctattgcttggccgctattaatagtattagcggccaaaaacggggtccgccgctaatactattaatagcggcggagcaatagcggcgggatcccgccgctattgctccgccgctacaacaccccagaataaaaaaaataattaattatttttaaaaatttatttatatattaatcctatatatataaataaataattaaatatttaataaataaatctaaattaatataattaaaacaatttaataaaatttattaataatttaaaa

SEQ ID NO: 327256 - DNA, 872 bp, Cannabis indica
actactagtctattagtatactggcctcatttcttagtgtatataaagaattaaaatataaattaattatgtagaataaaataggtgtccactcctcctaaataaatatatataattatatttatatgttagattgttttaatattttgttccgatcctcacatcgattctaaattcatttctttgatttgtttagttatacatgtggatataactcatatatacaaatataggaaattatgaagtcaaaagttatatcgtgataataatgacataaatataatagcaccatttattttatatattgagcgctattttgttttcttgttagttatgtcataatgtgaattaacgtcttaagtgaaagagagtatatgaatgcatattaagactcagcgttgtagtctacaaaaaaaagactgagcgttgtagtagcatcgttgtagtcaacaaacaaaagactgagcgttgtagctcatgccaactcaataaattcttgcatttgaaagctatttaaggttctattaaatcatgtcccacacctccgaacgtaatttgaagctatcttcatcaaaatttactctaagagagttataaaaataagcttcggataactcgcaacgagacccaataggcaccaaaaattaatcttcaccaccaaaagctaatttataccgttagaacattatcaatgatgtaaaacaacttatttgtatattttttttctatttttgtgttctccttcacctaaagatagttcattggattacattcaatggatttgaactcaaccgatccaatccaattatttattagatattgaattttgtcatccgatccaatccaatcgaattgagtcatccgatccgatc

SEQ ID NO: 327257 - DNA, 633 bp, Cannabis indica
attattatattttcaaaaaataaaaaaaattataaatatgttaatatgtatgaatttatttgaataaatacatatgatgcctattttggtcattgtatatttgacaactatctaatcatttagtttaccaaacacttatatacaatatttttaactcacagctgttttaaaattatatttaccaaacactcagagcacaactacaactgtttttttcgcacatctaaactggccctaagttattatttttaaactataacatatatataaaattaagggctcgtttggcacgccgtatatgggtcgcattgtattaaataataaataacactatgtttggataaaacaatgtattgtattaattattatgaccaaattttttaatacaatgtatgttgtattatttaatacataataaatggtccgtagtagcttgtattataatatttacaaaggatttggggtcaaaactaatctccaacccggacttgagactcgggacccggacccgggctggggatcagattcgacccggacccggactggatatgacccggatttagaatccggacccagacccgtagttagtgttagaatcaagtgtattaaaaaaatattataactttacataat

SEQ ID NO: 327258 - DNA, 855 bp, Cannabis indica
ttgtttacaatcctcaacgacactaccaaaagtggatgataaaacattcaaatttctaatagcttgtactaatactagacaatcaaattcgataatactgtaacacttaaaaaatcatgcttcaaccatgataacacttctcgagagtcatggcttcaacgatttttggaataacttgcccaatccgcagtcctgtagccatgacctagcccttgtgatcccgaacaaccccaccaaaaccatgacttccctcctcgtcaaacaatgcagcatcaatattcactttgagtctttcataacctagtttagaccattagctcaaccccatctaaaagatactaagtatcaaacacaggaaacaaagttcttgcttgagcttttctccactgatcaagagtgatacgagccaaaatgacaacgaactccacccgaattttcctacgtacccttcaccaagagttattttcatgcgaaccaaattacgtacccaaaccaacaacaccgcctgaacaccttgttcctccccccggtcatgagaaaaaaaataaaaaaaccagtcctcaaacgaccatgcatcaattggaatcatagccaaacccgctaccctgccaacaattatgagcaaaatcacacagggaactaaacaatgcgaaattgattcacctatcccatgacaaatcggacacaacaaagaggcatccacatgtttagtcttcaattgaactctcgtaggaagacacccactaatcgctctctatacacaattttttgcctatggaggaggatttagtcgccaaaacttctttcaaaatgccacaacctctccgtccacactaccctcacagtttgcctata

SEQ ID NO: 327259 - DNA, 1421 bp, Cannabis indica
gagtacaaccaactcaaactattaatgaacttgaagaggtgaatttagacccaaacaatcctaccaagtgtgtcaacattggaaagggtttgggggagaactaaagtaacaattaatcactttcttgaaggcaaaaaagataaattcacttagagtcattcagatatggtcaagattaacccgaatgtgatataccatcatgtcaatattgatccttcctatctctcaaaatgtcaaaggtgatgacctttagatcccaagagacaaaatgccctaaaagaagaggttgacaaactgtcagccaataacttcataagggaagaattctatccctcatggatatctaatccagttcttgtccctaaaccaaatgggacatggagaatctgcatagacttctccaatttaaataaggcttgtttgaaagactactttccattaccaaaaattgatcaattggtacgtagatgcaacatcagggcacgaaatgatgaccttcatggacgcatactctggatataaccagattaaaatgcatgtcccatatcaagagaatacgagctttgtcactaatatagggctttactggtacaaggtcatgccattcaaactaaagaacgatggagcaacatactaacaccttgtgaatggtatgttcaaaaaccagatagggaaaatatgaaagtctatgtggatgatatgttggtgaagtctgttaaaagcaagaaccacacagaggacctcgcagaatgcttcgccgtattgaaaaaatatgatatgaaattaaaacctaagaaatgttcatttggggtgtcctcagggaaattcctaagctttattgtaaatgtgagaggaattgaagctaacccaacaaaataaaaacactgctcaagatgtctttgccaaccaaaccaaatgaagtacagtctttgattggaaggatggcggcactaaacatattcatttcaaaatcaactgacaaatgcctccatttttcaacattgtacgaagcaacaagaaatttgacgggaatgaggagtgcagcaggcttttcaagaaataaaaaagcatctctctacaccaccagtattggccaaacctatcactagagagacattattcatttatttggccatctcagaaaatgatataagtgatgcactggtgcgagaagatgaaaggaactagcaacctgtttattaccctctgcttaaaaaactcgcactttgccttgtacatgcatctaaaaagttgcgactgtattttcaagctcaccccatcaaagttctcatagatcatctattgcgacaagtattgtccaatctcgatgaatcagggagattaataaaatagtcgattgagttgggataatttaaaataatctaccattcgaggatctccatcaaaggccaggctttagc

SEQ ID NO: 327260 - DNA, 535 bp, Cannabis indica
agtatatatatatatataaatgaaaataagtcttacatttaaaaaaatatgttgttgaaaaataatctgcaaaatctaaatcattggtgtcactttcatttttaaatgtattatatattttatgtgtataaacaattattgtctattaagtactaattaattaattatgtagtgttcaacttattatagttcttaaaattaagttagcattagagtagtttatttttataattccatattatgatttgattatacataaaactaattaaaagaattggatatttcatcctgatgaatgatttagacatgtatatatatatctatgctatatataaaatgtataataagtagcttaattgtatagttatccaaccctaattataatgtttaggttgagttttaattataattactaaatatcaaattaattaatttaatggttattaacatcgatatgctaattagtcattaaagtatagataagtttagagcattgctattaggcaccagtggtgcctagcacctttgcgacatg

SEQ ID NO: 327261 - DNA, 832 bp, Cannabis indica
ctatagttgtgttacgacacaactctttgtacatggatttaattgttacgatattatcaaagataagaaagaaacaatgtttttgttatgaatgggtagacctagctatgtatattttaacttgttgggtacccttatatggtagctattacgtatgtcattaattaatgctcccaattttttgaagaatatttttcagggtgatatgtcatttttagattattcatttatttattaaacaagtaattaatccatttaaaaaacaacaagcaattaatttattattattattttataatcactactataaatttgagatttaaaagccgtttttaagacatttcaacgtcaattttcgctaccgatatatgatgattcaggcaacgctgcagggtcaaacataatcgacgtcattgtgcatgcaactatttattttcttattttttttgcgtctttccatacttaaaatctagtagttctacttcttaaaaaatttatttccctgacagtggcaagggagccatatatccctcttcaataccatctaatgactcttcttctatctatcaggatgatctataggcaaccgtctatgtcctgtataacacatcttatgttcatttttcaagcgacaagcccatgtattagtgcaacaaattagacaactttcgtaacattttatactgtaagctagaatatcgctatcagtccataataacactgctttcagattaaaaaaattcttttttaagatcatcataagcctgaatatcattctcatataattctattaaatcgtcaatcaatggttccaaatatacatcgatattat

SEQ ID NO: 327262 - DNA, 909 bp, Cannabis indica
acttttttttcttattttatttctatattattttttaacaacctttatttatagaattcttttagctattaatttagtttataatattctttattatttattagcattttattgtacttttagtttcaattttcttatggagttccaaatttgtattttattaatacacatttttttagtttatgttttttatcatagtaattatattatattctaaccaaatattcatattttaaaattttagttatcttttattttaataataagaatcttattgattatatttcacaaatttttgttaataatcgttttcgaaagttattgtatttaatttgatgttcaattgtgaaaataatttgttatttattagttctctaaagtttttcttttaaatccttttattattgtactttaaaccttttaatctattcattttatggtgtataaaagaagttttaattgattatataattttaatttatatgttgcttacggaatttcgttttgtaccataaacttggtggttttttgttgggtaagttgtgaaattttgttcaatgtaatttgtttggtgctatatatagtagtttgtttatgtgatgttttggatttgtcctaagaatgacgcgaggcaatggcgctactcaatttacttcacaaatatcaaagatataagcttttcttataaattaattttttggtatgttttcaactttaaataaaaaaaatatattttaatttaatattatcgagttaattaaatttttatatatttatcttaaatatgttatgaaataatatgaaataatataaaatagatgagaagaaagaagaagaagatgaagagaaaaagagaaagtgaatgagaatttctgagttctttattccaatggggtgaacccctattta

SEQ ID NO: 327263 - DNA, 626 bp, Cannabis indica
aattggatgtatgattggagaattattaatttgcttagaaattggggtgtccacagttatgtcatcaatgaattaagaaatgttacagattctcatgacgtaattaacatcatggtgaagaaaggaagccaaagaatatgatctggtctcacaccaagtatatatatctctgcatatatatatatatatatatatatcacacaaattatattcaaagtcatcaaatggaagacatggccgatgatgctgaatatatatgagacaaggtatatgttatatatattcattctcagttatatatatacgaatagaaatattttccattatcgttatttcatgattaaaaaggaaatttaatcatcaaataacgatattcttatatatcttaaattcatttttagatttaataaattagaaagattaagtccaccaaatttttcaaaacatatattatgttgatatttaatgagatattaattattgtgttgttaattttgtatgttaggtaaaagatattttttttttaatatctaaatttgaacaggcgtcatcacctaccaatcaaacggtgggggaagcgcacgattcgaatactcaaagatcaacggaccagatcgatttgcaat

SEQ ID NO: 327264 - DNA, 1002 bp, Cannabis indica
atttataggcttgggttgggctcaataaaataaatataaaaattgaaattttaaaagatgcggtgcggtgcggtttgaatcgcggtttaataattcaaaaccgcaaaccgcactgcaccgcgcagtttgggaaaaattcaaaccgcaaccgcaccgcgaagaatttcaaaccgcattttttttgcggtgcggacggtttgagcgatttgatgtacacccctacaaatcagtaactagttaccattaatggtgtaaattctcgacactcaccacattgcaatatgtaattagaaatatattacattattttataatttgtgaaaggaagatttacacaatgtacttaaaatcagacattttttttttacagttatagggattttgtattgttacatctttacaaattattgtttttttttttttttttactttttagaaaaaaagttattttcatgttgctttcccgtagtaacaacgtaaacaatagagaatagcactgtttttgttaaaaaaaaaatttaaaatctataaaaatgtaaaaaaaaaaaactatagatccattaaaatataaacttttttattctattaattatttttaggtatttatgaaataatcgtaaaataatcacctaaaaataacctatacctccataatgataaggcccaacataaaggcccaacaatagaagccagatgtgatcttttagtcactcaaaaggtgtagcccaaatataaattgtagagcaccctctggtccttcttccttctttttttccccaaaattaaattaaaagtgatattgtaaatttgtttgactttacactttgactgtacagtaatcagaataaactaataaagaaatataacggaataaataaataataattgaaatcaatatttttaatatgttgttactaaagctgattgaaaataaaatgatagtaatttatcttatttactttttaaaaaaaacgtaatcgaaatgcttaaattgactaaatt

SEQ ID NO: 327265 - DNA, 1181 bp, Cannabis indica
tacttaccctcaagaatcacttgagaagattgcctaaaaaccacgttaaaaaaatcctttgtgttcatactttttatcttacaacctttatttttctgtgcgagattgtcactgttaggttcaaatttggttaaccaaaatgtgcgttaacagctgtagaaataaacaaaacattggtcagaaaagtgaaagacgaggattgatataactgagcatgaggacaacaatcacttacgatttttacgaaaggaggttgtgccgattggggaaagaccagatgtccagaagaagttgtctttgaaagacactttgtatggcaagtccacaatgattttaggctcgctggaatgagtaccaagataatagaagccccctgtggcattcttcctcgctggaacaaccttaaccggatagtgataatcgatttctacttgtgtggggcatccccagcttagaatttcatataagaccttcaagctagcgagaatcctataagcgataggattcagcttcattggagcaaccttaaggttgtttatttagtctttgaagtagtctcgaagaggaagtatggcccctgcactgatatgctcaaggctccaggcgtttatactagtcaagccactgatactagtctcaccactagtccttggggtactgcttgaaaaatgcgcaggggggaaacaactgaactcaccctcttgcactgaactaactaggcatgatcgcctaagttggattccacaggtcttcaatatatcacctatgttgcctgagatagatcgcaccttcgattctattaactaagcttcaaaggtgactttggggtcttgtggagtctttgatgtacatggcttgggaggcattatttcaatgtccaagtcacctggttcaaaagcaatcatgactttgggtaaaaataaaggcttcgccaaaggaataaaggacacgctgggaggttctggccaggccgcatctcacaagaatcaacatttaccttctaagatttcttccaagaaacgtctataacaactagcattatcttcctggtgggttctcactatgtgttccctaaccctagcatcgttcaactctaatttggacgtggattttgaagggttgtgtaaagcccgcttagttaatttggaaattagcagctgtttatgtttaattatgaaatt

SEQ ID NO: 327266 - DNA, 985 bp, Cannabis indica
aagaagacctcttctgctgctactacttcagaggggacaaacatgacctcccttgttgttataacaccaagagggacgagtaaggcctctcctgcaaaagtcaaagagacgataaagacctcgagagattaaactacagagaaggtagagacaccacctaaagccacttgaaggtgcgcccaaggcggggacaacattaaccctcgttttagggaaattgactaaggagttggtccgatcaagaaactcaaagaacttttcctcaaaaaatcgggcccgaccaaggttgtcaagattggaacaaatgtgatgaaggtcttgagtgagatgtttatggcttacctcaagagaaatgaagacatctttgcttggtcgcatgaggacatgatcatgattgacccacaggtcatctgtaatgccttcaacatagacaaagtcaatttcaaacctatacaacagaaacacaggctccttgacaaagaacattctaaagctctcaaggaagaggttgaaagactacaggagaacaacttcattagggaagatttctacacggtttgggtatccaaccctattttggtacctaagcctaatggaaagtggaggacatgcgtcgacttcactgaccttaacaaagcattccataaaaattatttcctactaccaagaactgatcaactggtggatgtgatagccagccatgaactcctcacattcatgggtgcatattctggttacaaccagatcaacatgcatgtaccagatgaagaacacacgagtttttgaactgacatcgagctttactgctacaaagtaatgcccttcgaactcaagaacgtgggtgtaacttatcaaagactagtctactgtatgttccataaccaaattagaaataatatggaagtctacgtcgatgatatactggttaagtctaaaatatccaaagacaacatcaaagatctagaggagtgcttcaacatcctgc

SEQ ID NO: 327267 - DNA, 1146 bp, Cannabis indica
gcatggaaatggtttattttgttgaagatttttgggatattttggaaacctgagaatcattcttacaatgtcttttataattataggtgtttgtaaaatatctaatacaattcgatctgcacgatttaattcaatttaatctgcaaattgcggctatgtgcacttataagaaatggattggattggaaaatttaaaatttgtacttgtgcggattagatgttgattgatccaatttaatctgcacatattttaaaaagctatattatacaattaatacttaatgtcaagataggaatttaaaatctaacacaaatgatacaaatacattttaaaatctaatagattgtatatttcattcttaatataagggaactataatctaaaaaaatttaattttttaatcataatttttttttaaaatttattattttttgttttatttattttaatttgttgttgcagatttaaaaaaaaaatattttaatgaatattgaaaagcaactaattttatgcggattaaataatcgatctccaatccgcattggattggatttgaattattatgcggattaaattgagtttaaaatatgaaatttacacttagtgcgaatcaaatacactatgaaaaaaaatagtgcacaataaattagatgaacaaccctaatttcagagggtgcttttcattttatttttattatttgggagtgtttttcattctaatgaaaatgctttataacttatatcttagcctaggctaaaatagcagttctgatcaatgtaatgcctctgaatttgtcaaataaataggaaagtacactcatgaattttaaataaatacttgataaatatgacataattttgttgttagggttttatggttatttttcttttatcctttttagatatttgatttgtcattttttttaaacacttactttaaaagtttatatttaaatttgttaaattttaagtaccaacttcatctacactttcacatttacattggcttttctattatttttgtcctttattattttattgatttactttgggaaatttaaaaaactagactttaaaaaccttaatattttattcttaaaccaatacatttcaaactaaaaaatatatgacacttttatcaaaaa

SEQ ID NO: 327268 - DNA, 1066 bp, Cannabis indica
ttcgggtaagcttcatattgtacctccttaatattttcgaagcactctgcgaggtctgttgtatgaattctactctttaccaacttcaccaacatatcatggatgtagacttccatgttccgtctaatttgatttgcaaacatttcattcacaattcattgatatgttgccccaacatttttcaacccaaacgacatgactttatagcaataaagtcccatgttggttatgaagcttgtatgttcttgatctgggacatgcatttttatctagttatatctagagtatgcatctaagaacggcataagctcgtgtccagcagttgcatccaccaactggtcaatccttggtagtggaaagcaatcctttggacacgccttattcagatcagaaaagtcaatacaagttctccaagttccatttggctttgggaggagaacaggattgcatatccacgagggataaaatgcctcctgtataaagttgttcaccaacaacttatccaattcctgcttgagcgacccttatatctcagaatccaagggcgcctcttctgtctcttagctgggtaattcggatcgacatttaagtgatgacagataatcttaaggtcaattcctatcatatatccatggcagttcacccttaaaaagcttattagctgatatttcaattgttcatttaggttcttcccaatgtatacacactttgtgggatttcctggatctagaataatttcttcccgctcctcaattggtttcaacaaatttctttcatcttgaattcgtggatcaagatcttcatccttcttctcgccttcttcagccaacactgccattaactagtgaccagcctttctgggttgcagctctatgcgatagcatagccagcatttgatcaccccgcactactcccacacacattggtgtttgaaacttcaaggataagtgcttaattgaactaactgcccctagaccaattaatgctggtcgacccagcattatgttgtaagttgatggtaagtcgacaaccaaaaagtcttgcattatcgtggtggataaaggtg

SEQ ID NO: 327269 - DNA, 1453 bp, Cannabis indica
tttttctgagaaaatttcatataatttttattttaatttttggtcataattttaaaatataatttaattttgtttgataggtataatttttaagaatataaattgaaagaaaaaagttaaaaatacttagtacatataaattttatataaaataaaaattattaaaatggggtgtacttaggaatttttgaggtgtaaataaaatttcccattgttttatatataaagtacccacatgtaaattttccaaaaaaagaaacctaaattcctaaaataaaccattaccagtttaagaatgaggttttgctctgacggagatggaggcagtcgggttgggtccttttatataatagggaagaatggccactcagactctgctgcttgcctctctctgatcgcatgcggagccgatgatttcccctacctctgtctcttaaaatatttcaggttgagaaacttgttagggatactcagggatgaacgtttgaagcctggtggtgcttttcaaggtaaggttgtttcgtttatgggtcactcacttgtattttgtcttgatgatttagaccaatatgatttttgttcccttagaatcttttgaatctgccaaaacgatttcggcccctgcatccaagacccttttcaaagtgagtaaatttacttctaatggcgttctgaagcatggaagcaaagcagcatcttctgtatgtttccttaaatgcttacttcttgtttcgttacaagttgtatggagattattattttattttattttttatttttttttggttgatgtttttaaagagaactgctggtacgaaagcattgaattcagatttgtccattaattttgaatgtatgtttacactagttctttggactattatatctgcaggaggaaaagggaaagattggttcaagtttgaagattgtggcctcactatgtcaattggtgtacaaaatgactgccatttcatgacttctgttaaggtagttgtacaattcttgagctttaatttgacagtttatgtacttatataatttgattacttgaagttaattattgtagaatgaaatgtgttcatttttttttataggtttttgcgttttataagtgtttgaaaagaatttaaatcaagtgggaatttcaaggtgtatttttttttataattgctatattatattaaatataatttatagaagagtttgaatatcttatgtattcatccatagcgaagtaagttttgagattttatgtgttgtggtgataatggaaggttaataacttgtctattttagagaagtaggatctgtgaaatttgtgtactgcggtgatataaggataaaaacttgtatgttatatgattgtttaccgttgaaattaacaaatagttaggttaataaaatagggaaaatattgtttgatttttgtaaatatgtttatcatattttttaa

SEQ ID NO: 327270 - DNA, 1669 bp, Cannabis indica
ttcaggaattttagaccaagcttaaaaattctaacttatgacttgatgtgcttactaattagtcttgatcacttaattaatagtttccctaatcatatattatcaaatatgagtatgtcgatctttctttttaaatacagagctaactctaacattaatttaaactctgtgtctcctaatttgagtctagactctattcgaccttcattcattttcttaatacattttctagaattgaacacttgagctaactaaaaatatttaatacatacatatcatcttgttacactatcaaatttaaattatataaatactataaaatttacaataaagatataaagatataatattatatataattagcctaaaattaataattttttaagatttaattttgcgttaataaaatgataaattttagctacatttaatttcaattaattattgaaaattaagtaattaatcaaataattaaaataaactaaagtaggcgtttagtatcacttttgtttttaaactttttaatcacaaaaataaaagtaaaaattttaatttttaaaattttaatttaaaaaaaaatgtgttcttaataactttatttttcaattttaaaaataaaaaacaaaagtgtattctgtaaattttatttttatttgttgattttatttaagttgggtctagagccgggtccaaggtcaggaccgagggcgggtccaagtccgaggccaaggtcgggttcggtttctaaggtctaagttggggtcggagtccaaaatattgtttaaaaaaatattaaaagtgattttttttaaaaaaaaaaatagattcttaattaaaaaattgaaaagtaaataattttatagaacatgattttggaaaatattttcacttttctaattttaaaaataaaaaactgattaaaaatagtgttaccaaatacaccttagattagtacgtgatatacatttgttttccacatgctttatatttttcgtatttagctgcaagtattttttaaataaacaaaaaaataaataattattttatcgatatctggtacttaatcatttttgtttcacatttttttgggatttcaataaaattattttcttattttaatttttgataaaagaatatcctaggaaatatatgtaattactctaaaattaataattttctaagattaatcttgcataattttattaaaatctgatacttattattttttaagttttttttgggggtttggtaaaataattaaaaaatatataattttattgaatttaaggttgaataaatgttggtgtgttataatttttgaaaaagagaaaattatattaaaaaaaaattcaccatatattttcgatctaaaaaattaacaaagaaaaataaaagatattatggaattttatagatattaacagatcataataaaaaattgtagttatgaatatagtatgataaaacacctactattacacaatcaacatatcacatataaatagaataataagatagatatacaatataaaatatataatgtatggcatgatgagttatcgaatagtgcagttattataattaggtaaaaaaacacaaaaaaaatctaacaacaagaagtatgttattaactcatcatgtatgacattatgtacactcaactaaataa

SEQ ID NO: 327271 - DNA, 881 bp, Cannabis indica
catggaagataatacacatcatatgatgatgacatatcgctataattcatatgtttattatgtaatgaggaacattgggtttaagtggtaaatctaaataatgaacaagtaggaaaatattagaatattttctatattaggtataaaatcaatttactgattttaacgtgtatgagggacaatgaatattttatattcatcgaatttagaaataattaattggttgatatctatatatgatcagattatgatttaccaaatattttataacttgatataattttttaaattagttgtcaaaatattctgacaattaatgtggcagaaactttgatagacacctatataaatataggtctcagtcttcgagctcactactcattctataaaaacagtaaatccatctaaagagagaagagggagcttggaagctcgattacccacactaatatgtttccttttcttttgcagatccaaagctagtgtgagaatgaagctcaaagaatcaatagctagaggtatttcggtcctttcatcacatatatgattttgatatgtttacggtttattctgcttttcatatcaatcgtatatgcttcatttttcatatctaaataatctaacggtggtggaagctactggtttctacgatggctggtctagggttggtgaaggtggtgggtaataatggctggtgtttgccatttccatcaaggttgcaaatcgagtgagctagggaaaaagagtgtgagggaggaggcataggtggagaagatgagagttaggaattttagggtttcttttacttttattttcatttattgggtctttttatttttacatttttaaagtagattttttttttttgtatttttactaaa

SEQ ID NO: 327272 - DNA, 1034 bp, Cannabis indica
ttaattcatactgaagtcttttttcttttgaccaagttttttcagcaaggtttaatgagatagttttcatggacatccaagggggagtgttataaaatattatttatggatgtccaaatcaccaaattaattatcaccattaatgcttggttgtattttattttattacatgaatttagttttctaatcttttagtcatatttttgtataaatagaggtttaccccattgaaataaataattgagaaattctcattcagtttctctttctctcttcatcatcttcttcttttcttcttatttactttatattattctatattattttataaaaataacaaatttttattttttgttaatctgtaggtcaattttaaagtgggccaactaatacatagattttgccgataattttattttaaatataatttttttgacagttgttatcctctaactattaagaatttattctattagtttttaatatcatcactaggaaattaatttattttttatcttattttattttgtagatgctttggggatcattcttaatatattaatgaattgacgtgtagtatgaggtgatacatgctaaagctctaactttttgagtgtgcttcttgagaacgttataattttattgtctaaatttctgttagtagttttgtcccatgttgctcactgtctttagtagttcatgatttgataaagcatgtctttggttagagaatgagctatccaggttcaaggagatttctgtgctgtttgcagatgtctgtgttgtaaattcattagtgattctaatcattacgttaaaaaaatatgtagtgtcctatattaaattgtatcaacagtagtatgtatatacgtgcttcattcactttaagtgccccaaatatatctctaaaatagcttaaaattaatgtaaagtttgaacattgttattagctattaccattattagatggggatattaaaaattacttagtaatattttataaaaaaattatattaaattatatgaaattcaat

SEQ ID NO: 327273 - DNA, 1566 bp, Cannabis indica
attggtcacttaattttgtatcatactttataatagcatatacattatacatatgtgcccaaaatatgattttagtcaaataattataacgtgacacacaggactgaccctaaaattacgtgttagtattgctattggtacaattaagtatcgataattatataatttagggctcgtttggaatgtcgtattgtattatattgatatttttatataatacaatacggtgtaccaaacgaacctttaatataataacttttagggaatatgtataactatataaggtgacacacattactgaccctaaaatttagtggctataagaaaaaatatatgtttgagcctttatttaaaaaaaatgtgtaatttaaaaaataattttttttcttagttccttagattaggtaggtcttaggcacagatttaacttatttagataagtcgaacttagtgacacatctaaaagatattagacaccaaatagtatctaatatcaatgttctttctattggggtacgtatagtttaaaaaaatgtgaataacaaccatgaaccatcaatgtcaatgtagttctcaatctttatcttaataataagagagatttttttttttttttttttttttttagtaaaatttgtttttttttgatggtgttagttataattatactattatattataaattttttgaaaatttcaaaagatataaagtataaaaaataaattttagctattttataacacgtatagtaaatttgaataataaaaattttatttttagtatgataaattatttaaaaaatatataagaacaatactgtaattataataaacaatgtcataaaaaaattattttatctaattatgcataatcaaattaaatacggtatatttaataaatgtctatctacatataatccgaatcaaactcacgtgtcactactatttagtactcaataaactgtacatggtaatttcatattaaagatttcatactttaataaactactaattaattttatccatataatatgattttaattctcttttcctctacaagatcatacattccatgtatgaacaggaaatttatgatatttattaattattttacaataattaacatattcaattataatatatttatattttatatattcaataatatattatcttttattcacttgtttttagggtcataaaccttaatatttgaaatatgttagaatgttgatttatttataattaataatttatatataaattttgacaaatttattaggctatgatgttgtaacaatgtaaaaaaattaatatgaataaaatagttagtaacatattaaaatttgagatatttgatcaacaattatcagtacggtttactaatacccgttactcaatgtgagcaatttttgatttagattattgatgtaattttatatatcaataaaggtattgtatatgatataagattatatatgacaagactcgtttactaattactttgccttttatctaaactagtatattttactatatattacataattcagatcacaagtgaaa

SEQ ID NO: 327274 - DNA, 1312 bp, Cannabis indica
aaataaaaataattaataatttaactgtaatttgatattaacctaattttatttattatttcgtaaaaaatatttataattattagttataaaaaaattcttattaaatattttaataaaaaaataatttattttaaatatataattaatttatgtttaaaaataaaaaatttatctattattaacctgttataagattaaagcataaagggttagacctcatggtcattacataataaaatgcgtaaatatgttaaagtataaagagttagacctcatagtcattacataataagttatctagaataggggatggattgaccatacgagttacattacgagcaaaagcccacttagttatatgaactgtgaaattactaagtctagatataaatgaaaaattacaactacttaaaaggtttgagagaattttatattgacgcacatagttatcattactccaaataaaaaaaattccttttagcatattgattactgtctcaaaattattctcgattatcacaaatgaaagcttacatcaagtcgctgattataggattagcaaacagactacaacttctccaataaaaagattaaaaaaattgaaaatgttcttcattataatataaattgtctaaagaataacaaaagcacaaaattaataataataaaccaaaagaaaattagtatattttttatttaataattaattctagtgaaagggacaaaaatccttgacaatgaattacaaaaacaaataattaatttgcatagctcattcaatacgttcacatacagtttcatcaaacaccgaatgagatcttaaaaacaataatgatttttatgaaatttctatttaatattccattttatgtatttaatgtaccgttgactatttgattttgaaatacaacgcggctttcctctttgacccattttttttaaataaatattttaattatttataattaattcccactatgaattatagagccagccatagtccatgttatgtgttattattattattattattattattacaaatttatttatttagggtatgtttggatgtgattgggtatcatttctaatagtgtactattttactaaattagtgtaaaattttcacacaatagtatactaaatttatagcataaaataggtgtgcactattttacactattaatatttaatatagtagtgttccattttgaagttacactaatttagtgttttttttaaacattctaatccttattttgttttatttttaaaatataatcttatattttaagtctttaaattaaaa

SEQ ID NO: 327275 - DNA, 963 bp, Cannabis indica
ggtatttttaccgccaaaaataggactttggtatttatctgctactcggcataaaacttaagtatttatgccgcaaattactctattttcaatcacaacaaattttatccttataaataataaataatttatgactaaataattttatcattgtagattgctgcattattaattatgtgtgattttgatcactacaaaaaatatacttcttagtatgtcataagtaattaatattttgtaataaaactagttaaaaagaagttacatttagtttaacttttttaaccgcgaattaatagaagtgaaacttaccgaaaccatcaacaagtaaggaatattggtaaacaaggtccaagcaaaggtatggtaagtcagactgttttacactcggaaaaatagataacgcgtcttcaaatttagtttgacaagcaagattagttgcttgtttaaactgtaagggataagctttggcgacattgtctctctttaataaagccaacctgaagaattatgtgaggttataaattatcagcttgtaacatttatttgccttctaaatttaattggtgtacctcattaataagtataattaaaaaaaaattgaatttttatatttaattttattacctaatcaaataaataaaaaaaaaaactcttatttttacattaatatatatgggttgaaattattttattggtttaaagagatgataaaatgactttaagttagatatttttgatataaatatatttttataatataatataaaaaatatttttttttattaagtagctaaattaaagcatagaaagtgaaatcttttaatattttaatacatcaaaatttaataatttaatatttttaaaattgataatatttattgttattttttagtaatcaagtattaggcattgagaagaattatatctttatatattaaaagtgcctatctaacggcaatt

SEQ ID NO: 327276 - DNA, 1827 bp, Cannabis indica
ttttctggtgacactgcacagaccattgccaggggagtttgattttaggttccaagatatacgccatcttttttacaagaaatttgtactggaacccaaaattgaacatggagagagaaaagagaaaggattgatatctgatattttccacttgtcacaaaacttccgtactcatgctggtattctgaaactgtcacaaagcattattgaacttatttatcatttctttccccattctattgatcctttaaaaccagaaaccagtttgatatatggggaatctccattgctgcttcagtgtggggatgatgaaaatgcaatcatgaagatttttgggaacagcggcaaggcaagtggaaagattgttggcttcggtgcagagcaagttattcttgtaagagatgacgacgctcgaaaggaaattgctggttatgttgggaagcaagctcttctacttactgtattggagtgcaagggacttgagtttcaggtaatcacacaatttaactgttttagatttctaaatttgcttgtgtttgtggtaacttgcatagtgcaattccaatataatgttagttcttgtgtttttttaggatgtattactgtacaacttttttggctcctcaactctaaagaatcagtggcggtcatatatgaatacatgaaagaactagaattgtttgacacaaccatacctaacttcccaaaattttccgagtccaaacataatattatatgctctgaactcaagcaattatatgttgctgtcacacgtacgaggcaaaggttgtggatatgtgaaagctcggatgttgctgaacctatctttgactattggaggaagaagtgtcttgtgcaatctaaaccacttgatgattcgcttgctcaggccatgcaagttgcaagcagtcctgaagaatggagatcaaggggcattaaggttttgtgttcagtatcttcctgtagatatatttgtggttcattaattatttctaggcatagaaagttgaaaatacttgtttttttgtatctttaaaccttttttttcctttctcaacagctctttcatgaacacaactatgaaatggccacaatgtgctttgaaagagctggtgatacatattgggaaagattgtctaaagctgctggactcaaggctatggctgatcgtatgcgcaatacaaaacctgatgaagctaattccatcctcagggaagctgctgaaatatttgaagctattggcaagtctgatttcgcggccagatgtttctctgatcttggagagtatgaaaaagcaggtataaataaactttaaacatactattagtttgcaattttttttttaaataaaaatagaaaacaatttttttttcatgtgatcaagttcatgttatctcaataaaactaaattggaaaacaacagcataattttgcaattttaatagttttctatgatttggttctcttttgcaggtcgtatttatttggaaaagtgtggcgagcttcggaaagctgcagaatgcttttctctggcggggtgtcatgagcgcgctgctaatgtttttgctaaagggaattttttctcagaatgtcttactgcttgctccaaaggaagattatttgagatgggtttggagtacattaaattttggaaacaacatacaacaaatgagtgcagtacttcagagagaagtgatgaaataaacaaaattgaacagatgtttttagagagatgtgctttacattattttgagatcaaagataagaggtccatgatgaaatttgttaaagagtttaattccatggattcaattcggaacttcttga

SEQ ID NO: 327277 - DNA, 1398 bp, Cannabis indica
aatgttaacgttgcttggtttaattattgtaattcaatgtgtaaaaacggattaacaatgaatgcaatccttgtacaactgatcggacacctgctttgtatataaaggggtgatccaccatgaaatggacctacgaatctcttgctacagtggactaagcagaccataatctgactgaaccactataatttctctgtctcattgttattttccagtttttggttaactatttctcattcccagttgagtactcgccattctaggttgaatactcgcacttctcttttcacgtaaattgcttcttgtcactaataatatcatataatttggtgttgcgaaattcactcgacaacatgtagaaattgagaaatcgggagattatagtaggagtatcatgagaagtagacccatcagggagagtgatctggcgaatgaaattggtctttttacgagtggaagcacgacgatgcaaaaattttgtgtttttatcatcagcacgcagccagtcaactctagatcgttgcttccagtaaatctcctccttatgaagcgggccatccaattgagattggatataggcaacttgagatgaagattgaggagttggctgattatcatttaacagacgatggagttcagcttgagtatgagatatttgaagttggagagggtgttgagttttactccaagccttaatatccgagaggcaggaggattgtctgtccagaaataattgtaggggggatatagggagggtactcgaattggtccaggatgactgaacaatggagacaaaagaaggatccataagccaatgattttccaagtggaaccgagttgaattacgattgtgtaggctagggtcctgaagtgagatcttaagagcacgatgatcagagccatagaatcccaaatggaaaagagtagcctgaggatataggttggtccagagttggtttgaagtgcaccagtccagacgctctagagtcgtaccatgtctccaagtaaatttaggcccaacatgatgaagaggaatatgattgaatttactcaaaaaagagtgaaaagaatgcatggcgtgggaaggaggggagttatgcgagttcctatcactaacagacaaataatcgttgaaatcaccaattactaaccagggtaaaagaggagcagtgtcaaataacctattaagtaaagtccaagtaacttatttttgatcaacataaggagagctataataaccagaaaagtgccagtctttaccattaaaattatttataatactatctatgtggttaagggagtaagaaataacattaacatcaagagaatcttttcaataaagtaaaagccccccccaagaccctgcctaggcacttctaaaacactatcaaaacgaag

SEQ ID NO: 327278 - DNA, 879 bp, Cannabis indica
gggtagcaaaataacaacataagtaaagtatacataccgtaaggacaggaccaatagaaatcttctaacttccttctgtcggcaagatcttgtattttcattataagtgaagttttggcctagttctgcatgtaagaaaacagagagatcaagaatagtgactggttggataacatcaaaagtcttggtgccaaactttatcgaaaactatatatgcatgggacatgattagaagcatatctttagagttgttaaagtatatcttcaaacccttgatttagaacagaaacaaacccaaaaatataccaagtgtcaaattgaagaaacaatttcctcagaggacaaatatcaaatttgaaatagggaattttctttaattggtaagcttataacatgtaattggattcaaatggtttaaaacacaatctagaccccgcccaaaatactctatctcagaataattttggttagaagctcttagctataacagctctatctattacaacaagaagatctatcatattatttggaacaagagttgagcataaaaatattcttttcttgtgtagggtccttttgctaaattttctaccaatttgcaaggtaagtaccaataaagatactttgaagctaatactatatcacataaaaccagaattctagttcatgataactgttagaatttgaggaataagatgaatgggattccatcccaaaaccaattggaaatgggaggagtagcccttttatcttatatatcacaatttatttccacacattagcaatgtgggactaactcttaatacaccctcctcacgtttgggcctggaaagtgtgggtataatgaatgaccttttaagagaccacaggaccgaacgt

SEQ ID NO: 327279 - DNA, 1223 bp, Cannabis indica
gaagatgaagaggaagagacaaagagaagagggaatataaagaagagagtactttgggtagaaattaaaaagtatttaattacataaattaattagaagttttaattttattaaaatgtattttttaagcatataaaatgaaatttcgcttgcataggatatctacctaaatttcttgtgtccaattcctaggttcgtgaagctcatagatcgattacaaatctcactaaaaattactcaaataataattcaaatcattattagtgaaacaatgaatataaacattagcatctctatacaaccaaaattaattcttcttttggtacaacaaatatcagatatttaataatttttttgataaaatattttaaaaaatagaatagaaaaactgtaagtcaatataaataaaatgatataaattgtaaccccaatatggcaattgattattatttttgcttatttgtataaatctcctcaagcacctttgtaagggtgttgtcaacaacggtaaaaaaaacaaaaaaaaaaatagtttaaccaggtttagaagcattgaatttaattgaataggattgaattaaaaaatataaaaactaatagataaattgatcatataattatagtttttcaatatataccataaaaaccatccaattatatgatccaatgaccttaaaaattgtcactacacaaaatgaaaaggccccaaaacacctatcccaatttcttcgagacttcaacataaattaatataatcaaattgtccgatgttgttttaaaaaaaaaatctatttttcatgcgttggtggctagtacttttgcttcagattgttggtcttttgctggttttactgattttgaaggaggttcgggggtcagttggagagttgtttaaggagtgtcatgttagaattatttatttgtggactaatataataccataatcacaatcattaactatgtgcccaatatttattcactaccataatgggatggttaataattaataaatgtattagaggcacatgggagcaccctaaaactataattggcccattaaattatagtccaccactaattatactcattaccccaataagcctaatataaccccttagggttaagtattgtatataaaaagggtaatatgtgtttagtatgagttaagagagggtgtgtggtgaaaagaaaagggtttgctctcataggttctcttctaccaa

SEQ ID NO: 327280 - DNA, 937 bp, Cannabis indica
aaaatattaattaattttatttttaatatgcattcccacacaagaaattacataaaaaatgccttatatatcacatatcacctatttatagcattactaaatatattttgaaaatatataaataatatacatatttattaattttatatatttatatatttttaaaatatactcgttaattttatatatttgtgtcttattataatgagaattaggttttgaattatgtcatatatatatattttttgaatgaaattcaacttaaatgatgactaacaaaaattagataaatctattgcagtctaatagaaaatcagtaaatgcgtttaatgattaaaaccgatttaatccaatgcatctatcagatcgattgactcaatttaattgagttgtatcagttaacaaattacaacatctaataaataatagaattgaatcagttaaatccaaatcttgatccaataatcaaccctaatctacacgtgttcctctttatatataataattcgttaatttatttagtattcattttatgattgttataatattaaatttaattattattataaatatatttgttagatagggagccccacattgctaatgtgtggaaagataacagaatatataagatgaatgagctattcctcccatagccaattggttttgagatgaaactccattcatcttatcccaaattctaacatggtatcagagcaaaacaaataaaaaaatctctagacgctactatccgaccaaaaaaaaccgatcgaagtagagccaaaaaatggagccacggaaaattcaaaaaaaagaactgatccaagagccaaaagtcaaaaaatgccacttgtaattcggggataatgagccaaaaaaaaagagccaccaaaaatccaaaaataccgatccaaaaagtagagtaaaagagccactt

SEQ ID NO: 327281 - DNA, 837 bp, Cannabis indica
ttattattattattattttctatataacattatctttctttttatttaggtggcgtttggtaatacttttgtttttaatttttaaatcacagaatgaaaataaaatttttgtttttaaaaaataaaaatgtgttctgtaatcacttttacttttcaattttaaaaacagaaaataaaagtgtgttctgtaaagttttttttcatttttattttttgagtttatttaagtcaagtataggttcgaggtcagattcgggtttgagtcagagaccgggtttagtgctagggtcgtgggggagaatttgggtccgactttggtcaaagtccaaaatattgattaagaaaaagaaactgtttaaaaaatattaaaagtatttttttaaaaaaattttggttctcaattaaaaaattggaaagtgaaaacagatttataaaacatgtttttgaaaaatatttacacttgttcaattttaaaaacagaaaattaattaaaaaaatattaccaaacgccaccttaattaatggacataaattaaaatctcttctgtttttatgttaaagaaagcctccataattaaattcatttgataggaattatagacataaacaatagggtgtacacatatttagtatcttatattttatttaaatattatatatttttaataatacttttttagtatcctgtgttttaaaattatacatattaatacaataaactcaaaatttttttataaaaattttgtcaatacaaaatcatctttaattttacaaattttgaattcaattttttttttttttttgatgaatcagagaattcaaatttaattatttgat

SEQ ID NO: 327282 - DNA, 630 bp, Cannabis indica
atgcatgattccacatcacatgtatgtatagaaaaaaaaaatcaatatcaccattttgaaatcaatggatcaatgtacaagggaactaaactaataatgttatcagaatataaacagacaaatttactacaaattaatactagtttttgaaataattatatcatattattgattagaggaggaattcagaataagatgaaattcttaattagaatttgactcaagaagaagaagacaatatcatttacaagaaaaatcaatcgatacaatccgaagaaacaaccagttcgtcgcgtaaaatatacaatcgacaatcacaatgatatagagtaaagacgaatcgtagaattagcaacaaaaaggaaaaaaaaatataccgattagcagcaattccggttggttggggtggaactagggttagggttgtaaatgattaataggaagaagaagaagaaggttagaaaagagagtgaggatcgatgatgaagttgcaattcatttaggggagttatattttcaccccataaaattataaatacaccccattattaaaaaaaatataaacttaaataatttttaaaaattattcttaatattttttaaaattttttccttacattattttatgtt

SEQ ID NO: 327283 - DNA, 590 bp, Cannabis indica
cctttttaatggctaaagctttagccatgtctagtaccattatatccctacgatagactgttttgacctcttaagatccctttgccaccaactcaaaatcatataatgaactgtggtcaaaagttgttgcatcaactgagattttaagtacatttttaataagcttaacttaagaaaccgcccatcacctgtaatatttgaaagataatgagcaatgttcaatttatcttgagcattcttccatgtacacattttaatatatatttaactgcataaattatcaatcattaaaaaagactgtcacctttcatttatttatttatttttctcagactcttattaactcatcattaaaaataaaataattatttttctcaagttcttattaactcaatctccagattctaaaaaaaaagactttttttttaagaatatcccaaccccaacttacatacaatgaataattgatagtatattctgtgacgtattttgttgatgaaaattattaattactacgcaagtatacgcaatcaagtagtaaatctcacacaggtgaggtcgatcccacagggaattggattaagtaccac

SEQ ID NO: 327284 - DNA, 845 bp, Cannabis indica
ttaatatttaaaagaataagttacaaataatattgtactaactaaaaaatcttaaaaaaaacgtaaagtccaccattataattggagaatttttcaatgtcacatttggaattacacacatatttaaaatgagaactaaataagagcctattcaagaaatataatgataattaaattgagaagaagaataaatatatcaatgtatgataggcattagggtttagcttggaaaaaaatgattaattaaacaaagataataaaaaattataaaaacctacaaaatagaaaaattagcactatgaaagattagagtgccacctcaacttaccttaacaaaaggattatataaatatatagatacatagatagtcaatttaatttgcaaagtacggatatctacacttgtgcagattgcatattaattcaaatgtaaaaataattaatctaatccaattctcatatatttatataattttttttaacattttaatgttaacaaataatactttaaaatataatacatataatacaaatatattttaaaatttaatagattgagtgtatattttattttattctaaagaaaaaattaagatttcttattcttaaatgtatagctatcgaatgttattttttttttctccagccaggtcgtccgacttttcctggggtgaggtgcagcttggtcgggttgtattttgctatttccattcaatttttgttactccgattagtcttattgttaggttatttttagtattaaatttagattaattttagcatatttttaatttaattttaatcgggtttggagtatttttacgcttgttatcttttatttttgc

SEQ ID NO: 327285 - DNA, 1649 bp, Cannabis indica
actacttccaccacgaccactatagtaccaccacaactaccagttacaaattcaatcctcaaaaaaaaaaaatataatccattaagatagttgggtaagaactcaaatctataattacaatataaattcaaatagctcatccaatgtcatcttaagaacaatagctcacactattagaacgaaatatgttgactcgaaaatttaaactaagacttctaagccacactcgctcgctagattggcgagaatgaaataattgttattttttttagtgtagcgtaatggtatttttccaatcaattaatagcttgtagtttaaaggtcttaagttcgaacctatgacctctccttttttccatctctccctcaccactaagctagccttagtggcttatgaaataattgttaagtacttataagagagacacaacaaattatagtggttcactccttgtatcgcgacagtaatggagctacgtctacttcgagcttttatttctcacgagatgatattacaaaaaaggcttagtgtcaaatctccaatttctagagagaaaaactagagagagaagttctgactttgtgggtagtattatgaatctcaaaaatgagttaagggagctcttcttttataggtgaaggaggcccacaaaaataaggaaaaatacaagttggctatttttaccgtagatgatgatctaacagtaaaaattaatttctggagttgatcctcaatttttgaagtccgagctgcgacggcaggacccgctccaagtcggagcttaattttataactcccttggggtgaaatttggggcagatagcttcaaaattacaattgaagtgtgagacatgacttgatagagcattgaaatagattcaaagcgcaagttgaattgcatcaatcgaataaatactgagtgagttatggtcgttttactgaaggtagtccatgacccaacacccaagttgacatccaacgtccaagttgacatcccaaggcccatgttgacatatgacatcaaactggacgctaggtaagtgaaaaaacgtgcagggtatgtactttaagatgcctaagtgatattttgacatcacctagtctgtttttgtgttttggtgaagtcgttcaccagttctcaaagatgttgttgttatgcagaaatgagagagtcgaaactcttcatttctgagtgagtttcccatgttagaaatgagaaatgaagttatgaatttgacttctctgacttcaagaatcatagatattgtgaaaaactagacggacagtcgaaacagaatcagaattggataagccaaacccaaagcacaaggtcatttgtcaacttgggtattaggtacttcatttatgagctcccaagctattgttttgaaacttctaaggttcttgtgttgattatattttaccaggatctaaatttactaacaagtatgtttttaatatcctaaatatgaacttctaaaacgatgaaaattaaacacatataaagtatgagaaaccttacattggttgcagcgaaattaaatgactccttccgttcagatctctaacccttgttcttttctgtcgtaaagtataatcaagatctgagcccgaaactccttcagttgtttggattcttcacagtctt

SEQ ID NO: 327286 - DNA, 763 bp, Cannabis indica
aatttttcaaaaataagtaaaatatctaatatagctataatatatataacttcatatataaaaatgatataaaatgaatttaattatagaacatacttgagaacttagaggagaagataattctttgtactgaagcttgaattgcaattttcaagttatttaggtttccattattgagcaactccacagctccatgtcgtctccccatgtcgtcaaaagttgaacctgattgcttagctccaatcttatgttttgtagtgactccattatcaggaccaatccctgcttctacaaaagcttctttcgcagcagcttgccaaaacgacaaattcgaatacgacactatcttgttcttcacccactcatacgccttctcaaccgcatccatgtcccattccacgccagattcagcaagaaaatcattgtcagcttctgaaaagaaagcggcgttaatcatgcttgacccacctaaaaccctaccccttacgttctcaacgccatcctctgacgtaaatctttgcgctggcgtcgtgccatcatcttcttcaattagattagctagaaatccagatgaaaccaatgtgtttgggtgagctttagggacatttcctctttcaaggacaagaactgagtacttttctgatagagttgcagccaaagggcatcctgctgtgccacctccaatcactatgtagtcatattcttctactaatggtagatcggttgcgttgtaaactgatttcatgtaactaaaatctgttta

SEQ ID NO: 327287 - DNA, 610 bp, Cannabis indica
gctcaagtggagctttgaattttatgttgtttaaatctgaattgtgatgtgtttttgttgaatttaggcatgagaattgtatatgttaaagcctatgtaggtacttgacttttggtgaatgattaacttgaatgttgtttgaattagttcattttttgggcctaaaattcgagtttagcttgctgcttttttggtttgaaacccagaagcctctgcatggattttgcatgccgtggcccacccctcttgatggaatctgggagttggtcccaggtgccgcgacatggattttgcatgccgcggcccgccctcaagtttctgggcagtttcaagtacaaactttagaaatgcataactttgtgatgcaaactccattttgggagttctatataccgttagaaagctcatatgttgagatctagggttatgtgttcaaggcataaccaggttgtacttggtaacttgaaccgagaggaaccgttctaaggccttattatataaagacgtgtgagcgcaacaggtaggtctatgttacatagacataaataggcatgtgagcataacatgcaggtcggtgtcatacaggaatatgagaatgggattaatgttt

SEQ ID NO: 327288 - DNA, 1131 bp, Cannabis indica
attatttccaacataaaataatatgcagctggttttaactgaaatggaggttttgaatatactgtaatcttttaaattattgcaccgtcaccataccatatataaaaataaattaactttggaaatttagtaggttactgtaaaatgtagtggtacttctttcaagaaaaaaaatgtagtggtaacttatttattttggcattcgaaaaatacacttaaaatcacttataaatttttttttaaaattataaaatagtttacaatattaaaaaaaataaaatttaaacagaaattttataataaaatatataaattttattttttaaaattatatattatttagaatttttttaaaaatttataaatagttttaaatagctaatgtatttatataaaaaaataaaataaaataaaaatggaattcatcgatacactcctttaaaaaggtgcacggtcaacttatcgaataacttttatatcatttttttatcgaaataatttaaaataagattttttttttacctacatatgatatctacttagttttattattattcaaaaataaataaaaataaacatgataaatatcatattattatcattcagactaattacttaattagttcataattagattattgatttttagtaaaggagaattcttcattggataatacattctcaaactaaaacaaatatagcacttagtaaaactacgaacaacaagaaaatgagactcgctagaaaatgtgtattagcattactttttaataaaatctaatgattccattacataaagccattagaaaatatattattgaatttacttctggtggggttttgagaaagggaaccatggtctttaccttaaagcttgggataagctttgccttcccaagtctttgggaggtctgggttttcgaaaaacaaaggaaatgaaccttgcctttttggctaagtagggatagaatttgttgactgggagtcagtcgttatgttgtaagatcctggaggctaaataccttaggggaaaggattttcttgagtgcaagtacaaagattctgattcctggttttggaagaatgtcataaaagccagggcaatccttcgaaaaggggcttgcaagaggg

SEQ ID NO: 327289 - DNA, 1304 bp, Cannabis indica
gatggaactaatccaatccaatacgtacttgtttaccgagatttttagaaaccatatatttaagagctaaagaaataataacttgtagaaataaagagataattttttttacgtggttcgggtgttaataaatcttagtctatgagtcaatctattagcctttaatgtcagtattgatgtgtttataatatttttacaggaaaccctaactctttactctaagtttctcatgaagaagaagacctagagtaatctttgcaaaattttagttatattgattgtgatgccccattcatatgataatcgaggggtatttatagactaagtagcaggtatggacagacccatgacccgcctaaggtaactgcttatatttcactatcggagtaaattgcatgcaatattagagctgatcaattgatcctgtgggaaaacattatgcccgtgcgtactgcagctggataatagggactattttgtaccacttggacacgtgtccctcaaaggtttaatctttaaaagtagaggtcatgtttcactccaatcgcatgcattttataagcaggagcctggaatattcatttggcaaaaaaatggtagcggtacgagcactaccatgctcggatgtaggagacaagatgtgatcttcgtcagaaaaagtataaccgttactttggtgacctggcatgtataaaaggtcaacatcgggtacatctcaggatggtagacatacgcgttaaacctttcgagtacccatcaagatttggtttcagtgaaattcccttcttagacccttctgggtttgggagagacatctcaccttccacgtttgggaagttaaggcgagtataagtaggcctccatgtatccttccttcctagatacttcccagttccaagaagtctctttgtgacagggtagttttgcattaagttataatagtttttatattttatttctattattattttttataaacaattattattagtcaaatagttagcgaattaatattttatacaatgtgatgatttattgcgccacaattttgttggctttgatgcctttcaaggcttttgcgcttattttcatagtgtccccctaattatttagtttaatatgattaattgttctatgttttcattgagaaataaaagttttcaatagaaattttttacggtattgagcaccaagagcttagttagattagatgctgttacattgtcagaagataatatagtctacgctacgttgagcaaatctctcaaaggttagtcatagtgggtacattaaaaacattattc

SEQ ID NO: 327290 - DNA, 980 bp, Cannabis indica
atatgttatacagtctcacatatatatatttatctatacattttattttttctaggtaattacagaaggggcaactcatatacaatctcacatttatattatcttttctaaacattttatctatatttttcttttttagataaaacgtaatcgttaaatttaacagaatatttttttatttttaagtatattctgttaaaccaaaaaatatcgttagatagacacttttaatatataaaaatatatatatatataaaatagtagttttaatttgtttggggtctttggtgccccacactctggccgatcctgctgcacaatatcacagatttatgtaaatacggtgccattaggattcaggttacagagaataatactatattctatttttggatcaaaataatttaaaaaaaaaaaaaacgaactactgttattagaaatggccggtgtcaccgaatatataaaggtaagatatgagcattaaaaataaaataatatgaagttttcctttaactgactgaccttatcagatttacgttacaaagttcatttatttattttagtggttagaggtatcaataattgttacatttgttaagatttgtccattagcattgaataatatttagaaagctaccaaaagtaattaaggtaaggaaacagtactgtcgggtcaatctttcacccatacttgtcgttgaccttgacccctactatctctatataatatattactttacaacaatacatacaaaaaaaaaataggtctcgttagaatctcttgagtaaactgagtggaaaaactagagacaaaaagaagagatattattaatcaataactttcccattgcaaagcaacattctgttatagtgagatttctctcatctagaaattcgagaccagactccttttcaaaggacacgtgtattcagattttcaataaaggctaaatgtccgtgagagacttctcgaagtttag

SEQ ID NO: 327291 - DNA, 901 bp, Cannabis indica
attcccatatcaattgtagtgtgaccaagtttttctttccaatgaccaatgcattgtctaaaagcagctctgcaattatgtggaaattaattagatgataattaatggtgaagagaaaaatagatattctaaatatgtatatatgtactaccttgaatgtataagatcattgggaaagcaagaaaacacttcttggtaaatggttgaattcttctgtttaacataaataatgttcaaattagttggtaaaaaaaaaaaactatagaaattatgaacaagcagatgtatgcttaaatccattttagaaattattaagaagagcactcaatacttataaccaactatcctctattatttatcactattaaaaagaagcactcaatactattaatctctgtttttggttctttgtccataaaaatttttggttaatccaaaaaaaaaatcctctattatttaaaatatacatgtatttttattcagtttatacagtaaaataaccagagaaaacatggaaatattgttaaaaatatattaaaagaataaatagtaataatatttaaatgtagagaagttactctaacattttattatgtaaataagtgatacaaaattaaaatataaattacttaaaaaaatgtgctttaataatgtgccaaaagatttaaatttggcatatagcaaatgttatgccaaatctataatgcatcactataaattgcacaactttattattgaattttatgtcacttttattattttattaatatttagctataatattaatgataaactatttatattttattattttacataatgagaataataataatattaatgattttttttattacttttaaaaatattaaaaattaagttttgtaattgcattgaaaca

SEQ ID NO: 327292 - DNA, 525 bp, Cannabis indica
ctgatccacgtgtcccctctcgactagtccacgtattttgggcgaattctggagcaacaatacccgttagaaatataggcattataagttgtaaatatagacgttagaaatataattgccacaattacaaatataatatgtctgaagtaatagaaagtaattaataaactaattcatatttaatatttaaacttttaaataaaatattaaaataatgaatattagttaaagtagagtgtggtttgagtgagatggaaaaatatgactctctaaaatagttaaaaagtagctaaaatttaaagagcatggtttgagatgctctaagaccacctccaatgggagatgcaaaagttgatctatatttggcacaaaatatagttttatatgttatattatttagaataatataatatgtagaataaatatgtgtaataaactaataagtatgtaacatatgacaatgtatattagttgtcatctttttgtaatatttagagagttacttgttactatgagtaacctcca

SEQ ID NO: 327293 - DNA, 586 bp, Cannabis indica
gattgggttagaaaatatataggataaaccatccaaaccgaccgatgtacagtcctaatctaatcttgtggttgttggtaataaagagtgatatgtggatctaattaatgatattttcgagcctaaggatcgtgagttgatcttgagtattcaattggactcttccattcaagttgatcattggctttgccatcatgatgtcactggtttgtatttggtcaaataagcttataagtctcttcaacaatctcatgtgttagtggtggctaatgtgtggaagattgtatggaacgtacgtattttccctaaagtgggttattttatttggatggctcttactagttgtttatctaacaaagtgtagtttgtatccaaacatttacctattgattgtttgtgtcctatttttcatgtagaggacaaaactattcttcatagtttggtgacctattcgttttctcgttcttattggattaggtcgagtattagtgtgaggatagtgcctgctttgaatttttagagttggttttgttaattccatttttggcatatttaattgaaaaaaatattttattatttattgtat

SEQ ID NO: 327294 - DNA, 665 bp, Cannabis indica
tcaatattttagactccgaccagactcggacccaaatcccctccccacagcccaggcgctaaactcgacttctgaccccggacctagacccgattaaataaaattaaaaaattaaaattaaaataaactttacagaacacttttattttatgtttttaaaattaaaaaacaaaaatggttacagaaaacatttttgtttttcaaaaataaaattttaaaaataaaaatttttattttattttatgattaaaaaattaaaaaataaaaatattaccacggcactaaatttgttgtttgatttgagttcaataattaatttcttgtagcagtaataatggagatagtgatgattttgggcgtgcgttgacataataataataataataataataatattttctataaacaaaagcttcttcttaagttagacacctcacagtgagtgagtgtgttcttaattttattataatatagctacaaaaagtaataaaataagtgttataatgtacttgtagtgcacctctatctgtactatttttccctttcggctttcagttacgtagataaagactccactttaattattattattattattattttgtacaatataagtttcaaaagtttatggtacctattgatgcactttttttttatattttttt

SEQ ID NO: 327295 - DNA, 629 bp, Cannabis indica
cgcaaaacttaaaatcgatggtgtgtttttattactcatcgtaccctgaactaaattccttatccgcgatgggctctctaatttattacatgaaataatttttacctaaaaattatacaatgtaatgctacactgaagagaaaagcaagacaacttagtgaattgggcgagtctgaggtggttttggtggtggaaatactaaaacgattcttattgattaccatatcactagaagaagtaatgaggatgatagattgggtagtgaaaatgaaccattcttctcatcaagtttgtcaatttaatttaataaataaatcattagttttatttaaatatatcgtaaaatgtatatagtataattgggtgtagattttgttgttagttttttaaaaaattaatgtaagccagtttagggcataagaattttttatctaatttattatatgaaataatttttacctaaaaattatacaatgtaatgctacaccgaagagaaaagcaagacaacttagtgaatttggcgagtctgaggtgtgtttggtgtgttatgattccgcaggcaagttagatgtttttccagaagactcgatcaaagctcattctattatctctaattactatgaacgatt

SEQ ID NO: 327296 - DNA, 786 bp, Cannabis indica
aaatcttaattagccatatatattataggtttttttttcttttatttttacactttaaaaataatttttcttttttttttgtatttttacaaaaattcacataaaaactcacataataactcatatagaaattatcggagtaattcaaactgtatatatttttttttaaaaaaaagttataaaatagtatatcggaaaatttcccaatctaataatattattagatgtggttatatagtaaccagttgcctaatgtgggtaactaatattattagatgtggttatatagtaaccagttgcctaacgtgggtaactagttatccgtaagattgtaaccagttaccaaacatctagatccttaaaatatgtataaggaaacataaggttactaattactttacccgaacactgataataaaacgttccggagttggaaatgaaacaaaaacacataaaaagatggtgaaataagaaaattgagatgtttttttttttttttttttggttacctatatacaattacaaaattatagagaaaaataccgtaatgaaatttgaataatttttttatgtatataaaaacaattcatttaactttgaataatttacggcataactacctaagttttatgtcgagtagcacataaatacctaagtcttatttttggcggtaaaaataccttctgttagggttctggaacttccgtaggtacctggacgttaagtgccaggtcagtacctacatggcacgttgtgattggtccagatagatttatttttattttt

SEQ ID NO: 327297 - DNA, 524 bp, Cannabis indica
caaataccacaagaaaaattgtaaatcaatataattggtgcatctcaatatcgataattgtgagatgccacttcggtgtgaggttataataatagtaaccattgttatttttttggtgctataaattatttacaagttacagaaaatatttgaatctaaattatttcggctaaaataaataaagactgttaaaagacaaaactgtccccacggtaaaattttcacgtgtgtttgttactcttcgatatttgtaatcctgggtgttaaaattaagggcatttgaatcaaacattcaaacccccaagtcgatacaattttattttgtaaagctattaatcatttcgataaaataaaactgaaggaataatatatctactatttatcatctcgtttatgtaatatcttattactttatttttatttttggttaatgttaagacaaaaattatttgatgtattgtttaattaaacaacctaaaattcccattataattggagaccatgttcgaatttaaaaaagaaaa

SEQ ID NO: 327298 - DNA, 938 bp, Cannabis indica
atttaattacaaatttggcaatcttagaggtagaaatggacttggagctcaacaagaaagttttagatcttgctcttagcttccagaacatcttgaattgtctaattttgagttatattgaagaagttatgaccaaaatactaattaggtgatagaaattttttcggcagtgagctgtcgccgcggtgagcaacctcgtggccgcggggaggaagttgtgaccgcagcgaggaaacctgtggccgcagcgaggggtcaatttctgaattgcaaattttttttatctattttttttttcttaaagaggagttttctttttttagtgagatattttatagtactataaataggacctctcaggctgcaaatttgatcattctagagctacaaaatttgaaagagaacaagaaagacatggagatcacaacttcaaagtgttcttctgtattatcccgataagtctaatagtaaataattagggtttatatttatattacgtgttaatcaggtaataagtgggattatgatcctactaatttatttcagcagaaaatttaaattttgctataagtgagtaaataatcgtaatttataaattacgaagatttatatagaatgtgtgaataaaaatatttttaggttcagggaccttgaagactcgataagtggatatataagcataatttgttaattacaaagatttatttgaaatacgtagatataatatgagttatttgtaaaataaaaatattttcatgttcggcgactctggagacctgattggaggccaaaaatatcacaacagttttagttagaaatattgatgggattattgggataagttgattttagaaatattggggtattttaggatactcggagttggtcaaataccctagaaatagagatttcttaatggctaagaaataataagataa

SEQ ID NO: 327299 - DNA, 808 bp, Cannabis indica
actatttattcttataataagggttcaattttttctttctaaggtctattttaattcaggaccagtcctaaagcgtctattgaaaaaaggaggagttcgatccccaaaaggcatcataatttgacatgaaaaagggcttcgtcgggtgaaaaggttcaacaagtatttcgtagcatctatttggaaggtaacaaactttcaagctctatcacatacaaacgggactgcccacaatatcacgtaacttgcgaaaatgaggattagaacatgggaagctcaagcaagcaataactaaatttttctcctttcaattccttgcaataagggcgaagaccaaattagttgacaataaattaaaattttagccaccaatttacaaaataaactcaaatttaataattaatttatcataacttatatatatgaaccaaattttaaaaaaggaagaaattttgaagactaacttactaaaatctatataatatatggacctgcattacagataccaatagctttgtcaccgacccgaccattgatagagccagttagagagaatgaggcctagggatgtacattttctctatgaggatagggcctcaggaggacccacttctaatgggtcgaggattctccatctaaatggggagtagggcatgaacggagattatttttcgtccctgaatgttaaatgggacggggatgatactctctcgcctcgacaatggcccattttatacttttgttatctttttcgcaatattttatatttgtatttttttagtatattattttaggctaattagtaatt

SEQ ID NO: 327300 - DNA, 1833 bp, Cannabis indica
aattttcatcttagtataacaacaattattatgcacacaggaattcctatttttccacaacatataaattgtggcagcagtaataagaatcttcacactagcattcgaatgggccagccacaccttccatctaatgaaatccgaaggccaaagatcagccccacaccaacaaaaaacctgctgaagcacctctcttgacaacctgcagttgaagaacagatggctatggctttcttcttccaagccacacaccggacagatacaagagtctagagtaatctgaaattttacaaaattatctctagtaagtaagttgccatgaactacctgccacatgatgaaacggtgcttaggaactgaagcatagctccaaatcgacttgtagaagctatctatgttcctttgattagtccccatgtaaagccttgctgctataaacttccccttcttgacagtagccatgaaattcatcttcgaatatctcttcctcaaatggctcaatttcctccaataccaacttacatctccttttaattcatactcccaaaaatcatttcctttcatataaatgttgttaacccatttaacccaaaggatatcatgtttatccattattgcccaaatgaatttcccaaggatagctttgttccaagtcggcccattcttgaaacctaagccaccaaacggttttggcatacaaacaaaatcccaggaagccaaatggagtttactcttctctcctttaaaaccccataagaaacctctacaaagcttctcaacctcttttataacactttgaggaaggataaaaatgctcatccagtaattacgaagaccaagcaaaactgagtggattaactgagctcgcccagcataagacaagtgcctagttgcccaagttgctagcctcaatttaaccttcttaatgatagtctcacaatcttctcttcgccattttgttggtcttaaaggaaccccaagatatttgagaggaaaagtcccctctcccatgtgcaaatcttctaagatcacctgtttatcacctatagacactcctccaaagtaaacaagagatttatctttattagggaataagcctgttacctcagagaagctttccaaagcaatcttaagatgatggacagcccttggagaacccttactaaacagaattagatcatccgcaaagcagaggctcaccaacttaagatctttacacataggatgaaaccgaaaggtcatcttagttgtttccttcttcagccgtctagtaagatactccattatgagaacaaacaagagaggggacatcggatccccttgtctaagacctttcttccactggaatttaccatgccactgaccattcagcattattgtataggaagtgcccttcaaacacatcattatccagttaataaacttggacggaaagttcagaccaactagcaactcctccacaaatccccaatccaccgtgtcataggctttactgagatctatttttattgcacatctaggagagacaatcttcctaccatagttcttgattaaatcctggagaattagaatattgtgggcaatagatctcttctttataaacgcaccctgattttgatggaccaaccaaggaagaacttctgctaaacgcttactcattagcttggttatgcacttgtacagagtagaacagcaagctatcggcctgtaatcaaccgctctcatagggttctccacctttgggatcaaggtaataactgtttcattaaactgagctgggatttttcccctaaggaaaaactcttttattgctttacacacctctgctccaat

SEQ ID NO: 327301 - DNA, 1083 bp, Cannabis indica
tttcatctctcaccttgtggagactcgtggcctaataaatatgcatattcaaggagatatgatgacttgggataatcaccggtctggaaataatcatgtgaaatctgccctggataaaggcattgtgaatggagcttggatgcaactgttcccaaaatctgttctctgctccgttcagacgagtacttctgaccatagacctttgtgcttggacacgggggggattggtcctaagttttccagatgtttcaaatttgaggaaagttggacgcgggatagtagaagcaaacttgttgtagccagtgcctgggattcggtggcccatccgtgggcccctgctcgcgtttttaagaagattggtgcgactagggtagcgcttctgcaatggaagagaacccaattcggtaagattgacagtatcattcaggagctggaaattaaactggaccaaatgcaacaactgccggctggctccagagactggaattcggagattgatcttagacgaagcttgaatgaagcccgagccaaaaaagcgatttattggaaacaaagggccagaatttcgtggctcaaggacggggataaatgctccaaatttttcttcctttctactgctataagaggtagaaggaatgccattgaatgcattttgaataaaaataatgaatggattaatgagcgagtgctgataggccaggaattcctagactttttcaaaagcattttctctggctctgagaataatcgacagatggatagtgatcatttatttaatgagaagatttctcctcaaaatcaagctgaagttgttagctgcccgtcccgtgatgagatcagaagaaccctgtttgccatgaataaccataaggcccctggccctgatggaatgtctgttctgttcttcaagcactactgggagtctgtgggagatgatttttgtgacgcagttgaagatttctttgtaaatggaagaatgcataagggggtaaatccgacgaatgttgttctcatcccaaaaatgcagaacccgaaaaagccgaaccatttcagaccaatctctctctgcaatgtgatgtataa

SEQ ID NO: 327302 - DNA, 492 bp, Cannabis indica
acacataccagatgcagttccacttctggatattcaaaattaaaagttctagggaataatgtgagccagtcttagaataagaaacgaggaaagtgtccgggacagagccaaagttccaaagaagccaagaaagagtatgaaccaaggtacaccgagtactctagtctggtggatactcgagaaaatgtgcataaagcaacatgcaatatgatccattatagaaagcctccagggaaacctgaaggggataatttttagaaagatccaagaaagaggtgtgagtatcatggagaaatgggacactccaccaataattttgagcacctaaaggatgaaatcgatatactagtcagagtaggccctatgggacaatgggtccaaattcccatcatatatcccaaacaaggggtcattcacggacagatccctattcctagataatagacaaccataaatcattcgtacggggtaggtctgttgggttttatgccc

SEQ ID NO: 327303 - DNA, 884 bp, Cannabis indica
agaatgatatgtatgcacatagtcctcctgctattaatgatgtgagtaaggagaaaaatcatgatcatagcgataactcggtgtcttcttttgttcgaatgagtactgattgttcgtgttgtgttttaaggttgaacttgctggagtaggtggatttggtgcagctttgtactgtggaactggatgttttcatagaagagaaagtatttgtggaagaaagtatttcaatggtggaaaattcgattgggatgttcaacgcgaaaaaaatgctcataagactattgaagatatggaacaatcagcaaaaattgttgctagttgtagctatgagaagggtactgaatgggggaaagaggttagtgttctatctcatttgtagccgtgttttgcaagagttacagatcagattttctgttttgttagatgataactcgggttatgtatttttcaaaatgttatataataataccctagtcatttggtcataacactcaaggccggccctgaactttagtaggtaacagattaaaatttagtctttatttaaaaagaaatgtggtattttcaaaatcattaaaatatgtacatatttttataaagaaatttgttttggggccctggattaggtgtgccttagacacaagtctagtatgctcacaaccgagcttgataacacttctaactcatggtattattatgttcaattttaaaaattacaagttccaatttttaattaactaacataagatgcatttgataagggaaatttacatagtatactaacatttgtcatttatttacaaaaatactgccaagcggtattttttacttttttactgtgttttttttataggtttcatactgcagtatattgtgttaagttt

SEQ ID NO: 327304 - DNA, 790 bp, Cannabis indica
tgttttttttaaaaaaaaaacaggtaacaaagaaagaaagaaaggactcactataggcatttcaagactagctcaatggtaaaagagagatagaaaaagggagggaatggattcgattcaaacctaaaacggtaagttattaataaattgtaatgccactaagatatattaaaaaaaaaaaaaagaagacatttcatcgaacaagtagaatagataccaaaaaaaatgaaaaaagaaaaacaagtactcaacccccatatctcgacaccacacaaactcattatataggtgtgcgtgtgttgatgtagtagaagtacccttgcgtctttgattttgagaacgagatcgaccaatgggattcgttcagcgatggcgcgagaggcagcagccatgtgagtgccaatgtcatcctcacgttggctctgtgttttgactagatttcaccctaattctctagctaaacaaagagtagtagccatttttctagaactcaaaagatttgaaaaatggtatctcacagttgacagttggagtcttcttttttcaatagaatacatcatttatatgggccatatccttcctagcccagtccgttgagccccaacaaattgctcttatttatgagttggcatttttacgcaaacatttttgtagaatttacacaaaatatgagaaaaagttttagagtttacttttttatggcataattttttaagtagaaattacattatatatgggaaaattataaaagtttattttttatggcataaataaataatgctaaggggtt

SEQ ID NO: 327305 - DNA, 550 bp, Cannabis indica
aaaaaattttttggatgccgaaataagttaagggtatatcagtacatcccttttaagggggtgtattgtagaatcacccattattttatactatcttttttttttcttggcaaagttattttgtaccatcttgaatatacaagttttaatttatcatttaaaagacaaaataacttttgtaaaatgtgattttttttaaaaaaaaataaataaaaagaaaacttttgcaaaatgtgagtttttaagtgtactcatttggattattatcatttaaaaacattgttagactttttttaagtgtcttgactatatgtcgctatgcaacatgataataattgatttataattggttaaatgctattttgaattttatatttgttaaaattattgattaaattatttatttaattagtgtacaatttaaattttatatttttcaaaatagtataagataatacttaatctgattttttatcaaaaaacttaataatatactagatgagagttacgtggcgagccacgtaaatattaattttatataagttttagt

SEQ ID NO: 327306 - DNA, 576 bp, Cannabis indica
aagtccttaaatctaacaatttcaatagttcagggagaatttttaacagccgaaaaagttcagggagtatgatttagtacatgtcaaagttcggagacaaaaaattctaattagcctattataaatatatgtacctgattacgtgtgacaagccatccaatggcaacatgtgcgaggccaaatgcaataataattggagaaataacagagtagcaaagaacaatggtgacaacaagcatgtcttcaggaacctttgtatgaaacccaaggtcacctgttggccaggcttctttttcttctgcttctgtcttgaatatcaattttctttttatatgaaaagcaatcacagcagctattcgagaaagttcaaccccagatcccacaaaaaacctgaaattaatcacaaacacataaaaattacacattttcattccatgggaaaattcaaaaaagggtaaatattattttagatcttgtgttttgcaaaagttactaattagatcatctattttgttaaataacaaaatggaccttgtattttccaaaatattacaaataggattctgaactgatttt

SEQ ID NO: 327307 - DNA, 1092 bp, Cannabis indica
tccaacaactcaatcggtccttcttaaggctaccgctactccctcgaattcgatgaactccacttggaatccgtttgctagttctttaacctctactctaacaatcaaattagatcgtactaacttcttatcttgaaaatctcagatcatccccaatgattggacacgatcttgatgaaaccttgttaactggtattcctccaccaactcaattgatcaccggcgatctaaatcctgctcacagtcaatggaaacaaaaagatgatcaattgctcctctcttggttgcgattgtctatgactgaaggggttcttgcatctgtggctagtttcaccacctctcactctgtttggtgtgccttagaatagaaattttccattcaatccaaggctcaattactactttagctcaaaagtcagttctcaacaattcgaaaagaaggccattctgtctctgaatatgtcaaaaaatttcagttgattagtgactcattgactgtatcaggctctcttatacctaatcaagatgtcattctccagttgctcaacggtcttgggcctgagttcgactcagttgtctcaggaatcattgcatgcagtgaccttcttacgtttgaagaggttcaagctctcttactctctcactctctcacgagagttgacttaaacaccacaatatcatgaaagattagagcatgaatctttaagctaatgtggctttctctggatcaagaacaatccttacataccaccacaaggtcccaagaacggtggtcgtggaggctttcgtggatcaaaccagaacaatcaatttggtgacacttttgaaaactaaggtggcgtttggtaacaatcaattttcctatttaacaaaagggttgagatacaaattgaccttaattttgaaaaataaggtggcgtttagtaacacttttttaatcagttttcctgtttttaaaattggaaaagtaaaaatattttttaagaacatgttctataaaactattttactttttaatttttaattgtagaatcaaaattttaaaacaaaaaaatacactttacatattttttaaactaatttttttacttt

SEQ ID NO: 327308 - DNA, 2102 bp, Cannabis indica
aaccacaactcggagcccgattccgacctagaccgagatctagacacgaacccaaactcaaaccaggactcgaaccctgacccgaactcaaaccccgacccaaactcgaacccaaactcaaactcagactcgcaactagaactaaaccaaactaggactaggaccaggcccaggagcaagacccagactcgaacacaaagccaaataaaaaaccagactgagatccaaacccgaacatacaccaggacacaaacctagactagaatctggacctggaactagaatcgggattggggccggggcaacagaactaggactgggacccaagacttgacccgagactcggacttgaacctaggacccagctcgtggtcggcacctaaaatggaaccagaccagcacgcaagatcggggtttggatcaggacctagggcttggaccgaacacctagtcggtgtctggatctgggacccagtcccaaacccgatcccagaccaagatgcaaacccggacccggacctgaactcattcccaaacccaaaccttgatccaaagccacaccctgtgacctgaaattggaacaaaaattggaagtagactgagacccgggaacgggaccggaaccaggacttcgacttggacctagacccgaaactgtaaccggactaggacccagtttcccaccaagacctagatctgaactaggacccgaacctgaattctaatcaagacctagactcggccgaaccttgacccaaactcagacccaaacatggaaccagactcgggacacagaattggggccgagacctagaagtgcaccctagtcacggtcctgaacccaaacttagacatgggacccaagacctaaaccagaaccagaaccggactgagacacgtgatagggatctagatctgggactcaaactagcacttgaaaccagactaggacaaaaactcggaccctaacccagacctgagacttgaaactataacctgaacaagaacttccagatgaggatactcgaacaagacaacaaccgtgatcaggacccaaacgtagaccttgaaccaaactcggacctagccacagacccaaatcgagaccggaactctagcccatgcacggtcatacacacggacctatacctaggacctgatccaagacccagacgcggacctagatagggatccatatacgaacctggactcaaacccagactcaaacccacatcgagatcaaaactcgagacctagatctggatcgagaccttgacgcagacccagacttggacccacacccgggatccgaacacaaacctggacccgcaggcagacccagaccaggatccgaacctggacccaaaaccggacccacactcggaccaggacttcgaccaaaacccaaaccaggaccataacccgaacccaaacactaaatcgaaatcaaaattgagactaggacccaaacccgaacatggacccaaataggcacctaacacccggacctggattggggacttagacatgagcctcaaaacctagagctagatcggaactcaaaactcgagactcggacccgaacctggacctagactcaaaccttgatctagacccaaaccaagatcggatcctgaatccgaactcagaccaagacttgaaccccgactaggtcttggactcatatcgagacctaggactcggacttggatgggggacttggacccgggacacgggcatgagagctaggattgagacccacgacccaaccccagacctggaccctgacctaggagccagaccgagacctaggacctgaagtggaactagatagggacctgagaccgtgacccaaatctggacttggggcttggacctaacccgtagtcagtgtttggatctgggacccataccccaactcaaacccagacccggactaggaccaagacccagacccaaacccagactcgtaccctagagttgggtccgagtccaagtctaggtttgagtccaggaaccggaatctgactaggatcgaaacccagatctggatcgggatgcggacccaaatcaaaactcagataacgactcgggacacgaac

SEQ ID NO: 327309 - DNA, 879 bp, Cannabis indica
cccttaagttcattgtaaagggaggatttttgagttttttgaaaggaatgaaatagcaacatcttgagatataaaaagtttataagatccatattctaacatttttgaattaagttttcttttaagtcttagtttaaaagtctaattatatcattagcgagttctgaccgttgacaatatggcgccgtttgtgggaagtgatagtaaaagcaacgtcttttccttaccaagactcattgagaagatgccaagacgttctcgttgtcgttaggatgtggaagtgggacttgatagccgtcatttgatcgcttcatgaccttttctaccaacatcaaccgccgagaaaagaggtgcaggtgatcagatgcctcagagtggtcaaggacctttagtagaagaggaaaatgggcagcctaaggacaacccaataaacaacccactagatgaggcgactgcctccatcaccccggaggaagacaacggaatgcgaaggttgaaggctccgtctcaccatcgaccagggaaggagaatcgagcctacttagtgagctctagatcacaagcccgactacacactgaggagatgaatgagcttaggttaagtaacttgtgactagaagaaatggtcagaaacatgcaaatggaattagaggagctccagagaggccgttccgaggcacccttggtcaggcgaatagggctaaaaacagggaaaaggtgagcgagtaggctggaggatgggggagtatcaaggtattcaacgaataacacccctgaatcctccccgcaaagagcttcaaccagaaaaaatccagaacccttatcacttgctgtgtgtgggcactactctaacactaagaggttcgaaattattcaagg

SEQ ID NO: 327310 - DNA, 808 bp, Cannabis indica
atatatacttgtgttcacagcaagaataaaatttgttgagacaaagcgaaatagcacaaactttgttatttgagcaacttttgattgaaatggaaatgaagctatttttgggtggacaaaaatttgaatcaagtaaacaaataggttgacaataaggtgtggtgaatggcaattccctaataacaaggcccattgcttcctcacccactcacctcaaacctatatgcgaacttgtgttgtaaatgtaatactatataatatatatacccatctcatcgtaccatatataaaattactcattttttccaatgaaacaacaaggagattgtgtattcatgtggacaagattcgttgcaatcaccacaattcttcaggaatgccataatagaaatacgtttttcaatcaacagaatctaagaaagccattaaatatgcattaaattagggctttttctttcggtgagattgacctcatgatcaacatttcttgtccccaagcacgtgaaagccaacaaaagtactaaaaatgtgtcactactacataacttcattacaaattagattatattattacttatgaggctatatatatttcataattaatatgccttttaattattagtcacttcttaagttgaagagtttttttttcagagtttttgtattctcaataagcatatggctagtttcatatttattattatttttaagagtattggtaatgggtattagtggtgtttaatattttttataggtggcgtttcaagtactacaaaaaaaaaaaggcttatctcggcagccctatctc

SEQ ID NO: 327311 - DNA, 1558 bp, Cannabis indica
aatccaatactgaagctatcgcggggattgaagctcaaagatcaatggctggaggtgctttgatgtttcattgtatatatattattgatatgtttatagtagtttccgcactacatatcgtatatatatgctatatttcatatactatataatatcgtctaacagttgagttgtgtattgaattttgagttttgtatatttatttatttatttaacattgttattctaatacaatttgttttagttttgttttggaatgtttaagattgtatttcaagtttacaggttgaaactctagttttttagttggacttaactgggctcatacgtgcggtatccttatttatacagttttttcaaattttctacctttggtgaccgttgttaataatggaaatgcgtatttcaatgagttatgcgtattgtttgacgacgttatagatttaattattatctaaatttttggagacaattttgtcttatgtaggtcgtaataagaattcatcagctgatggtttagcaaaatatactcttcaattaaatgatgagttattatgatttgaggaggttcttgcgccaaatgcaaatatttgtatcgtaaatttatgaataattctaatcattagagcagaagaagagaaaaaaatacagcacaactcaattatatatgaaaaatctacaatttaattatatgaaattttatcatagctacttctattggtacttgtatatttttcttcctacaatgttttcagattactttctacaatctctttaaaaaaaaattacacatatatcatgctacttatttaacaaaaaagttatgtttctattcacaacactttaacacaaactaaataacctatatgaaataaattataaatgctaaaatttaattttatgtgcaatctacaaacattaaagtcaaagatattgtacttaggtaatattttatgaggtaatttttattaaattttttatcttggttcttattttgtgtttatgagatatgttatttctgccttttaaagaaaatttatatttatgattacatttacttttgttataacatattacttatatagatgtccaaattactaaattttttctattaattatcattaattatatttattattcatctcattaattttctaatgtatgtttcatatatttatataaataggaaatcactccattgaaaaagtactaagaaattctcattttgtttctctttttctcttcttcttccttttttcttatctattctatattattcaacattattttgtaacacgttatccgtacgagtctttccccaaattctatattttgttagttcttgagttgtttcaaggtcacaatacacgaaattatatttctatatactcatttgactgaagcaatttcaaaaacctttttatctatatatctatataatatatgtatgtatgggtgactattcaatggttacatttttattgtaaccatcatggttacatttttcttttacctgtaatagcaggttactaataggtaaacattcctattttagaat

SEQ ID NO: 327312 - DNA, 907 bp, Cannabis indica
tttataattttatttgtttttattaataaatatatgggctcattcattatgtttcaacaccctttggttgggaccaatctcacctctaaactcgtgcgctctattaatgttgttttctttttctaatacaaagtagaaacacaattctgcattcaggtgtccccttgttaccatagaaatttcttattgggtttcagtcatttttaatactttttaaaagtggtattattaattatatattttatattcttacattaaattatataaaacttaaaataaaaatccagtagataatacgtgagcaatacatcctttaattccatctctactacctattcataccacacctttgcctcattctcatttaatacctattaaatttaagtaggaaaatacccattagttataagaaactcgttgaatacctatttatacaaggtgaatgaaatttgattgtgacaattagtagtgttgtgacttataaggaaaaatattagataaattgtaatgattctgagactgtacaagtatgagcttatataattgaagaatacttaaataaattgattaataatacttgtaatatgctagagttaaatatgctacaccgataaaagcttgaagttggatgttacaccgatactatttatagtactaataataatgtgacacttcaaaaaatactatacaccaataatactttttaatattttttgctatggtatgaccctaaattaataaccttatttttacaaatatcacaactaggaatggcaaattgggacccgatggggcagtcaatatcaaatttattacaaattgtatttgtatttgtgtttaattaattttttgtgtttatgttttttttagagcaatttgcggcgaaacccctttatgttttgatttt

SEQ ID NO: 327313 - DNA, 1123 bp, Cannabis indica
gcccactcaagttcattaccaacccaatccagctggcagctgttccccacatcttttttcctaaatctcctttaacggacaaaatagaagctcgagaaggtatactaaaacctagttcactcgctgagtctctaagcatccatggctaaatggtgaaagtgcctagccaggtaaattcgtaggttcgattcctgctggatgcacttagaacgttcattccttgtaaggacaatcctacatctaaaccttgttcttgcagttggttagctagtgtcaacatacccatcgaactacctttcattctgatcatgactttgaaaaaagaaagaaggaaaagtttttttacggatagataacacactagggtggaaagggaaggctgcttctcgggcaaggttagttgctagcgaggaagcatcaacatatatacgcgtacacagatgaagctagggcacaaagaggatatagctagcctcatttcgtcgctcttactgccctctaaaactcagttgagcacaaattgcctttcctgagactcaagccccaactcacttatttgcaaacaagatcaaaggtaaatgggtattgccaccaagaaaagattataggctaagtgtttaataattgaaacatacgagagtttgattgaaaatttttttttcttttactaagttttgataacttgatttatctttttgtactattaaattgtttttttttaaaatttgttatcacaactttgttcttttaattttatgttttctttttgaattagtaataattaaaaaataattataaattgaaaaacaatataaaaataagtttttttaaagcctgctaaagacatgccacgagtaccaagcatcaacatcagtaaatacaaatgcattaattttctatttttttttgaaggaaaatggtaactttattaataagaagattgaaccattacaatagaaagaaaatcagcaggaacatcatcctcactaaaaatacgatctggatacaaacaagagctacgagcaagacaatgtgcagctttgtttacagaacgtttaacaaaattaattgagactaacgacaaatcggccaaaagggaacgacaaaccgccacctgaaggcc

SEQ ID NO: 327314 - DNA, 572 bp, Cannabis indica
ctctctctctctctgtctgtctctctctctctctctctctctctctctctctctctctctcatattttctcacatcagactcagatggcacgtccacccacacgagccccgtctgacacgagctgccaaggaggagatcgacagagtccaaaaactttcaatcaatttttgggtgtgattccgagaccattttctataaagagcagtatgatggggcttagaagctctaagagaacaaaatccctcaaaaattttgggcattaacatcattggaatcggcgattgaagttcgccagaatccatggagttcaagatattcgactccgatctagtcgcttttgaacctcgtgttgaaaaataggctatagatccatgttctccttcaaatgggcttctcgatcctatgattcagtgcccctttcatcattgttaaacctggacaacaccgcacgtgttctccagcgatgaaactagtgttcagttagctttttctctctcacccttgcgattttctttctctttaatgtgaatattttttttcttgtggatttaatttgtgtttgtttgttttt

SEQ ID NO: 327315 - DNA, 835 bp, Cannabis indica
aaagagttttatttagggcataaaacccaacaataaacccttgtaaaatgcattgtttatcaatgttaagaacaaaataatgattattgtcaaaattgacagtataccttgatcacaaatctgaataatgctaagtaaattagcttttagtccctcaataagcataacatatttcagccttggtaagccttgaaaattgagagttcccataccaattacattttctgctaaaccattgccaaatgtgaccttgccacacttcattggcttgattttcaccaaaaaatccttgtcgcctatcatatgtctagaacaaccactgtcaagatactatatttgagacgcaacacttttatcaaaaaatcaagcaagatattttcttttttcaatccacttttgttttggagcattatgtttgttttaaaaaaatttcaaaataccgaaatattttaatttgaacaaattttgcatggtgaaaatgctaggtcggatatgtcccttaatgccacagaaattacaaataggaataaaccttcttacctgagaacttactcttcttgtgctttctaaagattttgttgctgcaaatgacacctttgaaacaacagaccttgaatttgcagtagcaggtaaattcattgttacactaaattttacaaattttactttttcagaactttcagtgtcctttgatccaagaccaaccaagcctctttgacctgcattctaaatttcctcaaaaattgaagatccagggttaagcatttgaacattttccttgaaatgttcaagttccttctttaataaaataatttcctcatctttatcacaaaca

SEQ ID NO: 327316 - DNA, 2579 bp, Cannabis indica
agcataaaagtaataaaaaaaaaaaacctatctcaaattaaattattgctatttaaattaaattattaatttaataatgctattcaaattaaagtcctttttttttaagagtcaacattacccttctaaagattagttatattattaaggaataatatttctattgaaaaaaagacaaaccctcaaaataaggagagtaatatttcatattatcattccattctaaatagccactcaaataaaaaagaaagaaaaagagaatatttatattgagctattatttcaagtttttgttttttgaattaaaatcttgtgcattaaaagaaaattgtacaatacacacaagactaaaggaaaggtaaagaaccattccacactaactcattatcaagcccaagacccaacttagcaatcctatgagccaaagaataagactcccttctagcatggaccaaattcagatttgggcagaaagataataagttcttaatacataacaggagatcatccaaaagactagagccccaattacaagagtttaacttatccacaatagatttattatttgttttgagaacatctacagggagatgaatcaatgaagcccactgtaaagcttgtaaaattgcttttgcctcagccaccgcagggggcacacatcctgtaaagggctttgcaaagcaagctataacctgatttaaatgattcaacacaacagctccaatgatgtatttcttgcggttaatatcaatgggagcatcagtaaaaatttggaaagaagccacagaagtagtctcttgcaaagtcggctgatatgtgataggagcacttgatgaggcaggaacctgctgtatatccaagtacttaaagaaaaaattaacactccgatcaaaaatatcatgcgggtgaagagactgctaatgatgaaagattttatttctttgattctaaagagccaatgaaaaacagtaaaagacacagatataatctttatccaattcatgagtagtactaagaaaaaaaatcatataaacttagatgcttaaatttataataatatgtagcaaaccttgaagatttccaagctatcctcgatctggaacaatctaatagtgcatgcttgacagtgttagggtaaagtttacagagaggacacaaaggagagtcaacaacacattttttatgaagagaagaagctacaagaatggcatttgataacattctccacaaaaaactttaacttttgggggtattttagaagtttagatttttgaccaaactttcttagaattggaaaaagaggaggaagagggaatatactatttagagaaagttaagtgatacgcagatttaacactaaacaccccagaactatcatgcccccaaataattttatccatgccttgcaagcccgaaacagggacattaaggatatcattaaccaaagtttcatcaaagcaatttgtaagtttagaaatttcccaatccccagagttattgataaaataagagagaaagggggatgaaggaatactatcagagttaaagaacttgactcgattattaggaagccaatgatccttcatagttctaatatggtttctatctctaactttccatataagtcccaaacttaacaagtcatttccccataaaatgcttctccaagtgaaagagggattatggccagggttagcctcaataaaagaagtacggggaaaatatctggccttgagaactaaagcaagaagagaggtggggtttttaaagatcctccaagcttgcttagctagcatagtttgtctaaaatgatttagagaacgaaaacccagccccccaaaaaatttggactgacacagatatttccaagatttctaatggatttttttagaattcccagtagatccccatcaaaatctggccatcgcagcttcaatacccttacacagcttaaccggcaacctaaaacaagccatagcataggcaagaatagcatgaatgactgcctttagcaagacttccttaccagcctgagagaaacgcttagcagaccagccactaaccacagaattaactttatctctcaaaaaagtaaataaatgatacttagatctaaaaagacattgaggaagacccaaatatttacatataaaaagtctatctttagattgaaagtattgaaaaaaaaaaagagtgtgaatgtcttgctgagtattagaaaaaaggatagaggactttgagaagttaatagcctgacccgaagccctagagtaaatattaaagacatcctgaagagcagaacatgagcttcaattggcagcacaaaaaataaggttgtcatccacaaaaaacaaatgggaaatagaaggagcagacgtagagatagaaattcctttgagtaaacctgcttcttgtctaaccctaagaagaaaggataatccttccacacaaagtataaaaagatagggagacagaggatccccttgcctaatacccctagaaggtttaagggagccacagtgttacgaaaattattaaatactacgcaagtgaacgcaatcaagtagtatactcacgca

SEQ ID NO: 327317 - DNA, 1104 bp, Cannabis indica
ttgcatgtgctgccttggatagaacagcgttgggatgaaatctaactgttggatcggtaggtggcatatttcccatatgacatttaagggcgtcagattttacgagctgggccacagatgcgtgtcaccttagggctttcccttttaaatttctcttatccttagctattggatcattcggtcaggtacacaaggacatccatgctctatacgatagcgtgttgtgggggagcctgtgacgtcgtacatgaaaagcctagttactaggttcgtattttgacatgcataggcaagggttccgtgggctaaagtcgtagcccggtttaatgtgtctcaaaatgccttggccctcttagggaaacccatactcttcgtgacaataaatgactttagttcctagaacggagggagaccttggcttacggataccctcggtgtagctagaagttagggaactccccttcacggagaccttcctgcgaagttagtgcctttggcttcctggagcatagattgaggaagttgggcagctgatgatttcttaacctttcttgattaaaaataaacgtgtcatgattacgaatatgcgaataacatttacctcccaagcactcgaggcgtaacatggtttcggagcttgtaacatcttcctagatggttttgagcatgtgggatttatgacgagctccttatcacactacgtcatcagccaccaattgaagtgtcatttttcagaaggcataatttcttctaggattttaaatgctaacttttgggttttctgcgcgtcatgagcgcgtgttctgtgggatgcccaaacatagtggagattggatttgtgcagacttttcatttgctgaacacttttctcgatgcatgcggtgatgaaaactaactgttgggaggaaatataccctcttggcttcccacttatccaactgtcagatttctcttgggcaagtgagtcacaccatttgcttctcatggaaggtgcctcttcttggtacccaatagataccttcaacagccattccacactttttattttttctacctaccacaccagaagtttttattgaaattaattttacaaggatcttagat

SEQ ID NO: 327318 - DNA, 861 bp, Cannabis indica
ggatcgacctcacctgtgtgagatttatgacttgattgcgtatacttgcgtagtgcttataaattatagcaacagcctccctccttccactagtgaccagtctgtaccgtccatcgtcgtcgcttatggcactggtgaacgccaactttctttgctcccatattcttcgatcgtgaccgttatagccattttgacattgcaaagagtgacttctactagatccgtgccaaatccagctagagtcacgaacgacgaagataacatcggaagtaacatcagtcattggagctaagataattctctcccccgttggtgttcctcgaactccattcatggccgcagatctaggatccacaacgtccgatgaagccacgccgatcttcttcgcctttggtgttcttcgagctccattttttccatttttagccacagatccaagatccaccacacctgatgaagccaagagtatcttttcgacttcggtgctctacaatctgccgtcgtcaacatagaaggagtatgagtcaattgcgatttatgaggatcgaattcagttgaaatgtcaccgccgacaagattgagagccttctccaatggcttcgtgattctcactagtttcacaggaacttcgttgttgtttctaatctccgacaaaataggtggtgcctgagctgagggagccatagatgtctctgttgatgagcaatattgctcaactctagcatctaatttctccctgagatgcactttaaatgccttcaattgagcatctaagaattgatcaatacggctgttgcccctgatttttcccaatatacgtggaccaaccgaataaggacacgtggatcaagcaatgtacaa

SEQ ID NO: 327319 - DNA, 1187 bp, Cannabis indica
aggtacttgtaaaatgaaagttggggtattttagcaataaatatcctttatcactattcaaaaagttttgattggtcgggtgttgttatatttaagaattatgtgagctcctaagactttgtctaacactttatacatttccgaaaatgacattttattattgctgaattgactgtttttaaaaatatgtagctatgaagtattaagggcactgtcttttgacgaattaagagagaagatttttttaaaaaaaaaaaacgacatagttaagggtggtggttatagtaacagcgaagcaacacatatttataaagcttaaaaggccaatcaattgagctgtcaaacaagaatctatgatagtaatctccaaaacaaaaaacgtaaggaacacataattaatacaaaaatatgatatgttgacatatttaagtaggtatgaacaaagattaataatttataaagactaaagtaatattattctattgagaaaagatatggcaaattggggatgccaatgccaagaaggaatcaggtcctttgtttattcactaataaagtggccatgttactaataattcgaaagtaaacacatcaatacaattaatgacaaaaatagacagttaaaggtttttttattgacagaggggttttatttgtttttctaaatacgtttttgtttctataaacaataccatacattaaaagtactccttaaagacttggtgttttttggtccttgacttggaagttggaacttacaatgggttctggttcaagtccaggaattacacacaaagtaatgcaaacattttgtatgaaagaccagaaagaggaaacgaatcacaagaagatccaaggagaagttgttttaatgaagaagaacataattatacctttaaaaacaaaaaaactcacacaacagtgacaacacataatctaaacaacaaaatttgtttcttttttccttttttaaggaaaataagaaaattgaatagaaatgtgggggctaaacaaactgtgggattgtttgtacactgattatttagagggaaaaagggaagaaatgaaataagtagcaaaatatgaataggagaaagtaaagagagaggttgatacgatgatgtcatagtgagtgaccaaaagcaaagaaaagaagtaaataaggtgagtttgaagagttcacatgc

SEQ ID NO: 327320 - DNA, 713 bp, Cannabis indica
cttcaggttagtgctttcgctcatcttttatcatcatcttcttctttactttagcaaaggttctatatagacttatgatttaagattttctatattaaaatacttttaggaatatgtttagatctgtgatatatatttcttgagtattttataaatcctaacaagtggtatcagagctaccttttgctaaattaattgaagatttgatgatttcgtttataaaatttggagattttgaaaattagggtttttatttatttttgaataatttttccgatttgggcttgagctttagttgatgatgttttctttgtaatcgtaaagtttttaatcccttttataatgtattcttgataatgttggcttcataagattatttgttggaaagacatgtggtaaaattcatgatttggttacttttttctaagggatcgtttgccatgatattatactgaaaatcattataccaagatacacatatataattagacatttttatgaaattctggaaataataaaatttaaattttggtgttagtttatatttagtatttgaataaattaattgaaacaatatgtcgtcaaagtgatctcttttgtgtagattaatttatttaaatattaggatggttgtgtgtttgtaattgatgcatatattgactaacccaaaggcaagtgaatattttgctaaattttaaacatacctgtggcaa

SEQ ID NO: 327321 - DNA, 1600 bp, Cannabis indica
agagaaagcttcctctaaatcttcattgtggctcatggatgtctttgactttaccaacatatcctcgacgtatacttccatatttttccctggaacatctttgaacctttgagcatcttgttgacaaggcattgataaagggctctagtattttttaacccaaatggtatgaccatgtagaaataaatgcctttatcagtttagaagatagtgtgttcctggttaatcatgtgcattttgatcaaattatcgccagtgtgtgaatccataaatcttaaaagttcataacctaaaagcatcaaccattttatctatcacaaaagtgggaagcagccttttgggcaagccttatttagatatatgaattatgcacaatctccaagttctattaagcattaggaccaacattggattactggatataaagctttttggagaaactctatattagtcagcttgtctacttccatcttcactacttccgctcaaactagatctaaggtcttctcttctgacaaactagttccactgcatgatttgtgtttggagcccgacgaatcacgtgaaggctaattccagtcatgtcaaaatgactccaggctagcacatcactgtctttttactgttgatgaggatgatcttttctttaccagccagaggtagattctttcccactttaacgactttgatggatcttcgtcattgatgtatacttcttcaatctgctccatttgttcaattattctttccacgcctacacgtggatctacatcttcttcccgaaccacccccaatgctggtttggtggatgttccaggttcttcatggtttctttctcgaaccatcaaaatagttttggtcgagacattataacagcttcttgtatttttttttatttcctttgattgttctaatgcttttagtatcacttgggaacttcaaacataagtgatgaacagacgttacaactctaaagtcaactaagataggtcatcttaggatgacattgtaggctgttgagcaatccactaccaaaaaattacaatattgaaaactgacaccgtgttgcttctaggaacaactccgttcaatgtaactggaagttgtatttttctcattggttggagtgtgtctccattgaagccttggagctaaatcgaataagatgttaggtttgtttctaccagacctatggctttaaaagtttttttgaagagaatgttgactaagcttctgttatttacgggaaatctagacattctcttgtttgcaatttgggctgctatctctaatggatcgttatgtggaaaacttacatgcttagcattgtcctctacgaatgttattggaaaattcatcatttgaggacgctatgtaggtgattgtactagattactgttaggctatttttagcctatattttggatcaactttatgttcgtttttcgttgttttaggacagaattatgcttgttttctatgttttcaggttcttcggagcaatggaggcctcgggttgcaaaaagtgcaacaaaagatgagcggagccaagaaaaatgccaattttaggcttaatgcacttttggccgcggccataact

SEQ ID NO: 327322 - DNA, 1576 bp, Cannabis indica
aaaattaaactaaaaaattatcttaaatgtcgaactagatagaaatttattgaaataatcatttaaagagtactgtacagtttttcttctttttatatgattgttattttactatatgttttcatcttttcattaatctattttgcacaattttaataaataatgaaacatttatacctcaattgtcagttttcttagtcacaaataaattttagggatgaatttttacttttgtaggttataaaggtttgatttattattttatttaaataattattttataaagatatgtgttttttttttagctgtaaatttcattcaactagatcaactcaacctcaacaatattaagaacatcaaaaaagagattatactacaaaaaaatatgatcaacatataagcaagatgctctaaccttaagatgagaagcctgattagtagagtgtttgacaaaacgtaaagaaacatccctaaaagaagataaaattgtttacaatcctcaacgacactaccaaaagtggatgataaaacattcaaatttctaacagcttgtaccaatactagacaaacagatttaatgatactaacacctagaaaatcgtgcttcaaccatgataacacttccttgagagccatggcttcaacaatctctgaaaagacttgcccaatccgtaatttcataatcccagccacgacttggcccttgtgatcctaaacaatccaccaaaaccatcccttccctcctcatcaaacaatggagaatcaatattcaccttgagtttttcataacctcgtttagaccatagctcatctccatccgaaagataccaagtatcaaacgcaggaaacaaacttctttcttaagctttcctccactgatcaagagtgatacaagccaaattgacaacgaattccaaatcgcccaaactaacatcaccgcctaaccactttgttcctcacccaatcgtgagaacaaatgtagaaaccaggtcccaaatgatcctggatcaattggaatcatagccaaactcgctacctgccgataattctacacaaaatcacaggtaactaaacagtgaaaaattaattcacctgtcccatgaaaaatcggacacaacaaagagacatccacatgtttattcttcaactaaactctcataggaagacacccactaaccgccctccatacaaaatctttttcctttggaggaagctttaacttccaaaacgccacaatctccttgtcaacactaccctcatagtttgcttgtaataatttaaacacactttaacagtatactcaccagaagattgaaccccccaataccagtaatccttagtaattgaattagaaggggaatacaaggaatcgtgcccgccacttcctcatcaaacaaatctttgacagcataaacatcctaagctttctcacccaccacaaaaaaaactactaaccttttcattatcctaactaggatccaaactaccttgactcggaattgacccatttggaagccacaaagcattaaataaaagagtctcctctctattactaatatcccttcacaccccctta

SEQ ID NO: 327323 - DNA, 1366 bp, Cannabis indica
ctaaatcacttataatgtttatcatcatagtcttcatcgtatatattacaaaacatttcttgatataaaatatttgaatataagaatcatacgtatggtcagattgaattttcagccatttttgtttttgacgaacaattttttttttctttttttaataaattaagacatgtttcccttctctttgctgagtattttgtttaatgagctgaaaacagatataaaaatatgaacataaatattatataattattcttttttggctggaagaaacattataaaattattttcatataaatatattataatattttaaaaatatatataataatgtaaatatccaatatagttgactgctacaaatataatattgtaatattagttcccacgtggctttaatttttggcctttgataactatctcttctctactcaatcgccttcatacgctactactttcatttcgctcatttttcctttaattccaagttggacttttcttttttcttttctttttgaaaataataataataaaattaaaaataataaacaaacaaccaaacaaacaaagactttttcaatttcacatggttgttctaataagatgggcaacccctatttttgaatacaaactcaatctattatccttttacttcttttttccaattgtatatttatttaaatttatattattgaactcacaaataaaattttgttaatgatgtttctctttaaaatgatatttgacaagatttttcttaaattaaaattaattataatattggataatattatagtaatagtttctcagaaattggtgccactatttatgtcataactttgtttactattataatttatgatttaataataatggtccagagattcattttcaacattcattagctggcacatccatatttattataattcatttttatttcttattgaatactattattctttattttggataagttttcagtgacatgcatgatttaccaattaaccatcctagttttttttgttatcttattatagaatattaccgttttaatgtttcagagcatgtggacatgattcaccatatattacatttttctttttatagacattcttgttttgtttcaattaatttgatcaactttttaggaaattaatttattaccttcccaagaatttattattttcctgcttttagcaataaaaattatccttaaattaatcaaataattgctcaatattatccaattttttatttggattggatttgaaacatatagtggaatttcatttgatattatatttacttaaaatgatttgcccaaatcattgaaattattagtgcatagactactttttttttt

SEQ ID NO: 327324 - DNA, 813 bp, Cannabis indica
tatggtttgcttgaaagtcactaaagctgcggactgggagccctctttatcatcttaaatctgggactgtgaaaacaaatgaattattagctaattaattaattaaggtacgtaatagtacttatatataaagtaacttatggaaaaacaaaaaataaatacaagtataattaaatggcaatacgtacggcaagagcttaacgttttctaccattccacagtaagaaaagaagtcaataaggtcgtcggaagtggtggccggagaaagattaagaacctgaatagtcaagttcaggcagagggttgccattgctattactgtattattacacaatcagatattcacatcatgtgcgctctgctcttatatgctattattattattatattaacaaacccaatgcaaggaacgaaagagaatccaattcccccactactattaattggcatctaatccctcgcgactttatcctaacatacaaatcagttacaagtggaattttcttgagtggaccaagcatgtataatttaatgctaattaacgtacattgtaaagatgttaattctcttttttttttttatgtttggttttttgttttaattaactaattaaaaaaatatatttatatacatcatatactaattttttttaaagtttatatttatacttttaacatgcgaattttttgatttataatttttctatttttttctttcttatttattaaaacttcaatattttttttttttttgttatttttttttaccttaactcctttttttttttttcattctttttcttatgtcctaggt

SEQ ID NO: 327325 - DNA, 2808 bp, Cannabis indica
aatatttaattaattattttaagaaaataattaattataattaattaattctaaaaaatgaatgtttacctattagtaacttgctattacaggtaaaagaaaaatgtaaccattgaacagtcatccatatatatatacacgtttattaagtgggtttggcgtagataaggtagagagctattaacaccgtctccaatagttataccaatttgcactacaaaaatttttacttttagtcacaacaaaatttatgattaaaagtaaaaaagttgtgtctaattataaattataattcatatattgtgactaaaaagttcgtggctaaagatattagtcacaaaaattataatttattgtgactaaatatgtattttagactaaaactaaattagtgataacttgtgtcaaaatgctatatagtcacaaataatttttgttgtgactaaagatcaaatttagttacaaaatatttatgttgactaaaaagttatcactaaattaaagtaacatttttttctagtgttggtttgaaatttatactaatttaatgcagaattttttactaattggtgcaacaactttaatgatttacactaaatattctattaaagaaatatattttacttaaaagatcttgtattttatattatttacattaataactcaaaatagctcatttatgaaataattagtaataactatatcatagctactatcatggctattagtaagaattttaaatcttaaaataatttagtgaaataaaatatttattaaattatttaagcactacagattttttactttaaaaaatcttattgaggttctttagattatactcaaccattttcaaaatgagcaggaaaaggattatgtaaaaaagagctcataatatcaagcatctcaagaatatcaatatttaaaattcatatacactatattttgatattcttcaatgctaagatctaaaagtgattaattttactattaagttattattttacttaatatttttagttttacaatttagttttatgttatttttattttattagtattagtattttttaatattattttgtatttttaaatatgttatagtgttttaaattaattatatttttgtaataaattttaatttgagaactaaaatgtaagattatattttaaaataaaataaaataaaataagtgttagaatgcaaaacaaaaaaatacactacaagaaaaggcatttttaccggagcagttcgtcaaatgcgtcggtaaaggttgtcgacatagagagaaatctgaaattccacttgcaattaggcttcgtttttgtcggggcattattgcgccggtattaatacgttttgccgacgcaataatgaatatgcgccggtaaaagtaagcaaatgaagggccaaaaggcgcgagaagtttgctgcctttcatttcatttattatggcgcttgtttgcttttaccggcgcatctatgcgccggtaaaagtctcaaaaagaaagagggaaacttactgcgtggatttccttggtaggtggggatactttaccggcgcacacttgcgctggtaaaagtattaaactaaatgtgtgtattttgatatgataaatgggatacttttaccggcgcaaatgtgcaccggtaaaagtagttaattaaacgagcgttttggctggttaggtcaaattttttaaagatacttttataggcgcaattggatccgccggtaaaagtatatatacctatcaagagcacgaagcccccttcttctcccccattttttatttttttcaggtcttttcagagaaaacctctcaaccccctctctcaatctctcttagattctctctctttctctatcaatctctctcaatttctatctcattctctcgatccctctctttttttcttcaaaaaaaccaccaccaccacatccgtcggccaccaccaccaccacgaccgtcggccaccaccaccatcgacgacgatcaagctacgccagccaccaccgcagaccaccaagccccacctcctccaatttatttaaggtaggtttaattttttaattttaatatttttttaatgtttatatgtatggatttgtgtatgtatgtgtttattagtgtatgtatgtgtatatgtatgtattttggtatgtatgtgtatgtatatttatgtgggtataatgtatttatgtgtataatacatgtatgtatgtatgtatgtatgtatatgtatgtgtatgtggtattatgtatgtgtatatatatgtatttgtgtatgtatgtatatgtatgtgtatgtgtatgtggatgtggatgtatatatgtgtaatgtatgtatgtgtatatgggtgtatgtatatatatgtatatgtgtatgtggatgtatatatgtatatatgtatatgtgtatgtgtatgtgggtgtatgtatatatatgtatatgtgtatatatatttatgtgagagtatataggtgtttatgtgtgtatatgtatgtgtatatgtgtgtttatgtgtgtgtgtgtatgtatgtgtatgtgtatatatatgtaagtttaagtataagtgtatgtatatatatttatgtgtgtatatgtatgttgatattttaattattgagttttatttttatgaaattaggtcccgtttaccggcccgaagcaccgcctcctgcttgttgttgtcatttttggactgcttcaggtttgtttttttttttctttatattagtaattaatttaatagttttgttataagttagtatgcctatacatgttagtgaagtaggttctgtgat

SEQ ID NO: 327326 - DNA, 675 bp, Cannabis indica
aatttttactttttgaaatttttgtttcacttcttggagtctgtacttttagaagcatgaagttttcttattttttaacatgattcaacttgtcatttatccaagtgtggtaggaagttcttacctgcgagccccctaagagatccaatttcaacagcctgaacctgctgaattttcacttctaccccaaaacctaaaggtaaacatttacacttaggaaaaattttaaatctttggacgtacatacctatatatactatctcctaagtgatcaaagagcctgggcctttggtcacttgcgaaaacataaattcaaaaagattttttatttttcttaacatttatttcttaatgtattaagcataagaattccattcatacatcgccttgagttgtgccctaaggcttttatttttagaaaaaaattacaatgaaggagacaaaatagtagccccacacccctgatctattaatagtaccggcgtaggtggtccacatttaggctcgtgaaattttagatccttgaagtcttttcaattgatatgttttattgtgcaccttgtgttgcatttcatatggtcctttccaactcggtcccaagacccccactcccgactcctgagatgccgaaaagactctccttaagacgagatctcctgtaaagaccgcttagtt

SEQ ID NO: 327327 - DNA, 1412 bp, Cannabis indica
gagaaaaaaagtgtgaaatgaaaagaaagtcttagaactaagaatgcttgcttgtacattatgagaaggaaatgttttacttatagtgattgtacagtcaaaatacaaacaaaaattctattataacagaattcgttacaagttatgacacagaaaaaaaatctaaccaacaaaattaactaattttttgaaatggcttccctatatatggtaaatgttgaagatagaacttgaatgataaattattattttgaaatagtttttcgtgctttttatatgtccaattgttgacttttactagaatattattttagtgttatttttatttggatatgttaatttgtgagttagatgtaatattaaattctggtgggataggatgctatttggttgtaaaaagaagttttgagcaatacaatttctgattcataaaaaaaaattcggtgggatgctatttgtttctggaaagtagtgtgtgttcacatgtgaattcattgaatgaaataattattgtggaatgtttttttactgtggtaaagtgaatataaacttttaggagttgtttcttttttgtttgtgtgttggtcttgagctgatttttttaatgctataattttttggcagacttagaatatgaatagttcacagaaatattgcaccatggtggaagatggtacagatattttgaagagaaaaagtatgaaggggtgagatcgattattttgattattgtgattggctagaaattcagcatgtctgaattggaaaaatttacagtgacacttggctatgatttgcctattcaactttggtggaggtcatatgggaattcaatgaaagatggtacacttcgaatttcagataaagagattagtctaatggcttttggtatgaaaataaaaaaaaataatgaaaaagtttataccttcctaattgttctagtaaaaactctagcaacagctttagaaaatagtaatatgaagttttcttgcacaaatggggaattccgtgatgatgttgatgtgcttgctgatgttgtagtgaatccacaacatgaagcccaagaagcccaacatgaagaattaagtcaaaatattcaccaagaagctaatgaagaggtccatgataagtacaaaagactaggcctcataaaggcaataagaaagttgccactgaaaatgatgatgaattatattcttatcacaaagaacatgaaacaagccttcaccataatatttggtggtactatgatattatgaagattgtgctctaagtacctaatttttctaaactggcctagtatgattttttttttgctctgtcacaaattgttgggtcaatccaaccgttgtaagatcactgaagaaaaggttggtcataaatttggagagttttgagttgttctgttttgt

SEQ ID NO: 327328 - DNA, 582 bp, Cannabis indica
taaggcttgactgaatgtatacaagatctacgaaattaacctccaaatctctaaagaataggtcataatggtttcctacaatcaagggattgagggaataaaccgtaagcattgaatattctgtaattaatattatttattcacttataaccatataaatagtgagtaatattcacaatttaaaggactgaattctagactttcaagagagttattacgctgcaaaatactatctctaatttatacaaaagaatatcaagaaactcactagaccatgttcttgtgatctttgtatatccaaaagaaataccaagtaaagggagtaggtcattaccaaatctggggccaaacctctataaatcatttgtgtcatttattgcttttttaatattattaattgtcaaacattatcattgtcatttaattgactctacatcgttgactaaaacaaggtcaatattttggtgctttcatttagaacttgatacgtctctactctcaacacaatatttgtgtttcatctatttttaaatcatctctgattcaagaacaatggttcaactaggagggctgcatccactg

SEQ ID NO: 327329 - DNA, 653 bp, Cannabis indica
cacatctaagaacactcctcaaatcacttaaccgaaaccagaagttaataccaattagtaaaccagacttttagaacatagaattgaataatagtctctctatttattgatttatatatctgaattacaagtaaaggaattaaactctacattacaattacatggtatttataggagctaactcttggttcaatagaaaccgacataggagtaacggtttaactaaccaattagttagttaaaacggttgcttatgtggcatattacaaagtcacacctaatctaacattatgctttttgtttcttcctctaaccataatcttaatattaaattggctttgatctaataacccgcgtagctttgccatcccaaaatcagaaatgtgagcattgtagaagtagaactcatcattctgaggctttatttatgtcacagcaatttaagaccctcaaacaaaaaagcttgctaaagtgccgttactctcatgaactcatactgttgtttatgatctgtcacatgcaaaccaaattcacacgtgcaaactaggagttagttagttggttgttcggttttgacagttaattctgttaactgtcatttttgatagatttgtatttttgtccattttattttcagcttgtataaatagctt

SEQ ID NO: 327330 - DNA, 1272 bp, Cannabis indica
tgttaagtctaactaacttaacagctggaaccatcaacttatgacctttatcttcagcctatatatactgctaacacttatcagttcgaggagtgatttaatcagatgagttttgagagataattttgaagagagattgagagttagataaagagagaggtacagagaaaagagagattggatttgagttttgtatgaaacctttgtagatgaagaagatttttgagtaagagtgtgagagaaaccacttttagagaactcaacagagaattgatcgatcaactgtaatgtactatcttcttgctcaatcaataaagaagatttggtggtgttccaaaagagtagagcctttaatcacatcaatctataggacttgaaccagtatatatcttggtgttgattttattgtcttactgctttaatagtttttaattttagataactctattcatccctattttctccgattactgtttggtttcattaatcttgtcattgctaattatttggtgattgaaattttagctgttttgattctgcactttagtcctaattttcccacaataataatattcagcttcaaataattataattattttttatatgattgcgtaactattattataaacgatgccaaaataattaaaataataaaatacacatatagtaattagttaatcaattgtaataaaaatgagcacgaatttgtgcctgtataaaaaaatagattagtctatttaagaaaaataggccaatgtgaataaagcacgccacgaaacaaccaaacgttccatgcttaccctataaaattattgcacgacacgtcatgatacgacctatattttttcatagtccgacataatacgaccattttaaaaagtcgaaaaaatataaatcgaactagctagtacaacacacacatacttactaggagtgtaaatagatcaggtcggatctgatccgactatgatttgacccaatccaaatcatgtaatgatcctccctgtcttgccccactagatcagatacccagattggatcagatccgatctgtctttatcttttattttttcttaagaattttaattttatatctaaacttataattttatatctattttaattttgtatcagtattatttaatacaatactatatttggtattgacttgtatcaataaattgtgtaaagttataatatatttctaataaataccccaacatcgactacgggtcgagtccgggtcccgggttcgggtctgggtcccaacc

SEQ ID NO: 327331 - DNA, 675 bp, Cannabis indica
aaatttaaatgggcttcctatatccatctaagcccaaaattaaatatataggctcacacaagtcaaataatttttcatcttatttttttcatcttacaatataatctttgtactttttaatttccatattatatatattaaaaaaaaatactcctactcctaatccctaactacttataaacttattataaattctaaaaaaatcataattcgtactctaaagtttaaaaaacaaagtccatacatattacctagttcaatgtccaaacaaaacaaaatccataccatagtctatactagattagggcaaaattagtaatcgagtttcaagttttgagttatcaaaattcttaaacttaaacctggctcggtatcgaaccgggttacaccagaattcaactctattttttaaactcatcttttttggggtttttagattttaggccgggtgtggatttaacgcgtgggtgagttttcgagtgtaaatgtgacacctcatttaaaactacacaaagtctgccaaattagttaaccaattgagtacaataataaattattcagaataaataaatcaatatatatagggtaaatagtggcataagtacttaaaattttatatttgtaagcggcataaacccaatgtttatttttagcagcataagtacccaatgtttg

SEQ ID NO: 327332 - DNA, 2007 bp, Cannabis indica
tatttttattttttttaaattatcccaactagctataaaagctccaaaattgaaaagataagaggtatattccattcaattccaatatatatcctttttataagctcattaattaatggtggtggtgattggtgagtatttatgataatatgtatcaatgatatatctatcatttagtgaaacataattttctgataatatatatgaaacatgaaagcccacttttaggtcacatctatgctcatattattagctagttggtttgaagtttcaactcaaaacagataagatcatcacatatattttatcctatattatgcaaaaattacaaatcatcatactacatttaattgaaacccaagatatttttctctttgcttttaattcttttacttttgaaaaaaaaaatattcgaagataaaaaatataaaaaatttctgaagtatctctttaatagaggggtatttcgataaattttttatccgtttcgacatctagatcagtttcttggtttaattttttatttttataattccgtatattatagttatttagtattacttataaatttttagaaaatgtttaccgtgataaaaataaagttaaaataattacttactatgtatataaaaaaaatagtagcgcgtgtaataaaatatataaactttattttcggcattgtaaattattcagaattttttaaaaaatttacaaaatgattttaaaaattataacatatacaactatgaaaaaaaattaaattaattttttttctaaataccgaaacaaataaaaaatctaacgaaacaacttttaaaaagtgtagaatatagagatactcaaaatatatttctactaatgacacaattgtgatttgacataatgcctaaaacattttaattaattaattaataactaagtaatatataaaaaattatttttagaaaactaccataactgtattcaagcacatttattattattattttcttttaattatatatatatttttggtttgatataaatttacttctattattaattttaataaatgtaacaatatcaataaaatcccatggtccaggattattaataagagtgacaaatgagtaatggagatagacaagagcatgatgcactaatttaagttctcatttataaaaatgaacaaaaaacaaaacaaaaaagagcaaatattgttttgtccaaaggtatacaaatttaggggtgtgcataaatcgatccaatctaatgagaattgatcgatccaattataaccgaccgctaaatattggatatccaattgtgatccgatcgaattggatgttatttttaaatatccaattggatcatatcggatggtggatgaggtgtccaaaaattcaatacatccaacatccaatcaaattaattagtattttcatttagtttggatgagtaataaaaatttatattgttatacgtaaaatatctatgtatatataaaaattaacattaaaattttactcttttttcttggataggatggatccagtctaatccagtacatactggacttaaaatattagatggatacgatccgattcaaaaaatactaggtctaaaatattagataaacctaaattaaaccaataaatatatatgaaatacatctcatggatagaactgatcaaatccatcatccaatgtgtatgaaattaattggattggatcagatgataaaatctaacatccaatatataattggatgatcagatttggatagacttaaaaatattggatgtggtccaataaacacccctatacaaatttagttgcttagcttgcaaaaatagccctacattgaagcaaagaaaccaactttgttgaattgatgttaatatgacatatatataaatatatatatatatattttaatttttttactttcatggtttatgttattttgagcctaatgcaaaaataaaaattagaatctctttatgtcaaaataataataataataat

SEQ ID NO: 327333 - DNA, 1503 bp, Cannabis indica
taaaatgtgatttctgatctttattaattagtaaatctgattatattaaaatcagttttatttagggaacaaaacccaatacttacttctctagtaatcccggtttagcgagattagattttattactggttgtgtagcgtgcataattgttagggcgttacataagcaatgccatatgtggacacgtgtctgtaaatgagtgcacctatggcgtcagttattcgctaataaccgacggcatagggttaaaaacccctgaatattttccacccccaaccgacggcatagggtataatattaatatctatacctacggtttttatcaaaaaatggcatctaaatgtcaatttcaaaccagacgggtattgccacaccctttacctttctttttttaaaatgggttaaaaaaaactctctaaatgcctatattgtagtagtgatgtcacacaaacaagactaaaagactcaaaactatatcatagagacaacactaaaacattcaaaactatatcacagagacaaaactaattgcagtagtaaaaattgaattacagtagcaaaacacaacacgactaagatgtaccatagccatgagaaggccagcgggttggttggagaaaaaaaaaacaatctctgataaatataaaaacgagaaatcttaatctttttcctcacttattccttcagtcaaaacacgatattgtatggtagaatatctatttgttttagtttattggttacaatcatataaatggtttataaactataatataaaacagtaggatagaatattccacatatacaatatctaaagtactacttatatgttaataaattactgaaaaaaaaaagctagtggaaaatgaacatgatcacatggcagtcaaagaatggcaccctacaagataagcaatttagttattaatctaaagaaacaaatttttataaaataattaatctgaaagtataatttcccatttgtaagataaattaactagaggataatgctccagcaagcccctagtactaatgccaaaaaaaaagtgttttatttatataataagaaaaagtagaaaaagtcactgatcatagtttataatacgaaagttgggttatttttcacatccaaaatgatcatattaaggggtactagagtcgcaataattaaaaatatatatatatagctgcacttttaatgataaattattttgagtttttaagattaaattttcaaatttttttttatttttatattatggggttgagattgattcattaactgaaaaaaaataaatgaaaaaaaaagtttttcggcaaaaacaataataaaaaaaaattgaatttgacttaaatatttttttatatgaacatatttttaatatggtgtaaaaagatgtattttttgatattttctttaattaagtagttaaaattaagcatagaaatttaaatttctcttttattattcgctatgggaccaaaatctaatggtttaatatttt

SEQ ID NO: 327334 - DNA, 976 bp, Cannabis indica
gggcacaaaacccaacaaaaaataccacaatagttataggtgaattttgacaagttagcatggtgtagtcataatcgggtattttagctcgaaccaagttcggggactaaaatttatgaaatgtatggttatgacaataacataaaatatggatggttatatgagaatatgtgtgatgtgaaaggatagaaatgcccttgattgcttattatgttgatttttagccatgagggcaaaattgtcatttgatcacaattatattaaagatgatatactcttatttctaaaaatttatagttgaaaaccccatttcttgtctcttgaagctccaccgaaccccctcccttctccttttttttttttccaaactttgttctttgttttgagtgagatttgaggcaaagtgaaggattcttattgtgtaaatgttggattaagttggagaagtgattgaggtagtaaatctcacctttttcgttagggttgtacataaatttttgtaaatcgcccaatccgaacaactcggccaaattaaaccgagataacccgacgaaaaatacaaactgaaaaacccgacgaaaatataacctgcctaatctttatattggatgggttaaaaataataccaacccgcccaatcaacccgaacaaccgattaagagaggtttatacatatatatatatatgtttttattatatataatttatatattatataatatatataaatatttataaaaaataaaaagttcaaactactatatttttttatggcggatgagttaaactttaaattcaatctttatatttatctcattatcacaataactaaaatataacaactaaatgtgaaaaataaataaatattagtgttcggtttggacgggttaacccgactaaaccgaccaattcattgggcgggttgaaattttttttcttagttgggcgggttgcacttagatttttataactcgat

SEQ ID NO: 327335 - DNA, 1060 bp, Cannabis indica
ttaaatgcatttttagtacaaaattatttattatagagtcttttaatcaaaacgaactttctctaaaaagttgggttctaccagactttcaactttttagcttcagttttttcataaatttttcaataagttattttttaattacttaccaaataccttttcattacatatttttttaaaaaacagcttttagcttttttcaaaagttgtgccaaactggcccttaaaggattgcttcaacatcttaggagagtatcgaatgaaacttaaccctcttaaatgtgcatttggcatccaatcaggaaagtttcttggaatcattgtcaactcaagagggattgaatcgaatacagaaaagatcaaggaattgcaagatcacaggtaaaagacgtgcaaagccttaccggatgaattgctgcacttagcagattcatctctaagtccacctacaagtgtgttcccttatttaatctactaaaaggaagcaacacgaggtgtgaatggactgatgaatgcaagtaggctttccaagctctcaaacatcacctagccagacctcctatcctatccaaattaatagatggcgaaaaattatatattcatctatttggctatcattaaacatgcaaccaatgctgctctcatgcgtgaggaggaagggatacaacatttggtgtactaagtaagcaattgtctcagtgggttcaagcctagatatatccctattgagaagttggcttactgcttggtattggcctcaagaaaactaaggtcatactttaaaatatcttgtaacttgtaaaacaaatatcaataaagatatgactgatgctgttccaaccgagatgtagagcattgtacatggctcgaattcattaaatcatggtgttatcttctccttgatttactgtcttaattcattatctggttcttgtgattctatggtattattcttgattgcgtgtttgttaatttggtgataagcaaagaatatgaaataaacaaatagataatagatatttataaataaaataatcaatatcatcaatatatatatata

SEQ ID NO: 327336 - DNA, 1742 bp, Cannabis indica
taattagagttggtcaaaattatttttttacccttctaatgatctcttgattccttatgtactattaattcagtgtgaacaattaatctattacttattatagatttagatccaactgttaacacttccagaattaacactataaggaaactaatatttaatcatttcagaaatcatggattccaatattttataacatgttcccaaccactcatgttattaagctaccaaaacagaagttgtaagaatcatcttttctaaaaagttttaacgagtgaatcaaagaactcaatgaacacaaataagagttcatgtatactcagaattcagacagatctactaatgatcattgttgtgatataaataactcttttatgataaacgacgtgttgataaaatatgttattacatatcggtctagtcatgtataatcaaattatacacaatacctttactacatctctatctacatatgtgaccgaatcaaaatcatacacagtagagtatagtgtatagtaaactgtacttagtagttctatattaaagattcttttactttaatacactaccaactagttctgaatttgcctaggtgtttgggattgcttgctggtgccacctcaaggctctccttccccacgattgggatctaatcaatcttgggagtccagaagagatgctttcgaggaacttgtaccataccctcatggtaagttggccgtattttttttgttcctcatatttacttgctcgtaattctccaggcttctttcctctcttttacctccaatcgacgattcttggagcggctcagatagttggagggcgaggtccaaaaatcactagcccaatgcgaggccgtgattaaacaacggaacgacgcccaacaggaagtcacccgcctcaaacaagaggctgagaagtcaaagaaagactttgaagaagccgggaaggccatcaagacccaggctgataaatttaagaaggcgctcgaggagaaggaggctaaactttaagggaaagaagctaaactcgaagggaaataggccgagaccacagaacaatgtaacaaggttggcctccgtactgtatattgagcatggatggaaaatcctaacatggacacaagcttcttagaggaggaggaagaggaaactttggcttactgtgagagggccaagacggaggaggaagaggccgaggcaacggaggaagaaaatctatctaagtctcccatgtaggcttggtttttatttatctttttttttgaattggccttagagccgagacaatggtttgccccttgtggcacattttgtaaagacaaaattgttggatggccaactttgctttttctttattttatcttttaatgcgtcgtacttttatgtttgaacttcaatatgtaattgtttgcttgtgtttcattcacaatttaaataatctattttgatcatgcattaagtttcttaggggtttctattgctcgtatttctctctgacgttaagtagttaatagcctactttgcgagcaatttatcatctgccctgcactcgattcgcgagcagtcattgattctgccttgcgattatcagtagtgtttcaagaaaacttgaatatatttttaatcaccttggcactttgtatatatttttattgcttacatgcattgacagacacacatgtattaatgtggggttatagcccccactaacaaaaatattatcttttaaaaatttaa

SEQ ID NO: 327337 - DNA, 633 bp, Cannabis indica
taatcactttgtcaaaaaaaaattgaataattggttaagatactttaaatttatatgagagaccatgttttgaattttcttgcccgtttttatttattaaaaaataaatgaagtataaggttcaaactaggatcaaacttatgaccactagaataggggatgctgctaaactatcattccaattaaatttagctagttatttattgttttgaattatattaaatgtataactaagctcaccttaaaatttaatcttgggtctgccatagggtattggtgtaatattattggatttttgtattttttatgtaaattttcatataattttacacatttttcctaaacgtgttattgtacggtaatggtaaaagaaaatgtaccggtgtattcttttcattgtggcaccaatataacttcaatacaaatctgatttcaccactcttcctaaatgactacaataaatccgaataaaaaaatatatgattataatttttttcatgtaaacataaataatgatataatgtgaaaaaagtaaagcaaaaaaaaatataatgtgaaaaagtatatcttataagtgaaaattacatcaaatatgggattttataaaaaaagttacaaaaatatggcatttat

SEQ ID NO: 327338 - DNA, 878 bp, Cannabis indica
taaaaaaaatttctcagataacgaaagagataagaggtcaatcggtaattttgttttaaagggtgcattgtaaaaacatcttaaaccatataaataatataaaggttttaggttttgagggcattttaacaaaataataatggctaattctttagtgcaatcctaatcgtaaaaaggggtgcagtttactttagttattgatatatagaaaagttataggcttaattttttttaatggaagaagctatagctttaatttttttatataatgatatttaatgtagctatttaggtttcggtatttttttttttttttttttttggtaaattctcaattattttgagtgttaaaagttaaatttcatatagtttgttgttctgttttttatttctttttaataagttatttggaatttgattcgataatctaaataatttaaaatggtagatatatttaatgagatattctagagaatttttaaacaaaaataataataatactattgtagatatatttgttgaattacatattttagggagatttactaattttttttacaattatacgtttcatttttaacatttttaattttacaaatcatattgtccataaataatactttattagccttttcaaataattatacttttttttcaaactctaattatttatgtgtttgaaacaaaaaattcagatgaatcaattggtcacaacgtttcgataaaaattaaaatcccataaaaatggatccccaaaaggagacttaccttatttctaagtccattacctcatgaataaaaatctttctgaaaatattttaaccataattgtgttaataaaaataaggtctaaaaatgtattttttaaaaaaaattat

SEQ ID NO: 327339 - DNA, 1308 bp, Cannabis indica
cttcgtttttttttactcttttaatcattattagaattagaaaaaagaagtgtatgtggctcatgatataagaagttatgagtattttgaatgagtattattacatttttttaaaaaaaaaaatataattgctattttatattaataaatattaagtaattactactataaaataatattttgtgaataattaacaatatttaataatttatctcgaaaaaaaaagtatgactattagtgctttttaatttttttttttatttctgatattaaagtttattgtaattttttttaatatggtgtggtgaatttttttaatctcataattgtaaatgttgttgctgacactttggttaaatttgttctatcaatgatatctttttagctcttagccctttagaaatttttgctctttctgaggctatttttgcaaaagaaaatatttttttcatttaaaacacactctgaaattatagcgtttggaattacaaatctaaatgtgttaaaaatcataattataaaatttaaaattgaaaataagtttatttttttttattatttatttattttgttaggggttattgtcaaattgggatgaataatggtacatggatggaagattatcaattttgtgtggtagtgagaggaagttaagagagttgtgtggacataaaattagcaattatataaagtggtttaaagtcaaactcatgaccaattaaattgacaattgagtgttgattgattgtgtgagccagccagctgcaatattatttcacctgaaaattttaaaatacatacaataattaatatagataatattagttccaattttattttacctgaaatttaaacaatataaataattatttattataatgtattttggtgtttgatttgataatagtttctctactattgcttttaggaaagaagcattccaatagataaaggtgtgtagaaagttattcgatctaattataattaattgatttaatagaatcgaatatttaattataattaaatcggatcagatataaattttaaaaatttaattggagcggatcgattattggataggacatctaattcaatagataactgaatcgaaccgattcaattatcatccaattatatatatttttaaaatacatttataattttatatatttaatatattttatttaaaatatatatattaattgatttaatatatatttaacacatgaaattaaagaaaaaaaacttagctctaaaatattaattcttatcttcttaaacgtatataaaattgtcaatgtgtattga

SEQ ID NO: 327340 - DNA, 624 bp, Cannabis indica
tattattactattaaaataaagagattttgccatgagtcacactttcattagtgtgtctacgtggaatctattaggataaaagacaaggatgacacattaacctcatcaaataacaattatattataataaagttttagttggttcatttcagaaaaaaaaaaagaagtttgtttgtggtttcaacattatttttacttctattttaaaaacaaatatgatatgattagattatattaatagattagtatgctgtcattttgttagattaattaagatttttatttttaaatgttgacatgtatcaaattatgtcttgtgaacttttttagtcattaaaaattgttcctgaactattgagattgttagatttaagaacatttgtccagtttcattcaattttactagttctgtgattgtccatgtactaaatcacactccttagactttgatgtcgactaaattatgctccttaaactttaacatgtatcaaatcaagcctcttgagcttttatccatattagactttccttattaaaattgaaaaaaattctttatatctaacaatctcaatagttcaggggatttttaatatctttaaaaatttaagaggcatgatttggta

SEQ ID NO: 327341 - DNA, 596 bp, Cannabis indica
ttcccaactccaacttccattattttacgctcctacattacatttaacaacaaacaaattatcgatttcttttttctccaatatttttcttttactggaacgtttctgttttccttattatcatttcatatgttggcaaacacatgtttttttagtatatatttgctagtcctgtattttttgacatttatacccatctaaaaatttatttttaaaatttttcagcctcctaaacaaaatttatggatccactcaatgccgaccctatatgattttggaccttagtcaaaaataaaaattgaagcccttgtataaaaaatgatgatgttgagattacaattcttaacttctaaagtattacactactcctgtatcatgtgacatgtcatacatggcaagttactagtagcacatgaataataaaaattgcattatgaaactttctctagtttattagcaatttttttaattattttcttatattaataattttttcattagttgtggaagtattatatattctaatcatatatacaactatatataaaaaagtaatattacctcaagatgtaggagatatgcatctgaatccaaaa

SEQ ID NO: 327342 - DNA, 1439 bp, Cannabis indica
gtaatgggttttatttagggcataaaatcccaacatgacccactagataaaaggttataaactaacccatgtgactctaatagctatcagttgcattttccatcgttgccgagcataaatcataaaaattataaatttcacgtatgacatataaaatacacttagagtttaataatatattcagaattgagaaattataactctaatgcctacttcttaaaagtagtgcccacaacatatattatcataaaaatataaattattaatgctaactaatccttgttctaatcatgaggtcatactaattatccccccattaaaagaattttgttctcgaaatctaacctgaataactctgaatatttagtcctcatatcagactctaattcctaggtggcttcctccaccttaatatttctctagagcaccttcaccaaggttatagtgttgttttgaagaagcttctccttcctatcaatgatttgaactggttgtagttctaagacttcctaactcaagacatgaatcaggtttgacatttatttcctcaacatggaaatatgaaataaattatgtacaaccgataatgattgcagtaaggttagtcgagacgctacctgcccaaccttctcgagtatctcgaatggccctatgaacctagggcttaactttcccttcttccaaagtgcttcacatccttcattagtgagactcgcaggaaaatatgttcttccacctaaaattctatgtctttgtggttagaatcagaataacttttctgtcttcttttcaaagtaagcatctaagcctttatcttgtctattgtctcactggtcctctaaactaattcaggacctaaatatttccttttttggtctcatcccaatgaactagggaatgatatttcctgccatacaacatctcatagggaagcatccctatcgtactctgatagatgttattgtaaaaaaaatctatcaaaggcaactatttactccatgaaccttcaaagtccatgacacatgctcataacaaatcttatagtatctatgttgtcctcttggactacccattagtctcagggtaaaaagttgtactaaacttcaactttgtacccatagctctctgaagacttacccaaaacgttgatgtaaacttcagatctctatccgaaataatttattacgtaaggaagagactactgggtgcagaatctaggtaccccattattgagaaattgaccttttatttgctaaccgcattgagaaagttgagaccatacttccaagctcacgccataacagtactcacaaatcatctcttgtgccacatgcttcaaaaagttggagtcctcaggtagactgctaaaatgagctatggagcttgaccaaggcatcctcctagaattggaatgttgcacatgccactctatcatttct

SEQ ID NO: 327343 - DNA, 1428 bp, Cannabis indica
aaaggcagtagcggcggagcattagcggcgggaccccgccgctagtgctctttgtcagtctcgaaacacgaaactggcaaacagcattagcggcggggttccgccgctaatgctccgtcgctgttaatagtattagcggcgggccccttttttggccgctaatactattaatagcggtcaagcattagcggcggaccaatagcggccgatctccgccgctaataccctatagcggccaagagtgggtgtattagcggtggagtggtccgccgctaatgatgtagaatgttgtagtgtgccagcatggcagttaactgctaaaaatagatggaaatggctaagtgctaacagaacatgagtttaaagggttttaccactaagattttggaatttgagattagttgtaataaactaggcatttatggaggttatatgccgcaaattactcttaattttatttatgagatgtaatatagtacactatgatctttgttgggaattccattatatatatactagagaactaatttgttcttcacacaatactgaataatgtttgttatcttttttaaattttaagttgttgtactgaataagtaaaataatataaaatatgacattattttatgaaaattatgagaaaatttaaattaatattaattttttttgaaagaatcattctaatacaaatatcacatacaacaattgaataagtaaaagactcaaaaaaattagtacaaatcagttaaacttaaatatataacaaattctttttaaaaaaaaaaatgtcatcctatagtaaaaaaaaatatatatataacaaattacattcaccaatatgttacttacatagtcaaaaatgagtacaaatcgtctccaccaagtgtcatcatattttaattttaaaaaagatatatcatcggatagtaaataaattcttaaaattagctgtacttatgaagaaccataagtaatagtttaaattaattatttatgcaggaaaaaattactttaatattagattattctaaattaaaacaaattgaaaattatttttttaagtattttttaatttattttttgttagtgtaattgacgtaatacgttaaaaaaaaaaaatagcctacacttacacaaaaaaaaaagcatccacaaaggttactgtttttattatatacactatatagtaatcaagtttttatatacatatatatatatattattaaatacataaacatactaataataaaatagatattattatagatgaattttaaaaattataactaattaactgagtaagaattatctaattaattacccaagtaaaataagataaataaaaatgacaaaagaaataatatatttatagtgtatattaatattaaaaggggaaaaaaaacagaaaaatattaaaaaggaaaaaaa

SEQ ID NO: 327344 - DNA, 1272 bp, Cannabis indica
tccactatctgttttacgtcaagtaatacgtggagtaactctcgatatagcagtaaaaacaagacgtgtaggcagatcgactcatcaaaaatatcgttcttgatgacttttttttagtgactttctggtagtttttgatggtacaacccttgcatacatatatagatatattatagtatcatacgactttttgatgaatctggcctcataattaagaaaacacaacattggtaaaattaatatgttcattaattttatctacatgcattaataaattaaagaatacatgaattgctaaaaaatattattggtgtctagcatattttacgatattatatggttattggtgtaattatcaaatcctatataacttaaaaaaataattttttaaaaatatcactaactaataatatgacactatataataagaaaaaatactaaacactaatggcccataacaatcctcttttataatactaaagaaagttatatgtgctgtgcacgtggagcaaaatatttatgaccatataaatgttgagaaaaaatactacttatactcaatattattataagatattatatcactattattataattaattaaatattaattctcactctaactatttgtaaggtgaagactatcctcactcaaaacaatatatatatatataaatatagaaaaataaaaaatacactccaaaaaataattgtacaatatatatttatatcgtgttttcaacacataaatagttattattctattatttttataagataatgcacactttagttatttagcttctatataaaattactttaagagaataatttttcaatagaatattaaaaaaaatatatatttttactaataattttttttactaataacttatactatcatattagtttagacgacaatagcaattaacaagaaaataaggtcatttttgtaatttaagaagcccaatacaatatttcctcttttatatatttatagattattaataattctttttttttactaataactcattacaatattaatttagatttaatattagtaattaacaaaataaataaagataatgaaataatgacaatttttacattacattaaaactaataaattagaggaaattacacttagtatgggattttaaaagtttttatgataaatatgacatatttaagtttggccaatttatatggtatttttttgtttttaggtttttttatggtatttgatatgccatatatatgtaattaggt

SEQ ID NO: 327345 - DNA, 1048 bp, Cannabis indica
ggttcacatttcattagataaacctaaaaatttaatattttagggaattcaacataactatacaccattatcattatgttattaatttttttttataatcattatgttattaattataaaaacaacttacaatagatattatgatacaatgataatttttttttttctttcaatatatcgaattttaatgatttgtatctgactttattttaaattaattactatatttagatataatatagtaaaacttttatagtagatcctctaattgattgtgctagtagacttttatctatttcgatatttagaaagtttttttaattttttcttatctatttagtacaacttgtaaatttttaaaaaattctaaatacaatgacgaaaaaaaagtttaaacagataattaccatgcgtatacgaaaaaataatcacatatataacaaaatatgtaaatcttattttcaacattgtaaattattcgtaattttctaaaagtttacaggtggtccttagatacacgattatataaaaaaaaataaactaaaatttttttctgtgtgtcgaatactcttttaagactgtactgtaaacttacgatatgtacgagtatataatattctatttttattaacataatttgtctttacgatatgaattatataaaactaatatttatattcgattttattatacataaccatatacatatagtctagattcttaccttactttttaataaatttattatttaattttaattaattcaaatatatatatatttttaaatttagttaaaataaatttttctttgaattgatattattgaaacaaatttagtcaaaaattaaaaattttctacaattaaaaagtgaatgggtttgtaaccgaaataataataagtacaaactgagattattattttatcatatataattaatatactttgccatgtataatgtgttgtgactttttttttaattatgtatttgttatcgttatagttaatggctacataaaataaagaattagctcattacttttaataaaa

SEQ ID NO: 327346 - DNA, 1342 bp, Cannabis indica
aacccgggactcgaactcagacttggagcctggaccctaggattcaaacccatacctaggactcgtgactagggtatgggtccaggtacgagtccgtattcgggacctagtctaagtccgtgtcggagtcctggtcatggtatcggggtttgggttttgagtgatcctagtccaaatctcaagttttgagtggtttcaactcttgttatcgtgttagactcattttgttgaccctactaaagtcagtctttgatgtaatactatagtattattgtaaaattattttcttcaatagcgtggtacaaaaatgtgttaaatatgacacaacaacgataaaatgtgcctttttatttatagtatggtcttgcaaatgcatattttttaattataatattgccattaatatttttcaaaacctttaattattatgtcaatttatgttgtaaattttatgtattggagtaatatttatgttgaggtagaaatctggacaaagatctttgagctacacctgtttgctagattggcaagaatgaattatatgttaagtatatttatgagagacacaaggaatttataacagttcactccctgtatcaagatagtattagagctatgtctacttcgagttttatttctcacaggataaattacagaaaaatagctaagtatggatgctttaatttttagagagagatgctctgatcttatgactgcttttttgaatttgaaaaatgaacttgtggtactctccttttataggggaatgttaaatgacaataatgaaataatccaaaaaatatggaaaaatatatttaggttattttttaccgtagatgatgatctaacgatgaaattgacaccagaggtcagtcgttaatttttagagcttgagtcgcgtctgcgggacccgctttgaataagttgtagcttaaagtcgtaagtctcttggggtgaattgggagtcaataacttcaaaattgtgattgaagtatgagacattacttgatagagtattgaaatagcttcgaaacacaagttgaatcgaaaaaatcatatcagtattgagtgagttatgactattttactgaaggatattctgggtccagcgcccaggttgacaagtcaagctggacgctggtgagtggaaaaacgcagtgggaatgtatttttttgatgcctaagtgatattttaacatcacttagtctatttttgtattttggcgaaactggtcaccagttctcagagatgttgttgtcctacgaaaacgagagactcaaaactacccggtttttgagtaattcaccttgttaaaaaagtgaaaatatgaagttgtgaatt

SEQ ID NO: 327347 - DNA, 1010 bp, Cannabis indica
ttatgggtttagggttttacgataaggattttgttcttcaagtttctgaaggtttgattatgtgtattgcttagttttgggtttagggtttaaggttttgtgttctgttcttcaagtttcggttgatttgattagggaaaagggtcttttgggtttttttatttgtttattatgaatattatgttttattgatgggattatatttttgtttttcttattataacaggtttttttttccctacaatcattgaaaatgtatcttcagttttacataaacgagaatggtgataaagtctatactacaaaggtaaagcttctcatgcttcttatcaatttttatttggatactaattttgaagttttgtttacaatgacacacgttatctcaatttgtatctgaattgatgcaatgaaattgggaaaccttgcttcatttctagtgaaaatctttttggttagtgtttaagttgatatgattaaatgttagtgcaaatttatcctcaatttttcatagccaatcaatattggattgttttcaagattttagttcctttagtctgataatgaaatttctggtcaatttggaagttttgtttctaataacacactttatctcaatttatatatgaattgaagcaatgaaattggaaaaccttgcttcagttctagtgaaaatctttttggttagtgtttaagttgatttgatttgatatcagtgaaatgtgtcttcagtttttcattgaattgtttttaagatttaagtccctttaaactacttgatattgatcattataaacttctcttttgcttgcagaaagaatcacctcttgggttggctactcagtctgctcatcctggtaaaatttccaaaacttgattttagtatatagtgagatcgacatcttgtttctataatgatttttacaaattagttggtttttctgctgtaatgtcttgaaatttcattttgttggttgaaaattgattctattcgttcgtagagctattta

SEQ ID NO: 327348 - DNA, 1458 bp, Cannabis indica
ttaagttttgcaatatgattatattatatgtattagacttttaattactattttctttacattaaaatgttatttgtatgtataatttttttaattttgttataaatatgtgtggattggaatggaaccgttacttttacatgtcaatcaatatccaatccgcacaagtgcagatatccgcactttgcggagtggattggatcggctattttatgaaccaccctaaccactaccatgcaaatacaatcattagagatctcaattttttttttaaacaaaatagatctgaaaatatgtgaaacaaccaaacccacataaaaaaattaaaaaatcacagatctaacaacgaaagggggagcaggggagcgaggattgtagattcaaaatcacaacccatcacaatcaggatcacaccttcaaaactcagatgccatgaacaacttggagaaaatggtgaccttattggacacgaaggagaacaaattgaataagggatcaggtgctggagtctactatcactgacggtctggtgcttcgtggttcagggtgtgtcgacggctcatggaaaaaatattaaagcatcttttgtttttggttcgtgttggtgcgtgaaaatgagacaaactctatttggattctatttttttttaataaaagtggggagaatgggagagtgtggctaagagaggaagaaggtggtgagggaattagtaaaattagggttttctttagttagaagctagttaaagtttgttatacttctcttgtaattaactaagcaaggccaactggttagttcagttgagcaatattttccaccctttgtcttcatctctctccatccctttcattgtcttcttactcaagctcgagtactggaaattcagtactctttcatggtatcagagccatgtcgaatcatggcaataatgcaagtggtcctggtattcgaattgaaccaccaacagaggaaagaatcgatccacatcaagctcgagctgctgaaccagctcctgaagctccaaatctagttcccctccccaatagtcagctcctcccccttaatctacgtctcgacagatccaactacacaatttggagatctcttgtccttgctgccactcaagcatatgatcttgatggctacattcttggattgctttctcaaccaccacaatttcttgcaggtaatgtccctaacccagcatttcaaaattggatgaaacttgatcaattcttgatgcactggctaatgaattctgtctctgaacacatgctgggctatgtaatcaattgtcaaacttctcacgagatttggaacacattcgctcaactctttgccaccaaatatcaagcttgacttctgcaactttgaaacttactacaaaccaccaagaaaggatccctgtcgatcaaggagttcattctcaaaatgaaacaacatgctgatcaacttgc

SEQ ID NO: 327349 - DNA, 1502 bp, Cannabis indica
ttttatttgagaaaaatattgaagttttacaattattaagtcttgaaccagagacttggtataggtataaggagcttaattttactatgctaaaggttcagtaagtatgctaaattttagttaattaacaaggttatatctaactcttgtaaaactttttgggtccgcgccctaacttctatcaaaattgcaacactcaactctcatgtacttgccacaaaaataaataagtaaatagataaaaaaactaaaaaacatgtgacgagtaggaagtgttgtaaatattgtttaggtttttaacacggcacacgagcacaactaagcacgaaaagatatgaacttgagcacgacacgatacgatactacaaattaacacaattaatataatacaaataatatgggcgtgggcttaagcacaatacagaacgaaaaatatataagcttaagcgtgacacagtacaataaacctgaaagatatatgacaaagcaccaataatttattctaaaaacgtaacattttataaaaacgttatatatgataatagtaataataataatttgaatatttattagtaaatatacaaaatttaatatgaatgttttatataatttgatgtaattgttgaaaaattatataaaaataattgaattataaaaatatttaattttagcaattatttcattaattgtaaaataaaatgtagaaaagtagagtataaatttgagccactataagaagatgtgtctgtccgagtaaaacaagacataaatttggaggaaattttattgtatacccactttaccttatctattttaatttttacctttatttttatattctttaagatatacctacatgtataaatgatattctcattgtaccatttaggttaatgtaaatcatgtactgcgcaaaggtatattaagcaattcattcataaaagtggataaattttaatataatataatatgaggaatttttttattaatggagataaaatataagtattcttcaaacttatcccacgaatctgagcacaacatgatacgatccgtattttattatgacacaacatgatacgactggtattttttaatagtacaaacctgtattttttatggcataatatgacgtgatttatatttttttatggcacgatacgtatttacgaattgaattgaatgtagtaacataaattgtatttcaaagagatcatctattcagtataaaccattttgtaaaaacactttcaaaaagactaatttagcaagtaatttgaaatataccattagaaattacttctaacattaagaattaataatgaacgaagttagtttatagtactagtactcgaactaataatatgagggaaatttgaaattctatgcttaaaataccatttaattttccccctaaactgcatagttattaaaattggtcttatatgacaactttcctaattttcctaaactacccccctctctctctctttgtctctctg

SEQ ID NO: 327350 - DNA, 837 bp, Cannabis indica
atcgagctttatggaaaacactttaaaggccaatagatgcataaagttatggatgctaatgcttgtaatggtactaaagccttttgtttaaaagccatcttttctggtttcaatggacttgatgattatttatttaactttgttgctttcttttcagcaatcgaaattgtggacttttttgtggtcccccaagtacttgctctgatcagttcgcaataggaaaagaaataaaacaaagttgatagatggaatttctttaataaaggaatctggatctctataaatatagctaatttattaatgagtcaaaggagcccaatttttattaccttttgaagaattatatatataaatgttaataaagtagcattttcgtttctttcactttttctttccgatgctttgaaggtctctttctaattttattaaaaaaagtaagaattaaaacacagtagaaaaagaatattatacagaatagcatgaaagaaaataaataaaaggtgatttgatagagttttttttcccttgttgaatcaggttcttcttcttccttttttttttaaagaaaacaaaaataatggagtaactcatttttagaacagttcgaggatagaaaaaaaaaaattccgtccacagtgcaatggaaacgtgtacaatactattggattttttttttaatatacaactttaaacgatagaagtttatgcctttcgtagcatttaagttatatatatatatacatactagtaaaatatcacgtgaagtatattaaattttatgttaggtatattttttattttatttaaaagtgacacacttaaaaattaaagaaaaaa

SEQ ID NO: 327351 - DNA, 529 bp, Cannabis indica
tgaatttcataatcttttgagttcataaattattaaaatttattttaatatccaaaagaaatagttaaactttttattatttctaaatgtaattttatcacttgaatgcactactcaggatacatgcttagagcactaacatcaacgtcgttatttacttttcaaatagctcatcaaaacttaattttattgattttaactcacatttttgtattacaccatacactagttttttgttttgtaatcgctttgcgaattctatagttcacaatcttgtcaaacttgctctttctcttgatgagacaagagtttagtggtcggggttacctgagtttatttaaatctttggacttattttgactttagcctaataataatttttttttataaaaaaaatgtaaaataacaaaaataaatatatatattttttaaggaaatttgtggcaaaaatccccaaaaagttcagtttgatacagataagtccccaacctcaaaaaatagtggcaatagtccttaaggtcattttttt

SEQ ID NO: 327352 - DNA, 737 bp, Cannabis indica
ttatacatgcagtactgatctgtggaattaatacatgaaaaagatggcagatacatgccactgtgccacatgcaatgcatttgaaatttatttcactctgtctttcaaaattataagaagaaaaaaatgtgtaaatattccacagcagaaactgctataaatgcattaattaacgagcttttgtttttctaatacaaatttgatcattatcgatcaaatgaattttgtttttccctttcttttttaattcgaacatgatctccgagaattatgagattacatctcaaaattaattggtgatgagtggagtagcccatgttcttatatatggctcaatacttttatatttaatctatgtgggacaatgttctccaatacctctaattataacgatcggtgtgggaattttagattgtttaattaatttgtttagtccatcgaattagccatgtaaccgaacttattacaaaattgtttaggatccaattgtgcgcatatatatagatatcaatatagataaacgcttaagactcgtttggtatgttatattagattgtattgtattgtattatattatattgaattagattatatatcatattttttatataatactctgttaaattttaatttatactaaaatattatatatttaggtgtctatataaaaatcaataccacatataattttaccacatataaaaatcaataccacatataaaatacaatttaatata

SEQ ID NO: 327353 - DNA, 846 bp, Cannabis indica
agggcacaaaatccaacacatacatgatcttcttctgatgattgattataccactgataaaaaagatatacctggttatatttcatctcttcaacaaatttagtaatgagtataacgaccatattatttcgatagagagaagaatctttttttattgcgtgtacatgtagaatttgttctattcaactattcaatagatgcctttagcgacaaatcctgttgatcgtacggtagtcgtatctaaatgtgtaaatgtcgtggttgaagctggatttgtcaaatcattcgcaggttcataaactgtttgaatagaagttaaccattcattccaacataaacagtgattatttgttcttccaccgaaagagaggctgattgagattgtttgagtaattcacataattgttgacctcttgccaattgattctgggtagtattatcgacaataaaaaaaaagtaactagaacaaaaggaagaaagtgacttaaacaaattttttttggttataaccttagaccaatcaaacgaatattgattaatgggtaaatggcggtaaaacccccaatactttcgttttggtttcattaaacccccacaacctaaatttctgcgggtaaacccccaatactcaggttctgttagcaatttaacattttccgtccatttcaagtgttaagtgacatgttggactgtccatgtgtacatctacgtggacaagatgtacatatggcacgattttattggttcccgtaaaaaaattatttaaataaattaaaaaaaaattaaaaaattaatttaaaataaaaaatatatatttttcaaaaaaaattatataaaaataaaaaa

SEQ ID NO: 327354 - DNA, 1955 bp, Cannabis indica
actcatccaaattaaatctaatacccactttattcttgagtattgaggctgacttggaagattgtggtgtgaactcttcaacaagttcttggattggatgttcgatgaattaatatgaaaagatagagaggaaatcctgataggctacaagaggtatttttctctttttatgtagtttagatttaatctgtataggtatatattacgttgcgattcttggaattatggttcatatttgttaaatttttattagcactatttttaggttgattttagtgtatttttaaataaattttacacttgttttgtgtaattctacgcttttggtagctgttattttacaggtttaaaatagaaaaaaaaagagagaaatattgaaaaaagtatgagaaaatggccaaacaaattaactctcggggaaagagcacttagaaattaattcgagaaaaaaattcagaagtttcgatgcaattggaactcttgaggcaaagaaaataaaatatttagaggagcgcctcaacactaaaaacccatgccagggcattgaagtgttgaagcttgttttaccataatctagatttaataacatgtatgttgattataagactattatcttacaacctaaatatgaattttctaaaacaataaaacaaacacatataagttatggaaaatcttacattagtggcagtagaatataatgtctccttccgtttagatctctaacccttgatcctttctgtcgcagagtatgatcaagatttgaacttggatcttcttcagttgatggaattctacacaatcttccacaaatacctgagtattgacttaaattgtgtgggcaactcctcaattcactataaggtttcaaaaattttagaggaagaagaagaggaaggattcgaaaattgaatagaggctctcttttattttctaatttgtctgacaaagtagtctgaaaatatatgttaagaaaataagagcatcttattctatttataggatttcatcaagggttaggttatatatggaattaaaaaagataaaacattggcttttaattgaaccctatggccaaaccctaagtgggccctggagggtttcaattttaccattttatttaagaacttatcttttctttcacaaatgtcatattttaattctaactctataaatatcaaatctatctatttaataattataattaattatcaaataaaattaccatttaacttatttattaattagacctttcaaagtctcttaactaataaacaaaccctaaatcctctccttcttctcaattaatcccttgcttagtgaaaattcacaaacaagacatagtcttatttagaattttaattgattaattaaaaccaattaattgagcctacaagataatattattccagacaatgtgaggacgtgggcctatgtaatcagctcccaataagtaaatctgaaatttaccaagtaaatttcctaacttattaattcctcctgactctactatagatttagaattgcactcctcattatatagaacgctttatatattctaaatatagatacactatgaatttgttttaatctaaataattaaagatcctctatagacgatttacatcgagtagggataaatttactattttacccctcaatgtattatatccttaaaatacttagcttcctataaatgatattttagtaaactaatataattattgaaataagagctcttccatttatgtctgttactccaagctcaatgaaaatcatcattttacttctatataattatagaagctatagatttcatatatatgattagcgctcctactcaattatactaccatgctcccaagatgtaagtattagtcaaatccaattggtcaactttaacgaacaagtcaaataacacaaaatgtacagttaagctagaacctaaccatctc

SEQ ID NO: 327355 - DNA, 981 bp, Cannabis indica
tgatcatggatttacaaaatttataaattcttgtatttctaattatacacatatgacacattcttagaaattaaataagtttaaaactatatattgattgagcctaaaattcaatatcatatagtatatatgggtttaaacatatatcggtttattgtgatatattaaaatccctataagtatattaatataattagatttcacaatctttaaaaattctcttgatcagggggagagaaatgtagttgggatcgatcaaaatttttgaaaaattatccttgcataaagtatatgagaatgatgtattttggaatgatatatgttaactgtaaattaattttattcaaagttgaattagaacgagtctaaaaatgcatgaagcgtaaataaaaaatgtagaaattattaataaatattcatttggttcagtctgaagatgttccacctagaggtattcatgaagataccttaatgttataaagtattgacaatttaaaaatgataattgtgacgagtactctagaagagactccttagggaatttagacataacatatttgatcataattgaactcttgaagtggttccatataggtacctataaatgatatacatgtttgtagaatgtgtaatttaagagatctctataagttactaatatgcgagaaaactatcatataataagataattatcaacaatagatattgaatatttgtttagaattatcaacatacattttgtttttggcaaaaatagtatgatgcaatccaagtaagtttactcgcataaagtgaagtaagacatgtaaggtgtgcaaataaatatttgtataagaatatgtatttctaatgagaaatttgcatatatgtattttcacaaaatgaatttttgtaaaaattcgcatagacataagtgttaggttttatgccctaaataaaactccatttcaatgtaatctattttattcaacatcaataaag

SEQ ID NO: 327356 - DNA, 835 bp, Cannabis indica
acaatctattaatacaagtcaatactaaacatagtattgtattaaataatactaatacaatacaatataatacaacataatccaacataatacaatacggcgtaccaaacgagcctttagtgtttaaattattaaactcaacattttattgttattttttttttacttttatattacatttaatactaaaatacaaatttacatcaatttttaacatgttatatataatgtaggaaagaaaagaaaaaaaaacactccctcacttacaaaaaaaaaatatactctccctcaatttaaattttaagtccggcacgttggtacacaaaactaagtattggcacttatagtcacatatctagattgtaaatgtttgtgctagcatcaatgtgagatttgtcttgcaatagtaggaacttatcaactgtgtaagtatcttgactaaagaatcttgaaacaataatgcactcataaatgtgtaagaatgatttggcgagagagatattccagagagacagaaggatcaccatggcttggagaactcaaaatgcgtaagtgttttgctacctaaaaatcacacactataatatatcaactttaattaatatttccaagcattattaatgaagaatgctcaacactacatgagttacgtaagtgcaattcaataatgaaatccagatattttaattttgataaataatattaaaaacaattaagtagtacattatcaaactcaaaagggatagtgtagataaaaggttaattcaaatatgaaaggctgttgtaatctttgtattattgtccaacgccctaatattcaattacttgtacaaac

SEQ ID NO: 327357 - DNA, 1091 bp, Cannabis indica
ggtaccaagcgctgaaagaagaagtagatcgccttttggcatgtggcttcataagggagtcgttctacccaaactagttagcaaatcccgtactcgtgcccaagcctaatggctcatagcgcacatgcgttgatttcattgatttaaacaaagctggtccaaaagacagttttccgcttcctagcattgaccaacttgtcgatgctactgtaggtcatgaacttttaagttttatggacgcatagtcgagatataaccaaatttcaatttatgaaccagaccaggaacatacctcatttattatagatcgaggtttgtattgttacaaagtaatgccttttggattgagaaatgcaggggaaacatatcagaggttggtaaatatgatgttcgcagatctaattggtgagaccatggaactgtatgttcacgatatccttgtaaaatctaaacatgcaaaggaccatgtcacccacttgcaagcaatttttgagatactgtgatgatacaaaatgcgacttaatcctctcaagtgtgtctttggtgtcggatcaggaaaattcctcgagtttatggtgaaccagcgagcaattgaagctaactctgcgaagatcaaagctttggtagaaatgcaatctccaaccaaacaaaaggaggtccaaagccttacaagtaaagtcgccgctttaaatcgctttatatcacgttcctctgataaatgcaaagaattttttcaaattttaaaatgcaataagaagtttcagtggaccaaaaagtgcgaagaggcttttcaagctctcaagttgcatttggggcaacccccaatcctttcaaaaccgatgcccgaagaaatcttatccatctacctcacagtgtctgaatacgcgattagttcggtactaatctgcgaagaccaacgaaaacagtatctggtgtattatgtcagtaagcgcctcttagacgctgaaactcgttatccacagacggagaaactggcgttggctctggtaatagcatcaagaaattgtgaccttacttccaagctcatagcattgaagttttaacaaactaccctttgaggcaagttttgg

SEQ ID NO: 327358 - DNA, 734 bp, Cannabis indica
aatatatatttataggaaaggcatacaccggaagctaaggtatagataaatgctgtatagaacagaataatattgagaaagaagtttaagttggtaattaagcgattttaacgtgtatataatttatatataggatgacacactaaaggggatgtagcttcggttgatgtagctacagaagagaatttgaataagttggtggaagtgggtcaaaatttgctgaataaaccagcttcacgcctcaacgtggatactggtctctatgagcctattccaaatgctggtaccaatgaccaagtcctcaaaaggtatattaattacttatatataataatgtatcctaatttcatcactctacctcatattatatatatacatagttatttctatttttattgaaatttcataatagatttaatttgtaaattattttgacaggtttgcggagttactttccgaagaaaagaaacgtcgggagtctaatgccgccgccgagcagaaataataataataataatgtactatatattgttgttgacatccgaaaataactttgatttgaaacctaataataataataataagagacagtaatgatatgtgtgctcccaaaatatgcactaaataatgatgtaataagatttcatttttgaaatcaatgtgtgattgatttgaaaaagaaaaaagaagattaatttaacccaatgtatggaaacaatatatatatatatata

SEQ ID NO: 327359 - DNA, 1122 bp, Cannabis indica
agggggtgacctgaacaactagcatgacgaccgagatgctgaaaatgaggaggaagaagattgtggagaatatgtcaaacacagatattataaagatggctatcactacaagcaggaccccaaagtggtttaagtgtccaaagagttgcttaagactaaacagaagttagcccatcaagagaatttttcccataaaaagtagaaaatcatggctcgcctctaagctaagtttggagatctggacgagggagattcggatgatgatccctcagtggaatgtgtcagaggaaataacagggaaaaccttggtgatgctggaacctctgcttctgtaaagaacagggaaaagcaaaagcatgtgaccctcagaaccatttagctcctacctctcggaaaaatgcgaatccagccagtagacatgctccagcacagaaggccaccgacgcctccaggcttggacacccttcggctctgaaaggtcctactgtgcttatattacatatatatagtatgtccaaatcatccaaataaattattactataaatactattgtatttctatttattccattgataataagcaaaattatgtgtataaacataacttttatgtacaaataggagttcttcccattagaataaattactgaaaaattctcatgaactttttctttctctcttcatcttcttccctattttatattattagtttttaacaataaaataagagcaatttgtggctaaactctctatacttttatgtttgttatggttaaacctccttactcgaaaaattaagactatactctttggatccgataatcgttttgctctgtagtctttccgtccactttgatcagttaagtagcaaagtggactaccacagtgtacgcaagtgtacatgtggtaaatttttattagtccgcctaattttaataatataaatattaataaaatattttaaaatgtaaaaaattaggaaaaataaattaaaaaattcttttttttttctttccttttcttttctttctttctttttccttagaacaaatcaatcaaatgtgacaaaatttcatgacctacaaaaaaaaaaaaaaaaaactaaaaaaccaaaactaacaa

SEQ ID NO: 327360 - DNA, 954 bp, Cannabis indica
atactctgcgacaaaaaagaacaaggattagagatctgagcaagaggggtcattatattctgctgcaaccaatgtaaaattttcttaaactcttatgtgtttaatttcattgttttagagaattcatatttaggatgttaattcaacatacttgttagtaaatctagatcctggaaaaatattcccaatagtgcgcacaccccatacacctttttgtcacgcgattattccaagcatttactttttaaggttaaaccttttggcaacacacatcctgtacgaattgtggtcatttattctccagttgcttcaacacacgagcacaaaaccttctagggggcccaacagttagattattgcatgtattttacctcattagcaagcttattgcaaaaatcctaggcggggtcatgggcatgtccatacccgccttttagcttataaatacccttctatttccatacgaagagaacgtcaaaaacaagataggcgaagctctgctaaaattcctctaagctttttgcttcttcaagtgaaaccaagagagcagagttagggtttcttgcaaacactattgtaaacacattatacaagcctcttaaggccaataatactcactcgtggactagagtttattaaccccgaaccacgtaaaaactcttgtcttctttattactgcacttaattatttcttaagctcacattttattagtttctaaaaatgtcaggaaacaaaataattttcattaagataaagttataagaaacaagaattttaagaaaaacaaatgttgttctctatttttttttaaaaaaataactgatcttttgtcaatattgtttctccattttatcacagataatttcttttctcatccttttatcacattattttatctctcatcattttttctctcataattttttctcttaccacgttatctctctctctct

SEQ ID NO: 327361 - DNA, 1427 bp, Cannabis indica
tcaacgtggagcccctaaaaaggtctaggaagatgacgactaacaagaagcgtgcctcgcagaccataaatctcgaggcttttgagaaccaagtccagactcatcctccggccctcacacttaccgaggagcgtgttccaaagacaagtcaggccacaacttcttcgagtcaggcgccaaggctttgcccatcgaagctgggagaatttggtcggaacactccgcgcagtatgctggtgcctactagcatcacctccgatcctttctgccaagccattgggacttggtcaacaatggcaacctgaacgagatgcttgagaggagtctcgccttcagtctctcagttagtttccttctctttctcgttttgccttttatttcaagagccgtaaaaatacttatgcattttcattcatttattttcagcaaaccttcctcttttgtcgcccaacgctggggtctcgacagggtgaaacaactggagagcgagcttcaaaggacaattgggaaacacaaaggcattgctaaataatggaacgagactcacttagagatctctcttctaaataaagaggccaaggagatgaagagagctcaaaaagctgaacttgaggcagcttagaatgaggccaaggacaagtccgagctgtgtccaaaacttcaagaagaactcaatgcagccaccgtgaagctcgagggtgccgaggcaaacaccaaggagcgatgcaatgctattgccatgcgttccatctatcgagcttggatggcaaatccaaaaatggatatgaatttcttgggagaaggcaaggaggaagtccttgcctactgcgagtaggctaagaaagcagaagaggaggccgaggcagagggagaagaagaagatccatccaagtctcctactatgtaagcttggtttttaactatcctttttttttatttagaaaagtggccatagacaatggttttccccttgtggcacttctttgtaaagacaaatttgcattgttggatggccaactttgctttttattttatcttttatttatcgcctcacatctttaaatttgaactgaatatatttgcttgtttgtgtttttagtcacaacttaaacaattatactttgataaaatttaaaatactttaagtaaacatttccactgatcttgttttccttttgatactgcctaagtagttaataatttactatgcacgcgagaagttatcgtctgccatgctttcgattcgcgagcattttatcagttctacttcgcgtaaagagttataatatgatttaagcaaacttaaacatacttcgaataattcatcctgtgaattactttgtatatttttgattggcctgtatgattagttaagctttctattcacaccttaggttgagtatttttttcaaggcatcttggtacct

SEQ ID NO: 327362 - DNA, 742 bp, Cannabis indica
taataaaaaaataatataatagtttgttataattataaattgaataaattacggatgaatctcttaaaatttcactataattgcatctaaaacccctcaaatttattttttgccaataaaacttctcaaactctaaattaactttttcatctatcttttgttattatatgccaaagtagattgtccacgtgtacactcatatatacatgtgacacatttatattgatccatataatataaatatttaaaaatatatataaaaaaaaaatcattttaaatgtagatggggctatctttgcagatcgcaacgggttcggccttagcttggttgcgcgggatgacaaggggtttcttattgaaggaaggaccaagctttttcaagggaatgtggttgctgaagtttcagaagccatgagcttcagagaggctcttagctgggtaaaacaatactcaaatttttggcagcgggtctttattgaaactgattatttgcctgtggtacaatcgttaaggagctcctttagaatgatttgttgagattttatgcttacatgttatattcatgtttatggtttaatttatatatagacacaaaatctgttaaatccagaacatatagtcatacacaattacagtaatgtcaatatagtgaaatgtgattgtaattatatgcttcgaaagacaaagtccctgtttcatcagtgcattggatttacactgatgtgataatcagcgatgaagt

SEQ ID NO: 327363 - DNA, 648 bp, Cannabis indica
atggcatagcttggtaatgattgagccacaatttaattagcaactctttccctgctttagacaagaattttccttcccagctctgaattcttttcctcattttatctttcaagaatccaagcatagatgtcttattgcggcccaaagtgtttggaagacccaaataaaagctattctccccagcttcagcaattcccatcaaagaacaaattgtatttttgacattctgggcagtatttagactgaagaaaatagtggacttttgatgattcacttgctgtcccgaggcttcttgaaaacaatgtaagagttccatcacatttctagcaccctcctctgtcgcttgacaatagatataactatcatctgcaaagagcatatgagacaccaaaggtgcacccctcgcaaatttacatcctcagataactccccttatctcatagtcatttaacaatgtcgagaatccttcagcacacaagatgaagagataaggtgacaatagatcaccttgcctcaaacctctagtaggaacaatcggccctacttcttgtcccccagcaacaaacttataagaaactaagcaaacacatttcaatagaagccgaatacaatgttcttgaaatcccaactttctcaacatagcttcca

SEQ ID NO: 327364 - DNA, 1523 bp, Cannabis indica
atccggggtgaagtgccacacaaggtcatcattggagtttcttttgcaaggggccattcctaaaataataggaatatcatcatggtggaagtaatttttgattaaatcctgattccaatcaccattctcctcctttagagtatccatcgtttttcccttaggaacctttgccggtgtgcgcaatgtaaaggtgaaagggcggggaatccatttgtcttcatttattcgaatgtcttttccggatagaaccctccatctaattcctttttctatgatttgccttccccaaattatgcttctccaaataaaagagccgaaacctcctattttagcctccaaaaaactagagttggtgaagtagcaagcctttaatacccgagccatcatcgattgtgaagaattttccaaccttgtttcgccaataaggattgattaaatgtttccaagtttttgaagcccatacctcctttctcctttggtttgcataacttgtgccatttcccccaaggaattttctattttgaatccgaggatccccaccaaaacctggccatcatggcatggatatctttgattagttccttcgggaggcgaaaacagctcatgatataagaagggattgcttggatgattgctttgagaagaatttcccttcccgcttgagagaaaaggctggctttccatccttgaagtttggctctaatcttagttggaatgtcctcaaacacctccttcttctttttccaataaccgctggcatccctaagtactttgtgcggcattccacaagttttactccaatcacagccgcaagttgctccccttcttccttcttaatcttgcagccaacacataattcagacttggtgaagttaattttttgacccgagagcatggaatactcatctaagacagctttcaaaattcttccctccgaaggatttgcatctacaaatatgaaactgtcgtcagcgaaaaatagatgggataacttgataccttcttttccaaacttgagtccatgaatcatatcagctctttccgcttcttgtataagaaaagatagaccttccgcacagagcaagaacaagtaaggtgagagagggtccccttggcggatcccacagtttggttgaatttggccacacacttcaccatttatgagtattgaaaaggacaccgatgtgatacaattcatgactttgtttacccactgttggtcatatcccaaacaaatcatcaccgcttcaatgaaccgccaacccactctatcataggcttttgacatatccagtttgagggccatctttttcccgttcccaaatctcccttttttcatgcagtggagcctttcaaaacccaagatagcattgtcccgaatgaaccgtccactaatgaatgcactttagttttcagagatgacttcttttaggttgtccttcattcggttggcaaggcactttgcaattattttatagctgacattgcaaaggcttataggccgaaaatcagcaacttgtttt

SEQ ID NO: 327365 - DNA, 1042 bp, Cannabis indica
tacagtgaagctagatcactattaatacgggccttaatgcacggagggtaacggtttccttttgcttataatgtatataataggaaggaacattcattacataaatagaatacatgaaatgggggattgagacagcttgtcgtatccctctaattcaatcccatgattgtagggattgcctacgtgcttggactccacgatatcaatcctgaagtagtcaagtcttaacaaatagctcaaaaaaccaaacatgctctctgctcgggtagtctgccctttaccctactcaggtaagtagacgttgtgcgtgcatatatgctacttgaagtttttcacgatattaatctctacccaggtacaaaggatattgaacacgtgtcactcgtatatgttgccacattatagtgcaaaaaatgggataacaccccttgcttcctctgcctggtcatgggggactttaacaattatctatccccaaatgataggaatagctcttctattctccctcactatgctatggtcaaattcaattccttcctctcgcaacataattatttcccctcccttgcattggtaacaaatttacctggaagcatggtaggttgctcgaacaattgggctggtgtattataaatgatcactgatccaatctcttcccccttatttctctttcccatcttcccttttatggttctgaccactgtgctctaaaaatcactcttaaagataaactggctcgaaccactaggaagaaaagattccactttgagaaccactgactttctaatccaaatttttaccatttggtgaagaatttctggtctcccaacccccctaatccccctcgtgataacctccacacttcctctccaagcaacaaactagtgtccatgccattgttaattggaacaaaaaaaatagtagtcttaaccaaagaattttgatcacacaaactgagttggaaataattttatcatcaacctcaccaactcaggatcaacttctcaaagcccagaccctccaatctgttgggttttatgcc

SEQ ID NO: 327366 - DNA, 688 bp, Cannabis indica
tctctctctctctctcgaattctttaaggacctagctgaagctttggagttttcagcttaattttgtgtgatcctagcaaaatagaggactccaattcaaggtatatcattttagccctcttcttcttgatttttctctagctcaaagtaggttatatgcatggattatggtacttgtgtttttgtgatctttagggtattaccatcctattcatcaatagtgttattcttagttttggttttaagtccccgataagtattttggcgagtctctaattgaattttaaatattgtggaatagggccttgtaatacgtcgagctgttgttccactcaggctgactggcacgtctgagcacggaaactagataagattgcataaagtatatatatgtggatgtatgcatgtttttaattgtttacactactaacactaacgaaaatgtaattttaagagtgagtacaatgtagggttttagggtagttacaatgttactaatacgagtaccaggaggtacgtcgtgcatgtggtacaacactcagtaactctcgggagtacactaatggccctaccaatacgagtacggagtcagtactttagtgcatatggtatggtggtcatgttgggaatattttaccaagatctagatttactaacaagtatgttgaattaacatcctaaatatgaa

SEQ ID NO: 327367 - DNA, 832 bp, Cannabis indica
ttataagtgtgtaagagttcttgagtgagttggggtgtcgctccggttttctaccaccgccaccgagaaataacatcgacaggagagagaggtagttttttaatttttctagagaagagggtgcacgagaggcaagagagagagaggaagagagtagggtaagtttttttagtttttaactaatttttttttttagtttttttaaaaagggtaaaatgaaaagttcatgtaatcaatgaaattaatttgtacaaattagtagagggtataaatttaatattgggagttttattaaggacaaaaaaaaattcccatttaaaaattgaaaagggcaaaagtctagttaacttataagctgtctagtaaaaagagtaccacaaaccacttagaaggagaagatgaaacaaacaacaaaaaattaggtttgtttacaatatggaagcactatggttcatgaacatagtcctccgtgaataggtgaacacaaataagatgacttagactaggagtgtacgtcggtcggtttggttgattaacgttatattttatttaatccaatgtaaagatcgatttacaaaaatctaagtgcaatccccccaattaagaaaaaataaagtttcaacccgccttatgaattcgtcagtttagttgggttaacccgtccacaccgagcactaatgtttaattttttttcacattcaattattatgttttagttattgtgatgatgtgataaatataatgattaaatttaaaattcaaattatccgtcataaaaaaatataatagtttgaactttctattttttataaatatttatataaattatata

SEQ ID NO: 327368 - DNA, 790 bp, Cannabis indica
tgattgcaaatgtgaagcatgatcacgaaaactcttacaataaattagaatatcatcaaaataaataacaaaaaattttccaatgaaagctcgcaaaacacgatttattaattgcataattcttccaaaaggcatgacaaatcattcatacaatccatgtttagttttaaatgcaatattccactcatctccttcattcatacatatttgatgatacccactcttaagatcaatcttagaaaagacacaagaaccatgcaactcatctgacatatcatctaaaaactagaactagaagcggactaggatccaagaatggaactgggaccaggacccaaccaggaactgaaaccgcaaccggagtaggacctagactcggacatggacccagacccaaattttgatccaaactcggagcgcgactcgggacacaaaccctgacccaggacatggactttgattgaggagtcaaacccgaactcaaaatcagactcaggacccaggactaggactagatatagggatctgaccccaatctcggtcctgaagctggaccgagactcgggacctgaaccaaaagcagactgggacccaagaatgggattcggatatcaacccaagagttggggcttgggcctaacccatagtcagtttttggatcttggaatcaaaccaggacccaaacccaaacaaggaccaagaccaagacccagacatgggaaccaaatctagaacaagaaccgggaccaagacacagacttagacccacacccactcgtatccacactcg

SEQ ID NO: 327369 - DNA, 707 bp, Cannabis indica
atcaaactactttccactgaggaaagcacaccttgatctagggactgagaataatactttcttgactgaaatgaggatctcacaaccctaaatataaaaaatccaatatgctaaccctgacagcaaaactcctttactttctaatgaaagataaaattctcttaagaaaaaaaaaagaagaatacaaaacgagaacaagatattcacgataaaaaaaaaaagaaataaacagaacactccaaacaaaaactaacattacagcagttttttcagctgtaagaacagtcataaatttttcctgttctttaaaaaaaaaaaccaaaatcttattaataaaagttagaagactgggaagttgtccttctttcaattacctaatcccccaatatgctacatttacatcaataagtttttatccaaataatagattctaaaagtcaaacagtggcacatctcaccaagtcataaattacaaacatagaataaaggaaatttcgagcaatttggcaaagaataacaaaccctatccttttttcttaggctccaaaaagaatcgtgactctctcttcataggccagcttaactcaaagcaagaaggggacctacacatacattgcaaatcagaatcaggagacgcaatattacaagctgaaccagaagtttgtaaccatccacagagagagagagagagagaggagagagagaga

SEQ ID NO: 327370 - DNA, 791 bp, Cannabis indica
gagagagtgagagacgagagatgagtgacagtgctcgtggactgccgtctatgagaaagagagacagagaactctagagagagagagagagagatcgacattttgaaaatgattgatttgaaaattatagatttaaaacgtgttatattgaagcgagggaaaacacattatttgaaaaaatttagatttgaactaattgccgacggttaaaaattgtggcctataacactataggcgacggttttaaaccgttggcaattctccttgaaaaaaaaaaattaatttttaagacacgcttaaaaaccgtcagggataatactataagagatggttttaaactgtggtctatactataggggacggtttaaaaccgtgacctatataggccacagtttttaaccgtcgacaatttccattttaaaaataaattcgcaatttttaaggcacacataaaaccgttgggaatacatcacgcgtgtttaattagaaccgtcgagaatacttaaatttttccaacaattttaaatactaacttaatttttttagcgagtgtctccaaaaaaagcattttttttaaccgtcaggaatagtggtttttgtattagttatagatagaaacctttaggctatgttgctggtttgtatataacaatttgtgaaatgaatacatactcatctaattcaccaaaaaaaaatatatgttaggttgtttttacaagtcttacgtgcttatttattaatggttttttttagaatatgtgcagatatattgttaagtatttctttggagc

SEQ ID NO: 327371 - DNA, 1016 bp, Cannabis indica
attgggtcccatataaattaatgtgataattttttaagaatatcgctaacaattgtaggacaccacctttagaaggttttgggggcaccactggtgcccaatagcaatgttctttctcaaaatattgaacattgctattggcacccgtggtgctagaaccacttaaaagtatactttacaattagttagcgatattacctacaaaattattaccttaatttatgtagcattgatattggacaatgatgtgacaaggtacacaataattttttattaacctcaagcattatattaattcaatctctttttgttatgcagattatagttcttgtgtgttggattcatcgaggaatgttggatcttctgtttggacccctccaccagtaaattaggtcaagatcaaccgtgaaagttagttgtggctcgatatgcgtgatggctttagtttgggatcatacagatgcaattttgtggatagctatactagcaagcttaactttttgatccacttattggggaagctgcagcctgtctgatagctgttgagacatcagtttcatggaatcacccttttgtgatgatatagagtgactcagacgcagttatcaggacgctgacaggagcttgttctagttggcgtattggtaactatgttacccaatgtaaaaatctctctcataattttttaagttgtaatttttcacttgtctctagattatgtaactttgtaactcataaagtggttaggtggacttttgctatatctgaatgtttcgggtatgatggatccttctttcatactataattaatattttatgtaatgaccatgaggtctaactttattgttttaattatacgctgtttattaaaaaaaaattatatgtaacaatttttttgtacattaccataaattttttatgaagaggaattatcgaaagtacaaataaattatttattttgtgtaattgttatttataaaaagataaattcttaatttatttgtatatatataatt

SEQ ID NO: 327372 - DNA, 866 bp, Cannabis indica
ttatatatataaatatatttcactgtatttacacaaaacaaataataaaccaggatcgaagtcatgttaccaataatataatcttatacatgaataaaaaacagccaaattaaattcctcacttttttagcttcttatcttgctagtttgcttccttttatttatttatttatttattttgtgagtaattttcggtataattaacacgtgtaactatcagtttcaataaatatcttagtttaattttttgcggtaataaaacttaagttatatatatttttagactacttcattagtacttggtcgttaaatgtacatcaagttattatctaagtcatttttttataagtatacttaaattaaatttaataacttggagtaccaatcaagaattgccacgtgtcaactcacttaacacttattacctacaaaagtttcagaattataattaagtattaatactgttaaaaattaaacttaaatatttatttacaatcaaaaattaaacttaaatatttatactctaattttttttttcgggttattcgctcttttttgcatttggattttgggggacttaaaatcctaatcttaatcctatatcatccacttataacaatgtgaaattaacctttgctttctcatataggggcctcctacaaagctaactaagttaatagctgtgcccatatacgtacgtggccactaattaaccaacttttattgttttttcattgctaaaccaaataaacattcctaatctggccatgcaattgctaggcactctcgatttatttctgatagttgcattttagaacaagatatctggcccgatttgagggatatcttgttttctgaatgctttt

SEQ ID NO: 327373 - DNA, 1525 bp, Cannabis indica
tttattaattagactcacaaaatttcttaattaacaaattaacccttatttattttttcttctcaaaatagctcaaactaagaaaattagagaaagacaatttttgttccaattgattgagtcatcaacatggagtaaagaccatgagcctatgaaatcaagctcttaataagtagatctgaaatttattgagtaaattccctaacttactaattttttctgacctcactgtagattcagaattattctcttgattgtatacaacgctctatatatcaaatatagatacactataaattacttattctttcaatctaaatagtcagtgattctctatagatggtttacataaagtatgaacaaatttactattttacccttcaatgtattttatccttaaaacatttagttccttgtaaatgatattttagtaaactaatgtaattatcgaaatgagcgttctattatttattgcctttagccaaactcaaaaaaaatcaccagttcacttctaggttcaaacatagaagttatatagatatccatatctatgattaccgttctcactcaattgaactaccaagtttccaaaatataagtattggttagaccaataggtaagttggtgatacgtgtcgtttaccacaataaattttctatttttttatttcaatactataagttacttcagtataatagtaaatccaggccgaatccacgaagactattgttaatattttttattcaagaattagaattaagaattaaaaaggggatttttaatataaagaatgagtaacataaactagaaaacaaacaaagatagataataaactattaagaaataattaagagtcaatctccactctcaacaatcattcaagatcgataataataaaaattattctaattactcaatcaaactattaactctgtagaaaataataaagtagtcaataattatttactaagtaatagatctatgaagcatgcaatctatttaatttaggaaaaatattaatttctatggatcagataagttaatctaagtaacaaataaatgaagaaaataattcatttaacctaagttctattttttatcaaattaaataatacttttgacatcaatattaattgtaaattatcactctatttagaatcctaaactattaagtgagaagtaattctaagctgataatagaacaatgtaaaatcttaattagctgtacatctctaacaagaatttacaatattcgtaccattcaaatagaaaaatagaaacaattttatataagggaaatcaataatgatattcattataactaatcaagaattcatgttttacgattttgaagtaacccttaactaaaaattaaagagattagggagaaaaaaagaactaaaataatgaataaatgatgatgcaatcttctttttctccactctctctaagtttccctctcaataacgcaatttaaaaggggttaatttcacaaatgcacaaaaacaacaaaaaaacaacaaa

SEQ ID NO: 327374 - DNA, 764 bp, Cannabis indica
ccaagttgaagatgaagctcgtttttttctttaattaatgaaataattgttttatttatcgagcaatttagttttcattttttagtatgaaaattttattttctatgtcatattattgcagacaattcattgttacatttttgagagtattaatataatatttttatctttaaaataatttcattatgagtttcttttatgaaattgagctttatattctataacttatatgtcaataccaattatatgcatatatatcatgtttttttttatatgttttgtatttattaatgatacaaaatctatggtatagtaatctctgcaataagataataccacatcaacacttaaattttatcatcaatatttatgaataattgtcaattcttaaacaatttttaagattttgttttataaaagatcttgtgatctgataggagcggaagaagttattgatatattcaattcaaagatcttttatattgacactagactatattaaaaacacaacagaatctctataacacatacgagtggaagaagttattgatatatgtagttcaaaaaacttttacattgaacttcaaattatattcataacaccacagaatctctatgtcacacatattttgattagacataaatgttgtcctcaaaagtgagtgttttaatatttatacttgcaagtgcacgaatcgtttcggaatataatgttcatgtacgtgcaaggtcgaacccatgggagttgactaacatcaaaagaa

SEQ ID NO: 327375 - DNA, 2463 bp, Cannabis indica
tggatcttctcatctttcgattgtgttcatcacagtcttccacaaagacttgagtttcaacttgcatattgtgagggctaatactcaaatcaccttaatttgaacaatttacagagtgagaatgcatagtgaaattcaaaattacaaagaaagaagagaagataaaaagttatctgacattatgaaacttaggttaattttttcttctcatcacaatttctttatatagtgagaatgcatagtgaaattcaaaattacaaagaaagaagagaagataaaaagttatctgacattatgaaacttaggttaattttttcttctcatcacaatttctttatataggcattcacttagggctaggtttagatgagatgggcttaaaataaagacttggactgaagtcttactatcttaggaccgaatatatcatatgggatttagagtttgattttaagcactttatttcaactaataaaactaaagtgtcttttctaattttgccacttatctcatctaattatttatataccaattttattttaataattatcaaataaaaggcaatttaatatatttattaattatacccacaaagagtactaattaacaaataaattatatttttcttttcttctcaaaatcgccaaaacttggtggaaattctcaaataagacagtttatttttgaattctaattgacttgttaaatcaattagttgagtcttcaagatgatattatctcggacaatgtggggaccgagtgcctatgttatcaagctcctaataagtagatcttgatatttaccgagtaaattccctaacttattaatttcttctaactctaatatagattcaaaattgcactcatgattacaaagaacgctctatacaccaagtatagatacactatgaattcatccattgtttcaatcacaacaatcattgatcctctatagacgatttacattgagtagggataaaattactgatttatccgtcaatgtgttttatccttaaaatacttagctacttgtaaatgatattttggataactaatataattatcaaaatgagcactctatcatttatcatgttaagccaagatctaaggaaccaccatttcacttctaataaacataaaagctatagatgtacatttctatgattgacactcccatagtaagctagtaatgaacaagtcaaagaactcatgcaatacaagtttaaccatctcaagatgaaatcaaatgatctatgatcaactaagtgatattgacttacaaaagatataacgataagtttatagtatcttttttattattaatattgatacagtttgatgtatagccattacatccgattgtagtttactttactaatgcctttgaaaaaaattctactcagctaagtgtaagtaaaccttatccctgattatcacattagtgtaaatccaatgaactgatagatcatgagactaaataatttgaagtataaaaaattatgattcaagctcgcaatgtctttgttgataattacttacagaccttgtctttgagtaactctcagactgataacttcgtgaattacttgtgctttcttggttagcataaatgtcgagatctacttccatctcgtgtttgtttactaaactgattatgcccacgagatcgtgactatccctgtgttaatttcttttttttagcatatttaattgacaaaaatattttattatttattgtatatttcgactggtatgtttaatttggtttccttattttgtgtatccaaacttggaaggaaagttgtctagctttcctatttatggaagaaatgtaaaaatggtaagtttggttactcatttcttttttatctaaccagctggtatattctgatcttgtgtgagtttccaattttcttaggctagatttcttgaagaaaaaattggagctaaactttccttttctatataaggaaagttgtacttactgcccacgattctgtaggtacagaaaggaaaattcctgggctgattgaagatttattttagggaattttctagtaggctatggtcttgttcagaccgtgtgtaagatgtcaataaggtgtatattgattataaatacaccttatagcagctaggtttagtatctctttcatacacttaaaattgtattcatatcttaaggaaagagtgtctttattttgtagagaaaagttgttcgactcttactctgtttatttgtagtttgtattatcttgggtctgtattcaagtctacaaagaagaagaacatcagtgcaacttttgggagaaggttttacaaagctttcgggagattgcttttcaagtctttcatcgggaggattcaagcactcaaccttcgggagaaggttttacaaagctttcgggagattgcttttcatgtcttgcatcaagaggattcaagcactcttcaaggtgatcg

SEQ ID NO: 327376 - DNA, 1652 bp, Cannabis indica
ataacagcataataaattatttaaatagctataaataattttcataaataatcataattaactgctaatttccaagttaaactaagtgggctttacagtacgtccagaccaagtctgtcaaagaagatcatctaacaaggatacttctagctcataatgaagaaagattgtatagagtacgtttgaaagtgtgaacagtgccaatgtaattctatggtttcgagagctccaccaacaaaaataacctcgatggacagttcgtggccttttgccatttgaggaattaacttagtaggatctcttctaactggataagaatgagttaaatacgccattgttgttatcgattacttcaccaaatgggttgaagaagtaaaactaaatgaatacaatttcttctaaaaaggccttggattttttcataaaatcatagtatgtcgttacagacttcgacacaagattgtatcaaataatggaaaataatttgatagtgatcaattcattgatttatgtgtcaagcatggaattgtaaagagatttttagttgtgcccagaccacgggcaaatggataattggaagctataaataaaaatttgaagatcacgttgaaaaagaagttacaagcaagcaaggatcactggtcggaggaacttccaagagttctttgggcataccgaacaataaagagaacttacatggggcacactctgtacttaatggactatggttgagaagcaattatcccagtagaatacactatgccttctcactgaagagacttattatccctcatggaaccatgctctacttcaggaatttctagatttgattgaagttctacgggagcaatcacaagtccaactcagaatgtgcaaaggaaagattgctcgacactttaactcaaaactcaaaagctgaagataaatttaatgttggtgacttctcttgagaagagtgtttccaatctcttaggatctgagagtggggtcctcaaacttaactgggaaaggccatatgaaatacaacataaagtgtgtgatggaacgtaccaactcaaaagactggatggagttgagattccatgagaatggaacacggaccacctgcactgatactatcagtaaactggaggtgtctggatccattttatattactacgttttattttctcttccatgtacacctcagggaaggaaatagtaaaataaaaacatagaagaaattttaaagcaaaaatatagtcttttgtattttttagttgtgttgtaacaagtgaccaagagtccaaactctcatttcacttgggggtatagtgtattattattagtttttatggtccatatcagagttataaaagttgaagcagatttgataaaaaataatattaatctaatatgaaccataagcccaaggatctcaacataatgtgtatagattaaatctagactaatgaaagaaaggcaatacctcttgaaacctatcagggtatccttgctatcttttagtatcataaacgattatccaatctaagaacctttgttgaagaatccacaccttgatcttcaaagtaaacctcaacaatcaggaatagagtgagctattagatcttatttggatgaattaatttaggtattatagtgtgtactcaact

SEQ ID NO: 327377 - DNA, 1455 bp, Cannabis indica
atgatgatgatgatgataaagatagaagtattttaagtaagaactgttttgtttacactgaaacccgctactttatgtctgtcttccatggtttttatattgtccatgaattttggtactctagcgaacaggccttaaaccataaagttattgactaatagttttataaaaaatttaaatgagtttttggctgttggtttacttatgtttaaccttctaaatttaaatttggcagtatataatgttacactttatattgatacacctaatattattatttaaaaattatttttaaaataaaataaaattacaaaaataaaaataaatattgaaaaaataaatattataaatttagaaataatttttatatttttttaaataataatagtacgtgtaccaatataaatgtatcgcgacaagagtatatacataagcaatctatgttagtagtttactgtaaaaaaaattgatgacacattaaatttactaacaattcagtattttagaaagtttaccattaaaatttgagcttaaagagttaaatacaaatggaatgataattcagacaatttagccaaaacaaaaaaaactcattttaaattacatatatcattctacaattttttttaagaatccttctacataatattactcaaatatacaatcttaaatatatattctattagaattattataatggactaatacaatcataggtttaattccataatacacaattattaactatgtgcctattgttgctactaaccataatgggatggttaacaacttaattatgtgttagaggcacatgagagcacccttaatactatagttggcccattaaattatagtataccataaaagaccccaaaagccctattagttaataaccccttaggcttgtaaaacatgtgtatatatatatgtgtgtgttaggtgtggtaaaggggtcattagggtttgtgtggtaaaaggcaaaagggttagctccgcaagtgctctctaggcttttgctcaagattagagatcttggtggtgattctccttgaagacattgaaggataaaatcaattactgtttagcatgaccaattaggtcatcccggttcaatcatgatgcgtagaataatagataactcacatggtcatccattaaagaaccagaagattctattatccaacgagttctcatgtgctgcgtgttctttaggaaagttaatactaagtcatcactataaaaagttgaaattgaatctcctataaataccaaaactatttatttaataattataattaatcatcaaataaaattgtcatttatataatttattaattagaccatacaaagtttcttaattataaaattgaccccaaaaaattcttttacttctataattaagcccttacttagtaaaaattcataaataagacatagtctaaatttttagaaatt

SEQ ID NO: 327378 - DNA, 512 bp, Cannabis indica
attatgcaaatatttctaaatactaatacttctaataatattttcaagcattagtaataaaattattactcttttttaaaacatttttaaataataaatatcttagactatcttcatcgtaaaaattaagttatattttgtataaaaaaataattttgtaatatttttacatcaatttttattatcgtgctttaatgtataattataaatattgatgcaaaatttaatacttacttaacaatttattaaaaaatatagaataataatacaaccttaaataggtggttgacggattatatttgtattaatcgtgttaatccaaatataatccttttattaaacaggttggacaaatcaatccaaacacgatccaaacctatttaagaaaaacccaaattcactaagggccaatttggcacagctgtgctgtgggaaaaaacagttgtagttgtgttgtgagcaggctcggccctaggcataggcgggctaggcctgtgcctagggcccaccta

SEQ ID NO: 327379 - DNA, 697 bp, Cannabis indica
aagaatttcaaacttcatttttttggtgtggtgcgatgtgggcggtttgagaaatttgagcgatttgatgaacacccttagataaatcataggactaaatagtatgaagcatatgatcatgaatatttcttactgtgttgacaacaatataataacgagaaattataagtttgagatttaataaaatttatatattaatcatataatcatgaaagtaatcatgtgaacaaaacattataaaataatttctgatcttttattaattagtaaataatattacattgaaatgagttttctaagggcattgatgttgattttatggtactaaattaaatacgctgtgaaagaatttgtattatctgattatcattgtattatggcccaagagagctccaaatgtgtatacattaaatcaaatataaaacaaatagaaaagaatatatacctcttgatgactacggggttggacgaagcacaagccgcatatctcttggtgggaagttgggttagatgagcgacaaagtggcttaccatttctgaggcaaaagcaaccaggttaggccccacaaagtgcttaaaccagtccgttagagggtctaacttcaaatcccagtcgtcctcgacatactcacctcgaaagagcccatcttgagcctccctaagccatttctttaaagcttctgcctcagcatctccc

SEQ ID NO: 327380 - DNA, 2233 bp, Cannabis indica
tctttatcaagccaaacattttgtttcgttccaactcctgcatttgttgccaatcggtcgctttagtgctactggacagtatagagatcttatccgcacactccttcagctgccttgtcatttctgtcttctttgatttgttccattgttgaagagccaccccacaacttctcagcctattttttaattccagtgtatgctcaatcggcttatccctgctgccaaaccgaatgcactatttccgtacaatcgtcatcatccgcccaagcgctctcaaaatgaaatctagttctccatctaatcccattattcatccttgtaactggcttattttctgttaacagcagagggcaatgatctgagttagttcttgctagatgactcacggtagctgcagggaacatatcgaaccattcagagttcccacagacccgatccaatctctcaaaaatgagattatttctccttccattacaccaattataatcactaccctcaaatcccatgtcccgcaattgacaagaatccaaggcctttctgaaattagtaatgagataacccggtttggggggtcctcccaatttctcttttttggttgagaatttcattgaaatccccccctccccacagcccatggtccaacatacattctgctgattcttttcaagagtttccaagagtgaattctttgggttggatccggatcaccatagaaaccagtgaaacgccaccattgcctttcctccatccttatgaaagaatcaatatggaaaggagaaaaggaaaggatatgggtttccacatccatagcccacaacaaaataagacccccacttttcccacgagcttccaccgcaaaacacccaacaaaccccagcttaattcgcaaagcttccgcacgaactttattgactttggattctgagatgaaaatcattttaggagtgtactgattcactagggaagttaaggaacgcaccgtccaagggttccccaacccttgggcgttccaaatcaagagattcatggttgtaggcgaccctgagtttcagggttcgcctcttccatgttcttagtaacttccaaatcccccatgtgagaaatgtccgctactttgtcttccttttttcctttcttggccttggaatccttcttcaccgcaacctttctcctgtttgcttttgcttggtccttcgagctgcttcccaccacaaaagaggcagcttcttccaatccttgggcgtcttgtgcataggaaatgggaatattaaagattatactcttgagcatctttggacataacagtggctgtttttttcaaattcccgtaccctgaatcaccataatcttccactatccaacgtttccccttattccaatcatcacttctcatttaattctccccagtttcagtgtcccctgcttgcaaaccttccattcttggtaatgaacttaaccccctttctataactggctgcaagtgatcttgtttagctttattgtcgtcccgcatattcgtaactccgagtcttgcatttcccaaataagtaagagcagtagcatctgtggaattcttctctataccagtagccggctgtttggtattgttctcaagactgctttgttgttctattccttgttttttacctgttatcccatctctaaccccagtattcaccttcatccatgtctcgtacacattcgtggcttcctttccttcctcagatatagttacaggttcttggttacaatcttcctggccatgcccaattcttccacacttaaaacacatgaatggcaactcatcatatttgaactcaatccacttcttcttgcccgaacttgggagagggaaccctggacataccggcttgtttatcgacatccagactcggaatctaaagaacccatctgctgccatctttgtaacatctgaattctgcacagtaataacctcccatgccttagcggccattcacacggtattgtttatagtcaatagatcaattggtactccatacgcccgaccccagattgggaagctagtcagattgtgtttccaagattcattagaattttccattttctccaaaaattgtaacccatttgataaatccatggcattttagataagactctgctttgaattgactcagatacaaatgaaaaagttaagaaaagacctgaaatcaaaatttctctttgatcttgagatttccattctgcatccttc

SEQ ID NO: 327381 - DNA, 1368 bp, Cannabis indica
tcaaattaaaacttctatattaaatattaaactttataaactttagataattatttacaagttttgggatcccgtttctaaactttttgtaaaatatacaaaatacataatctacgtcgcacagcgactacaaaataacaaccccaaatgtctcgagaccgaacactccaggtcgcatcgccatgacatgtacaacctcatcccagctgagactcactcatgttcacctttcgcctttcctttacccacacatggaagaagaactgtgagtcgacacactcagtaagaaaatcatataacatatcatataataccaacttgtatctaggcgcccatacacctatttacaaggcttaatagatgagtaagaacgttctaactaagatatgaccatgtaccactataccacatgcacttagtaccaccattgtactagtgtaggtagggtatgaaccgtaccatatacaccctgcaccatccgtactagtgcaggtaacaccgttatgtactcttcagacatcatgcactttaccactgcactctgtacccctactgtacaagtgttggtagtgtatgaatcacaacaagcatgcatatacattaacacatacatacatttgcatattcatatcacatattatacacagttcttacctcctttccagattcaagtgagttagctgacctgaacagaaagtctcttgctggatggatgccctaatcacatattaaaactggacaaatcacatgtccaaaaccctcatccgggaaacctgaacctacaactcatggttctgttataatcattagggactacactatcctaggaaacaggtaaacacccaactaaggtactgaaatgggttattcggggaacctgccaaaaccggttaaccattttacagatcctggcaaaccggttaaccagtttgtaccagtttcccacaaaaaacctaaagcttgttcaaaactctaccaattgtcaccaaacttttcaaagtacctacacagggtataaaaaacatattccaaccaataaaactcagaaaaactcactgaatcaaaacatgccattaaagacctaaacttgagtttcaaagctcaaaattgtgaaatttcaacacaatacattaaaaccagctaccagaacttagatttgactcaaaatgagcataaaaactgaaccgtaacctaatcaaaccctaacaacccttattctctaaaagtgcataaccaaaccaagtaaaacttaaacaattcaataaataaatgcttgtagggtttacctttgctaaattctcctgaatttcttgctggaaacaccaaaaacctctagcaaatcccttggttcctagctggttcgaagag

SEQ ID NO: 327382 - DNA, 1444 bp, Cannabis indica
gctgttgtctaatagcaatgttctaataagaatttaggtagtaaaaagagttttttatgatttagaaaggaaaagaaaaaagaaaaagaaaaattaaagaatatattgtgttgtacaacatatggtcataaaatgtcatgccctctacaaatatcttttgctaattttttcttttgaatggtagctctctctctctctctctctatctgtcccttttgatttttttgggttctttgttgctttttattcacatggtgaagaataagctttaactagtggaatctaaaaggggtaataagcaaaatagattttttttcctatgtatatatcattatttacatttttctcaaaaaaaaaaaaaaagaaaatatcatcatttgcataatattttacacaagggattgaaattttaatccttatatttaggtgtctttatatttaaatgttatgtaatatgaggtgctattctaattcatttgtttaatttttatggattggggatattagaacatataataatgagaatgaaataaaaaaataaatatgagatggggaatttgagtattgaaatgggtaaataccgttttgtaccttgtgttttgcaaaatttactaattggactctttattttgttaaacgacaaaatagaccttgtattttttaaaattgtacagataggaccttgaaataattttttgtcaaaataaaattttataataatctgatctagaaatgttatgataaaactgtttacatttttcagtatctgttcgtattagaaattgttttaaagttggttatattaaaaaataaaattgtcgaaaagtgagctcaggattttatttttaccattttagaaaatatcgggtctattttgtcatttatcaaaacaaagagtctaattggtaatttttgtaaaacacatggtccaaaatggtatttatcttattgaaattgaagatagaaaaaagtgagaagatttatttaaagagaaattcttaagggtatcaccagtatccaacattatctaaaattaaaagtgtcataatgttattattgtaatttaatattaatttttgtatattttaatttaataatgttataaaaaattgtgaagtagtacctgttagtgtgtctaattataaaatggtaatagtattgacaacagtcttataacaaaattgtatgattttgatttgttggtgggatgaatattagaataggtgataaatttatggtattattcttactttaatattaatatttaaataaaagagtaatttgcggcataaatacttaagtttaactcgtagttgcaaataaatatttaagtttaattttagcggtaataatacctaagttataattttgaaacttttgtagatatctgactgttaattgttaagtaaattgtcacgtggcaattcctaattggtccaagtca

SEQ ID NO: 327383 - DNA, 904 bp, Cannabis indica
atggattcaatccaatccaataaaaaacccaacaatgcatctaatggttgaaaccgatccaatctaatacatccatttgatcggatcggatgactctcaattcgatttgattgaatcagatgacaaaatttaatatctaataaataattagattggatcggttgaatctaaattcattgaatgtgattcaataaacacccctatatagacaaaccagtgactgaagagccattttattattttgttagtaaaatgtagcaaaatttaacaaaatgattattttagagcatcaccaatagaaagatttaaatgagttatataaaactaaaatataaattatctagcgaaaaatgtgttctattaatgtgccaaaatttcctacaaatttattacgtactaaatattgtgtcaaatttaacataatatttatttgttacaaaatttatctcactgtaaattattacttttttacattatagtattttgaatatttgttattatatagggatgcacaataatgtacaaaaaatcttaaataggtaaattacttatcataaaataatataatgatattattaataaaaaaataagtacataaatatttgttaaagataataattaatagggaacatacttgtatatttattagagaatatattttcatgaaaattttagtgctctttcagaaaaatgtgaattttagtgttatgacttgagtagaagaacattttagaaatttttacataataaagtaaaattttgaaaaatacttacaaaaatacgttaatacggagaaattttttagttttcacgatttgaatttttatttataaatatagatttcaataaattattcgatatttttttttgttgttttatgattgatttatatagttattatgcg

SEQ ID NO: 327384 - DNA, 1318 bp, Cannabis indica
cgctaggtgggggggggtatgcaaagctctttaaattctgttaaaggaaggatcgagttgatgatttctctccttccatccgatcttacaagtaattttctgaagttcgcggggtgtttatttgatggagtgtggaaagctcgaaatgaattactctacaagagtaaagtgatcaacattgatgaagtctggaattccattttgaggaagtactctgaaggagtggcagttcaggaggaagatttgaagggctgtaaaaacattgtgcccagcagggctggtggtaaaatcagcgactcaacggaggtgctttgtgtctcggatgccttttggaagaacggagttgcggggttagcagtggggctggtgcatttacgtgaaaatcgagtcctctggtttgccagaaaggagagcgcagagtcacctgctgaagcgaaaatgctggcgattcggtggggtctgcagcttgctactagaagaggtttcaagtcaattgcagtggcattcgatgccatggtgctaatcaaggctttccatgaacagaagtactcttagtttgtccttacctttgttaattgtattttctgttttttatctcgtaaagacaatttggaatgtgatgctttggccaagagggctagattgtggaatgttggtgatgaattttttgatagggagggatccccttttatgattccatcttatttactttaatgaattctccatagttctattcaaaaaaaaaaaaaagtaatagacttaaaaggaatgacaacatagctgggagctacatgtacatgatgtgagaataatgacaacattgtgatcacacatacatcgacacggtccagaatcaagtggtgtaatgggtcttctcatcctttataaatacgaattagtttttcacaaattaaagacaacaccaatcatcactattgattccctacctcaccttctctaatagtgcaattgatattttagtgttgttgacccacaccacaacttcatatgggagagaatttggtacatcccagaggtgtggcccctgagagcacaaggtgggtttgccttttgcttaatttgttacttgttaccatttttgttggtgcaatgtacttaaggctaatgcgccttgtgttctcaggtcacccctttggggataccattctatataggtagtgaatagtgacaaattgtgttttcatctttggatggtttctttaacatgtttaataattttagcgtttgacttgagatagtgattagattagagagaacttaattaatctcttctgtatttattggcaataagacaatg

SEQ ID NO: 327385 - DNA, 1290 bp, Cannabis indica
catagtgagtaagacggtggtaaccaaaccctgaaggagagaaagagatccaagttcagatcttgataatgctctgctacagaaagaatcaagggctagagatcttgaacaagaaggagtcattatattcccctgcaatcaatgtaaggttttcttaaacccttatgtgtttatttcattgttttagagaattcatatttaggatgttaatttaacgtacttgttagtaaatcttgatcccggtaaaatattcccaacagtatgtacaacctaaacctccaactggaggcaatgcacctctttagcatgcactagttgtagacaggttggagatcatgattggagtctgttacctagcttgatattcaaggaacaccttagaaaggtatgcaagatcacttcgacaaaaaaaataatcaaatttgtagaggtagcaaaacatcttccaaagtctcagtactacggatgtgaacctatcactttcagattatcatactcttatcatgttagccaccctcacaacgatcccctagttgttgagattcaaataggtaatatgatagtggatagggtaatgattgatgatgtagcatcatcaaacatcctattcgagcaagcctgacttaggatgagtttatctttaaaagacttggaaccatgctaataactcaggtatggtttcagtggagctgacatttctacatctgacaagatcaaactgctactcagtatggacactgccctgaggcaaaccaccatcatggccatgttcatagtggtggacgtgaagtctctgtacaacaaagtgctcaaaaggcatgccctttacaaccatcaagccatctatttagtataccacttgtctgtcaagttcccagcaatggatagtatcagttgtctccttggcaattaaggaactacccgtgagtgctataatgcattgttataactcgccaagaatatctcttctgctttatggcttcagaggggacaaacaagacctccccaactattataacacatggagaaattgttggaaatattttaccaggctcttagatttactaacaagtatgttatttaacatcctaaatatgaacttctaaaacgatatgaaataaacacatataaagtataagaaacattacagtggttgcaacggaatataatgtctccttccactcagatctctaacccttgtatcctttctctagcagagtatcaccaagatctgagcccgactgtccttctcttgaatctggattcttcacaatcttccacactatgatt

SEQ ID NO: 327386 - DNA, 933 bp, Cannabis indica
aaaaataaatggaatgaatttggaaaaaataattatttttgccaaaaatttattttaaatgagaaattattttattattctaaattgatactaaaaaatattttgggtcctaaaatgtgaattgacattttatttttacatcagaaatttagtttaataaaaaaaaaaagaaaaaaaaagtatgaaatgaaaattagaaaaccctaatttgaaaaccctaactcatctctttctccctctcttctacctacgacagccagaccagagacaagcctttgccggtgccagtggtccaaaggtaccacacctccaatcttgcagcccttagaaaaaacctaaaactctgatatctctctctctcccccttctctctttctctccgtctctctcggttttctcattagagctaccctcatccagcgaaggcctaaatggaggtcgtggctgacttccacgaggcacgaaatcccaggaactcgtgttccccgatccctctctcgctcttgtaccatttctctctcatcgcgtcaagctcggtccaacgccagagggtgactccgaccatccatagaaaatttggaagccatgaatggcttcaccatcacctggaggcattaaccccgtgatcccgagccgtatgcccctggggattttctaggcctgaggacagtgatgcgtggtcctctcgggggcgtgggtgatcgaagcacagtggtcctgtcgttctagtggctcccgcacaagcgcagagagaagagagagagggtgggtgtcgagtgaggaagaaagagaaaaggaattagggtttttatcattttgaatttatatccttcaaactaaatttatttttaaattttattattttttagtttttttttgtaaatatttattttttttaaaaaaaaatttattacgtggattaataaaattgtg

SEQ ID NO: 327387 - DNA, 454 bp, Cannabis indica
aagtaatcaatattggagttggagcactatattacatatatattgatatatctatatgtataatttatatttatatgtttatataaggaatattgatcagttttgtatgtggactcatcacatcactttcattctttttctcttttcatatgaaaaaaaaatatgcaagctttacatgtatttttattataagttccatggattaaggtatcaaataccggatagctttttaatctctattaaaaaaatgtttggccctcaatttagtatcattctttacatgtaatattttattcaactatatttttataaagtttcacagaaaaaagctttacattaaaattgtagccgaaatcgattattaatatgaaacttatgtttactaataaatagcaagaattaatagtaagatacgtcatttctttatatttatttattttattaaatatataaa

SEQ ID NO: 327388 - DNA, 757 bp, Cannabis indica
ttttttttaaattgggcgggttgaagatcttcccaacccacgagcattccaacacaaaagactcatttttttgggcgggtgttgcgttgggttgcaacgcaacacccgcctgaaccaaagaagaagcagcatctaaggtaacttcaacaatacaagggccagcccgagcccttttgagaatgtccctgagggagtcaccaatcatgaccgaatgaggaataaaagctggtctttttgaaccagcaacaaccttccctttagccttcttcgtaatccttacctcctcctcatcagattcagaagtgtcctgatgaggaacatggacagtgatagcaacaataggagaagcattaactggagtgttacaatgaacactgacaggtgtgaccccagttgggttattagagtaatgataatctgtcataggaggaaaaatattcacaacaccattataattgctagaattaggggaccggttctgaaagttttgagaaatcataccgtcaacaccagcaatatggccaaaagatgaagaaccatctcccaattcctctgtagtaagataattgttgaattttgtgccctaaataaaacatatttcaatatataatcagatttactaataaagatcagaaatcacattttatgttgcatggttcacatgattaatttcatgattataaattctattaagtccaaaacatatttatctgtacatgattatagtgttgtcagcacagtggaatataatcatgat

SEQ ID NO: 327389 - DNA, 956 bp, Cannabis indica
atatccacactaaaaaagatagaaatggtatgaagagtcctcccctaacactgcttggagaggtcccctccggactctacatccagaagcgaaattcttaaagaaagttatcccaggacgatcaaattgggaacacaaagaagaaataaaaagctcaagatgtgtcatctagaaccataagggctctagagagaggaattaattttagatgtgtttgttgctaaatttaagctatttctgcaagaaattcactgataaagacaagagattgcaaaacctaaaaattattataagcaatatgtgcgagatacatccctatttcagcaaaatgttcaaaattttaccaaacgtctaaattctattcatctatctcctaaagcaagtatgcaatcatcaagaaagaaaaataagacttctatactacatagaattttaaaaaaaaaaaaaccaaaataacttacttgatgttggagtttggtagagggaagtttgtaacgtacatccactcggtccgtaaagaaatccctatcaaagaagtcgtcaaggcacacaaggcttggtttgaagggagaaatctttcttgatgagcgcttcgatctctgcctgaagatccaatggttcttgtggtgtagaagaatcaatagttaacactgacgatagtatccttttttgtgaaacgaatattcagtcgtgcatgttgggaatattttaccagaatctagatttattatcaagtatgttgattcacatcctaaatatgaatatctctaaaacaatgaaattaaacatataagagttaagaaaacattacattggttgcagcggaatataatgattccttccgctcaaatctctaactcttgttcctttttgtcatacagtattatcaagatttgagcctagatctctttctctccttctggtttgtaaccaccgtcttactcactatgattgag

SEQ ID NO: 327390 - DNA, 931 bp, Cannabis indica
tccatttagaattcctatctttgtgagattaactttatacaattgaaaaaatcatgagatttgatatttaagtttactctgcaaaaataattgtaaattttctcgagattattaaaaaactcacttgatcagaccccctgtgatcttgataattctatataagtaatatagcaaaaagaggagtagactattatcattattagaaccgaacctctataaattttgtgtgttcttattgctcttatttaattattattttcttaataattgctatcactttaaagatttaatgtcgttggctaaaagcgagatcaacacacataacataaaacttatcaaataaataaatattttcttaaaaattagccatgttatatagatgtttaaacaaaactaataattgatataattaataatgatgaaatgataaaaaaaaaataagaaaaaaatatgagaaaataaataaatatttataaatctaataaaaaaaataagagaattaaagagataataaatagtgttgtttggagtgattttaaagtgtcatattactacctcatatctttaacttcatatatacagataaatataaatttcagagataatttttttaaaaatttattaattaattagtttttaataagtttttttttattatttcattcaaaataataatttaattattttaaacttaattgagatggaccaataacaacatgacttttggcatcctaataagtacagtcatcacttaataaaatggtagtaacggaaaatagaaaaaatataacttacggtattttaagaattagaaagtgcatttttcataaagttttaccatataattggtacattttagttataaaaactattcaaataaaaattgggatttttacaaaaatactaaattttggtaaaagtttataatttt

SEQ ID NO: 327391 - DNA, 453 bp, Cannabis indica
ttaaatattatattatattatattattagttatttaataaatttaaattatttaaataaattgaaaaatttaaacattagctggaaatttgaatttcaatttgaatttaagatgtttaggtgattagttagattttaaatatttttcaaatattttaaatagcataaatttaaattcttattaagatatattattaaattctttttaaaatagaaatatattatcctacattcgagatcgagatatctgttacatgtttatttatacaattttttctaaacaaaaatattatttatttggttgaaattgctatgactaacttgttgacagatccaatgatcggattttaatcatagtccaattatcaatagatcttataaataatttgtaacaggtaaattttttaatttttttcatctgtgataaaccaagtaacatgatagagcccatcaa

SEQ ID NO: 327392 - DNA, 1108 bp, Cannabis indica
ctgaaccatacaccgtgttccatattgcgggacaccgaaaatgcaaaatcatgaaatttcactatatgacataaaaatgcattcagaattcaaatataacaacataaataattatttaaatatctataaataattttcataattaaatcttaattaactgctaatttccaaattaaactaagcggtctttacagtcgagtactatcaagacatgttgttaggagtttgttaaaatcgttagttgttaggtttggttagctgccaactgtctctagttggttgagtcttttaggtgttagttactcttgattgtcatgtatatatcaaacctgtaacttaatcaataatagaggcttctttctctcctctttctttctttctcttttcttctctttctctcttctttgctctatttttccttttcggtttcaatggctaagaggttgagtccctctcacattgtatcagagccatggccgccattaatggagaacatggccaccattggtcctgaaaactcaagctctcaagctgctcaataaggagcttcaattccagctccaagaaatcgaactaaagatcaagaagatgtgactgtctacttcaatcacacgatctcgatcacgcttaatgattacaattatcttctatggaaacaacagatccttgcggccattcgtggaaatagattacaaagattcatcaagatcttccacctcctcctcagttcttcagtgatgcagacaaagctgcactaaatttaaatctcgagtttctgaattgggaagttcaagatcaacttctcatgtcttggctcctattttcaatgtctgaaagcttattgactcgaatggtgggatgcaatttcgcgagacaaatctggaaagctcttgaacaacactataatctgaaagtttcatctaagatctcgagtttagaaccaaacttcagaagctaaaaaaagggacactgaacctcaatgaccatcttctataagtcaagcaacgcatagatattttagcctcagttggagaggttctatcttattgagatcatattgccactattttcaagggcttaccaagcgaatgttggaaattattttacc

SEQ ID NO: 327393 - DNA, 450 bp, Cannabis indica
atacatgtactgcggtcggatgggtggataactttagtatttttaatgttgttttgttagttttgtattattttgtgtgttttgttaatttcaagaaattagaaactttaaaatgaaaaagtaatagttaatttaaataagttgaaaactttaaaatgttaatttttttttaattttaacaaattggtaaatttaaaataattaaaatagttaataaataagtaatagtatttttacttagtaataattagttttcaaattttaataattatatatgttattgtcatatttcgagcactaaatatggacatgacatatatcacatcaatctaataggcatcatggaaaaattattaagaggcatcatgcactaaatatgttatgtataatagtggtatataattttattagcacgatacaaatacgttaatgtatacatataattttatt

SEQ ID NO: 327394 - DNA, 657 bp, Cannabis indica
agatagttgctaagggctctacttcagcccatttggtgaagtaatctaccactactacttcatattgagctccacctttcccattaggtagtgaacctatgaggtcgattccctagacagtaaatggctagggagattacatacttttgagtacattcaaggcagctctaggtatttttgagatctctgacacttgtcacactttctgacatagtccatcgagtattcagttattgtcggccaaaaatacccttatttcagtatcttctttgagaggctttgcctaccaatttggttgccacagaaacgctcatttacctcgaccatgaggagcttggcgtcttcttttatgacacaccttataagtggcatggaatagccttttttgtacattactttgtccatgatgatgaaatgagttgcttttatcatcaacttcttagcttcattctggtctatttgaagaataccttgttctaagcattgtgcaatcagggtcatccatgatggactactgtcgatcatgaggataggctccaagtcttcattgatgctttgtttgactagtttatgtagggaatccacgtttgcattatgctcacatagtacttgttcgatggagtattatttgagctgggctaatagatctttagcttt

SEQ ID NO: 327395 - DNA, 718 bp, Cannabis indica
attattatatataaatatatattcatatagaatatcaatatttaaagttttacataattttaagatttaattattatagaacaaaatacaacgacggcacgtgaagcacactatatttcggagttatttagatagttgatggagtattgaaggattgtaaaaggaaatatgaaattcccattgtgagctattgggtaggtagaggagtaagataccattttgtaactagttcttttgttcttaaccttgtactctcatattcactcattcatcaataaatcttgcgaaaagacaaggccagttttcctgtggattagaaaccatatagaaagggcattaaaactgttgtgtatttacttttttaatcagttttctgcttttaaaattaaaaaaataaaaatatttttcaaaaacatattttataaaattatttttacttttcaatttttaaagtgagaatcaaaatttgaaaaaaaaaaaaacacttttaataattttttaaacagggtttttttcttaatcaatagtttggacttcgatcagatccggactcagatctccccacggcactggcgctgaacccgaccgatctaacttggacccgaatccgacctcagacctagacccaacgtaaataaaatcaaaaaataaaaataaaaataaactttacaaaataaatttttgttttctgcttttaaaattgaaaaacaaaagtagt

SEQ ID NO: 327396 - DNA, 1474 bp, Cannabis indica
actaaaaagactttaaattcaacaatctgaatagttcagggggcatttttaacgaccttaaaagtttaggaacatgatttggtacatgtcaaaattcgagagaaaaaaatcttaattagccaaatatttgataaactatttaattaatagtagtataattaaccaattatactattcttaatatcaatataaatttttttcttaagaaactacgtattaatattaatttggtaatattaaattgaatcctgtcaaattttaaagtaccactcgcattttattttcaatttaattacttaattggttattttttaaaatattgtataaaatttaaaaaataataatattttttacaattgatacataccattaaaatgtattttagttactaaaatttaaattttttgtcccccccccccaacctatttagttctagctccgctctgtctaagcctaatgaatctttcgctaaattgtgcgccaaaatattctcacttcttggtacatgatagagagacacattaggaaataaagataaggactcaacaaccttggacactaaatcaaaaagcgaggagcggtccttccatttatgtttgatccttgtgactaattgaagacaatccacctctataagagaaatcagcaaaagcactgcagaaatccatttcaaagcttgatataaggcctgagattctacattgttgttagaatctctaagacagctccatgtactagattttcttttcctttcattcaagacagtatcagtattcaacttataacatcatggtgatggcagtctggaatgaataggttcgtttcccactgaattgctcacgttgcaatgtctctccccatctatactgcaattgttgcaagggagcttcatttgggcttccatgtaatcttgcaacaattcagaaacatagctttctacatttgtgaaacatgatgttctttccttaaataatgagcattctttctagttcaaatcatccaaataattctagaatacagacttatcttatccttctgcaaattctcaaaacctcttaggagatattcattaacatcacaattattatttaaaaagtaaaattgtttaaaagatgtctttctccacacagttttagcactggaacactctaagagggcacggaccatcgagccagagctgttgctgaggaccaccaagccagcgccgttgctgaggactaccaacctaggtgcagttgctgagaaccaccacatagaaccgattaatctcaaccaccgcgtagaaccaccgaggaccactacgtagaaccgtcaatctcttagcctgttagccctgattctctctctcagccccgatcgatctcctctctctcacaatatcgatcacctttctgtctctcctgatgtagagtttttcatttttttttttttgcaatctctgttgttgatatttctgtgtatacatattcccatt

SEQ ID NO: 327397 - DNA, 682 bp, Cannabis indica
aaataaaaaaaattccttgggctaggcttttcaaaatctgaagccagaaaacttatatcatagaagaagaaaattgaagtcaaattattgacaatataaacaataccaatcttatacatatttataggaattgtcattgaatattaaataatcataaaatggcacttgaacgtgtaaactgtaaaccatccgataatagaaaaaaaatgcgccaaatacatcatcataaatattagtggaaaataatggctgacctcaaaccaatatactgacggaagccatacactcaaatcaaagcaaaacacccaaattatttatatatatggcaaacatatatataatatgatatctcaatccccaaaaaaaaaaaaaggttcaaccgcataaatctatgaaatagataaaaaaacccaatttcaaaatcatcaaatctttaataaatttagcaaaaagtggatctgataccacttgttaggacttataaaatattttagaaatatatatatatatatattacagatctaaatatattcttaaaaatgctttaatatagaaaatcctaaagcataaattattaaaacctttgctaaattaaagaagaagaagatgataaaagattagaggaggcactaacttgaagccatttgtaacaccctaactaattaggcatgttaacgtgatt

SEQ ID NO: 327398 - DNA, 1072 bp, Cannabis indica
tctttaacatttatactatttcaattatcatattttttacttctaactccctattttaatttgaacaaaaaaaaaagtttacaataaaattttacaccccattttgatttttttttaattgcataaaattcaaaattgaattttgatgcaatgataataattaattaattatttgttgatctgtatttttgaattttatcgaatagaaattaaatagttctttttattctaaaattcaactttaaagaaacattacaattgcagatacgtttttcatgttcaatgttaaatgcatattaattatatatttgctcaagtttattattcattttatataaacatcctaatgtatttcatatattttaaatgtacttgtattaattagattattaactcgttaatcaaaggggtaattaaacataaaatattaataatatacttacatctttttcacaaattgagtatctccctcagttctcaaatttgaattctccatagatctctcaaaatattttttatgtactcttgatataataattaacaattttatttttttaattaaaactatcttatatattcaaagtgacactattatttaatttataggcatacaatatgcaattagtattattataatagattctccaacctaatctcttaccctccccaataaaagtgaccttaatgaaaatatatccaaaatggacccctttttcttttattatttatcttaggtacacttaaaatatagagtaaactcacatatcaaaatccacacgtttttctcaactcttccaacaaaatatagagtaaagaggtcattttattaaatattagttgagaaaatcatcagttcatcaccccacaatgtatactatatgactttaagtacacatcataattcttaatttattaattaatactataaaattaattgattttcattggttttaacctatacaagagattataggtttggtagttagttaaagttatttttcctttcaccataaatttttttatttttaattacaacaaaatttgtgattaaaagtaaaaaaatattatcaat

SEQ ID NO: 327399 - DNA, 1243 bp, Cannabis indica
gcatcatctcttaaatgacatattgaacttgtggaaattgatgacttggcagaagtcaccatttacttgaagagaatgttttgaaaaattatcttccaaaaatataagatttgttgagttttaaaacttaaatttaattttatatattattttaattcaataaagttcagaaattaaattttaaatttatcaatcacttgatttacatgtatgtttacatgatattatgtattataaatagattttattaaatttctaaaatatagttgttcacaattacagtgatacagtaacgtcatcacaataaaaatatattgtgattatatggtacaaacttatttattcctaaaatttattagtgtattagatttacactatgtgataatccacaatgtagtatatacttatactatgacaagtggtatgtctttttcaaggtattggtaaagtagatttgtatcgattgtattggttcacattcgactggaccagtattaaaaatagaacaggtattataaactaactattatatttattctaagtcaatataacttagttgatcgtagatcaattcaatctgaatcctatatgattatatgctttaagctaattgtgttattcaagttttttggcttgttcgttatcagcttaccctacaaactagcttacacttatatctagagaaatcaatagtataattgagtgagagtattaatcatagatatagatatctataacatttatattagaagtaaaatagtagttttctttgaggttgattaaatgcgttaaatgatagatatctcatttttgtaattatactagtttaatataatacatttacaaagaactaagtattcaaggataaaatacattgtcgcataaaatggtaattttagtctctattccttttaaaccgtctatggaggatcgttgaatgattgattgaaacaataaataatttatagtgtatttatattatgtatatagagcattttttaatagtgcaatttcgagtctaaagtggagtcatgaagaatcaataaattaaaaaatttattaattatatttcaattctacttattcagagcttgattttataggcccgttcccaataaatatctagaataatgtttgacataattagtttttcttttattctcttgagttaaattcttatgtatgtacaatattgaataataaagggtaaatactatttcggactctgtgttttgtaaaagtt

SEQ ID NO: 327400 - DNA, 1471 bp, Cannabis indica
acgtacacttgcgtgtgcaaaatatcacaacagcattcgactataatagactcaccgttaagtttcatacagagtttctaagggaaccatgtatgagactaaggttgtatatgcctacaaggccatgacgggattcttgtcaaggtcaaaagaggatagacaactggccacccgcttggaaccaaggcctcggccggctagggttcccaagctttaagagggccggccagggtcccataacccagttaagaatcggccagggtcaccaaacccaggcatgaatcggccagcttctagggtgaaaccctagaaccggccagccatcgtgaaaaaaccctagggcctgtcaggtctcaaacaagacccctagggccgaccaaggttagttttggatcaaaatgtgtgtttttcaaaactcgaacgtgttctccgtgactcgaagaatcaagaatcacaacaaaattgaatcttttttgtcaagaaatcacaaattatgcattctaaactatcatgcggatcaaaatgccaaaaaaattacaatgttgcgtgagaatcaaagaatgttcaaagcatgaaaaagcttcaatacaacaatggaaaatccaagtaaataagtagagaacgggatttgaaagcttacccactagtagaaaccttcaatgaacatggtggaaagcttgcattgtcgatacaaagcaaaaatcttaagcgttggaggaatatagggcatcgacctcaatgggaaatgaagagctttctttagttgccttttttcaagagagacaatgagaagtgtggaatgagaagtgagttgcaccaataagcttaaatagcttctagtggatccctctctcacttaccatgcagtatgcaaaaaataacatgcagaaatattttcaaatttctgctaagggatgtggtcagacaagtaagagcaaatatttcaaagactaaatacaatgcaaggcctgcccagttaaggctccatcagttcaaactaagctggaaagtccatatccatacagacgtccgcacagagacttaaggggaaaatgttattcctatttttgtccacatgacctggcatttccacatgggcaagatcattgccacgttgtgtacaacttgttaaggaaaagaccaagtcatctacacaacacatcaattgaggagaagctagagtgcttaagcaggacaaagtgacgatgaactggccaccttaaggggtcaggtcagacccctttagccggccttatggccagtcagcctccagcaaatgaagggccgaccagcttgtatcttggcaggcacttagatggccagcttgcacctggtaggcacttggtgtgcaaccttcatccgagacaacaagccaagctacgatttgggcttcaataacccatgaaaataagggagaaatatcagttacttaccaattcttgggggataagtaacctatttattatttatt

SEQ ID NO: 327401 - DNA, 654 bp, Cannabis indica
agagagagagagaggaaggtgttgtatacaaattgattgatgatgttatttgttcttatcaacttaattgtaagattttttaattttttataattattagaattgtcgctgttatatatattgttactgttcttatgatgtcagtcactaaagtactgcgtgtgtttgccataagaaatttgtgttaatgttttggaaaatttgtatggttaggttataaatatttttaaataatttaatacatacatgctcttcctaataacatttaatcttttcaaaacttatatatatatcaaataaagaaacaaattttgacttaccataatggatcaattgcacccaaaaagaagaacctttacaatctcaaaagttgtaggaaaaaatttaccaacaaattaagagaatagcatacctaacgcattgtaatattctatattaggttggcacattgtgatgattctaatcttatagtacgaggtcggccataaataaatgcataccaaattaaagctcatctatatattttatatattcaaatatttatgcttgttaggcctcggagagtaaagatcactactacaaaataaggttttagcttcccttttttgaacccattttataaaaaagaaagctaaagggtctgaaaatacccgc

SEQ ID NO: 327402 - DNA, 814 bp, Cannabis indica
ataatgtaaatatttttatttttatttttaatttattttgattacttttcttaaaggctaatatttacacatataaaaattatattaattatggagtttttgtttttttttttaaaaaaaaatcaagtttatgatatagtgacacgctaagtgagtcgggatacatttatccaatcgcgtttggcgcgtcactgtagaccaaatttttttttaaaaaaaatataataaaaattatgagagttatctttagtgacccttcatacttttagtgactcggattttaagaccctaatactaaatttttagagtcattttgtgtgtgtcactaaaactcactcataattctatagtgacccgcacttttgtgcgcgtcactaaagggtgtcactaaaagccagttttgtagtagtgattattttcgtgagttatgatatatatccttgagcttgaatattgattgatgtttacatcataagaaactttacacaatattcagtcacgagtatttattcttttggctagctataaaaatcttctatttcacaaaattatatttcaacctttgaaattctatatattattattttatatatatatgggatttaaaaaaatatataaagtaatgtatgaagagtttattattctaattcttaggagaaatgcaggaaatcaaaataatatgtgtatgaaatgaaaaataatatatagggtaaattgtgtcaaaaatacttaatatttcagattttatatacttaaatatctaatgtttatttttagaagtaaaaatatctaatgttacaattctcttacactg

SEQ ID NO: 327403 - DNA, 529 bp, Cannabis indica
agatcctggtaaaataattcccaacaccaccgtggttggcggctacagtatccaccatggccacggtggccatgtttggccacgaggaggagtagccacatacacaattgcatggtacgggtcacgaaggacccacaatgatccagtcgagtctttttcaaacctggcggagaaggagaaggacaagtatatggcccattgtggctgcaagaggggacagaagaccaagaatcctatcgagttccttctccgggcacagtgagcatcagttgtacgggtccttatggacccgactggtttgcttgtatctcaaaggactcacgtcccacttgcatgcatgaagaacctgaagccactcgggtggttgtgcatggctagggaaaaattcccaagctcacatgcaagtgattttttcgtgaatggtcgggtttcaagattaaaaactgaactcacatgcaatgtacattacattatacattttgtacataaaattaatctcattaaataaaattacataaaaattcctatg

SEQ ID NO: 327404 - DNA, 1144 bp, Cannabis indica
agacttcttcactctcctttttctttttctatttcttttcaattaatttaaggtcattttatttgcatgtaattataaaataatggtagagataagaagaacaaaaagttggttaaatgcaacattggaagttcaatgcaatcaaatggtctatacacttcatttctttgctttattatgtactatgcaaaattgtcatttaaagtaaaatattaaaacataattaaatgttttgcaactatatttttaaatattaagttgtttaacattataactaaaaaatattttttaaaaaaaaaaaaattagctatattttaaaaagttacaaaacataagaattttaagaacaacaaaatgttgttttcttttttaaaaaattagtgattttttattaatatttttctcaactttatctcacaacatttttgttattattttctctctcatcagtgtatcttcccttattttctctcaccatttttttcatcactttctctctcttcaagctcggggttagggccagtgccaagggcggggttggggccagtgttgagggtcgagtacgacattgaggtctgagttcgggtctggggtgcggcaccaaggtttgagttcgggtctagaatctaggtgcagcgttggggtccaaatttgggtctgcagtccgagtgcagcagtgtcaaggtctgggtttaagtccagatcttggtcttggtcaaacgctagggtgaaagtcttggtttggcaccggggtctacattcacgggtcaagtttcaaggttcaacccgagtccgaggccaaagtcaggatcggagtccgggtcgaatcttatttatatcgacgtcttaaagtattgaagtgttttttaaaaaaaataaaggaaaaacaaattatttttagaaaacatcaacccaacgtgacttgtattttaaaaactttgaaaacacaattttaaaaataaaaaatagaaatttttgcataggtgtcgaatttaattgaaatataagagtaatatatatacattctcatttgaggaaattgcattgtatacccactttactttatttgttttaatttttacctccatgtttatattttttaaaatataatcacttttgttgaccgagattttcggcaactatt

SEQ ID NO: 327405 - DNA, 503 bp, Cannabis indica
cttatctattagtcttaacttgatgtaggtaacatgaggtttcttcgtgataggattgtaatgggagacttcaattactgagattatgagattaatctcttgttttatatgccacatgtcacgtgctcagaaatgcagattacaactccaaatgatgatcatcaatttttggagcttgaatcacgttcgttggatcgtttttgggttatttgcgaacaaagtaacacttcaactaggggagagtttttgtatcgccctaatccctaggaatgccacctgtgtgattttggaacatagtttagtaataatagattgattattcaataaaatatgtgataataaaaaacttcactataataaaactatctcaacgaacaagatgacatcattaaaaattttttgggatcctttgtaacaaaagttttacaaaaagagttatatacaacagtaagtcaaaacacatatcaggcacagcccaaaagaactcctgacaacttgaccat

SEQ ID NO: 327406 - DNA, 666 bp, Cannabis indica
ggtctaaaatagtatttaccctagtttataatactgaaataaaagttgaagcaattacttaccactcatataagaaaaactaattgtttattatgattttcagaaactaaattaataaaaaattaagttaactaattcctgtttctcaacgagtgacacatggcataaaaaaaaaagaagagctaatatttagtctccctatttaaaattcccgattacaatactatcatgaagaagctttacaaaaccggaaacaagtcaacactaagagatgagtggaagtctacgtacctcacctcatcctagctttttggacacagaagacactttctcactcaaggacctggaggggtccaaacctagaatttgcccatcagatacccagatggatactcgaatgacaaatcacgggcactgatcgcccaaaagtgtcacggataattacctcggatgcaacccggagctcccaacgacgactataatttttttaacataggatcaaatcttgtccactatgtctagacatggtagtgcgcgtacctcatccatcttttttctagacgattattccatacctctacttttaatggttgaagcttttggtaacacgtatccactagggttgtacatcggtctgtttgggcagtttatcctatatattttcta

SEQ ID NO: 327407 - DNA, 713 bp, Cannabis indica
tatacaataataaaaaaagatcacttaattattgatgccactgcacctatcgtctttgtgacatagacctatgtgttacgctcacacatgtatttacaataaggtcttatattggtttatctcggttctgattaccaagtctaacctaattatgccttaagcgcataattatttatctctacatatacaatataatattacatacaaaatcacttaaatgctagggtaataaccctagaccacataactgcttattttagggtaataatcataatctcggtttctcaattaacatacgcataataacttacatgagcgccacatcgcttaactctatgtgctaacttactgtcttacctagtattataagtatgtgaagatttcaaactcctgggtattcctgaacaagcgctggtaatcatagtcacacgttctcgggatttcacaaatagggttcatcccaaatctaatttcataataattactaatttctccttaacataacaacatgcatcataatctcaagagccccattaacaagattccaaagcttcaaacatcaaaatttaaattatgcaatataggttgaaaagctttaccacaactttcttcaagctccaagcaaaaaactatcacaaaatccccaccaattcaaggctttttcttcacaaacttaaaaatcacaatgaagagggtaagagagagagagagag

SEQ ID NO: 327408 - DNA, 1019 bp, Cannabis indica
aatctaaaactctcattttcttttcttttttttctctatgtttctctcaacgaaaaaatgccaccacattcatccttcaagctccatttctacaccatcattttccctcaattttttttttaaacttttagttttctcacctaaaataaatgtacactataaaaattaatttattttaggatatgaaggtaaatgtaagagtttaggctgacaattttgtaggctttttggaaaacagcaatcggctataatgacaacgatcttgagggaatctgttatacccatatttcgaacaaataatatggttatgacacgggtatgaagaagctaaaaaataaaccagttcaaattatgaagaaattataaatatgttcaaataacttaccttgaaaaatatatttagtagaaatattcaaattcatcatttcaaagataagggtgagtcgtgaataacaactactattttgtaagaccatcgaggtgaacaatcaacgtaaacggtccatcttaggatacacagaatataatacaaaacaatagtcagttggaaagggtggataatgagttcttttagaacttataacttattaacacacatactcgtaagtatattgaaagactaagggatcgatatacacacattgtaattcatctcaaaattatcacattgtgatagtatcttgcgtttgcctctctcaacattagagaaggatgcgagaagtactacccaatattatacttagacgcaaaaagttatcttcaaagaaaagcatcctaagatgatcatttatgttgcgaggtgaagaagcgtagtcagcataccacttataggtaaatacaagaacagttatagcggtttacttacttttatctcatgtgttgtaaatatgaaacgtatggatcactactacaaaccaagcttttagaggcactttttttcagcaaatattaaagaaccgacgtcatagggttggaattttttggaagggattttgacaccacctatggcgtcggttatt

SEQ ID NO: 327409 - DNA, 1696 bp, Cannabis indica
ggtaaaataattccaacaaatagcccctttgtccatcttgttgctggacaaccactaataggagtccccacagtcagccaacctcctccagtagtacccatagctagtcagactcctctagcaatacccatggctggccagcctcctctagcaatccccatggctagccagagaagagcagtccctccctaaggggagcaagtctcccgaagatcaattttcaaccaacgaggatcgggagtaggtggaaacacccaaaacaaaaaatttagatgtgaagttcataactttagacagttacatccaccaaactccaacaactggtatgatttgccctatgtcaatgcacaagctccactagccaggcaaagaagtgtgggtggctaggccctgcccaacttaggggtggccgaccatgtacaagcaccagacttagcactggccaaccttgagtataccctctcccaatgtatagttggctaggctctggccaatccaaggttgcagctcaatcaaccaggcccttacagcaacagacccttttgtgcaaccatagttggatcaaatacgagacatgctcaagggcctagctggtctaaaaccttcagaactcaagctagacagggcaaggggatcaccattcttggcatacatcaatgccttgcccttacccaaattcaagatgccggcttggaagatgtacacgggaagagaaaaccctctagtacacctaacgtactttaagatccaaacagatgtcctacaagtatctggagatgtgcgatgccgaacctttctggaaactctagctaaagtagcccaacaatggtattttaagctagtcccaggaagatttaactcttgggaagagctctcctgagagttctatattcaattctctacttcaagataaatacctgcccgactagagggtcttgtcaaaataaagcaaagacaagaagaacccttgaaggactacattcaacagttcatggctaaggccaccaaggtcacaggcttgacagaataaggtcgatagacggccatactcgaaggcatcctaccattgagtgacttctagaaagatatcaagatgatctcaacgaacagcatggaggagttccttgagcgagctgatggcttcataaagttagaagaagttgtatcgaaagcccaaataagaggggaagacaatgactaccgaaaatagggcctcatagcgccccaaacactacccaacaacgatgactctaaccaacataatcgcaaaagaggaaaattcaacgatccatttatgccatgaagtccaaggaagaaggaggagaagtgtgtattcttaactcttctatcaaaactcccaaagcaaggcatcactaaacgttccagtagggcgagtcaacaacaagcaattagaagtttggcctccatctccgaagcctggcccataccttcgaaggctagccacaatctttgaagtctagcctctacctccgaaggatggcctccatctccaaaggttggtcaccatctttggccaagcgtacaggcaagtaccaccaattcttcccaaacctcagatggcaggatacttaggggttgacattggcagatcccatattacaggcgagaccaacaaagccagagagcactatgctcagaaacttcatcacgagcccaaaagcgacttcctggtagg

SEQ ID NO: 327410 - DNA, 622 bp, Cannabis indica
ttaatgattttgaaatggacatttactaatatagtcctatgatttagggtcatttgctataattttttaaataagaatatatactaatatagtcttataatttgggacgtcatttactataatttttcttttttttaaaaaaaaaaaaatacaagacctgtaacaaaggaaagaacaatagagcacatataacaaagatctaagaagaagataaaacacatgttgttctgaagacactctttatcagttcctaatccaacttggacaatgttatgagcaaaattgttattgtctcttgctgtgaatcgagcaatagtaaatatttacatgtatatttatacattataaaaaaagttactgacaatttatccagttagctatatttcaactttataacaagttgtttataaaaaaaaaaacacattattaaaagatgaaatgtgattagaattctcaaaagggtgataactaaatataacttttaattataataaaaaattatttatgactaatacataatattcaaatataatttaatcacaataaattatgattaatacttttaatcactaattttttagtcacaacgtaaaactaataatttataattaattataatttt

SEQ ID NO: 327411 - DNA, 634 bp, Cannabis indica
gtcaaactctgacacagtaaacccttgatcaatcaaagtcttggaaagccgaccagactctacgacaatctagcaatcataaaggataaggttagaactacaaaaataaaagcataaaagagacatagataattgtcacttcttgcatataaggcgacgctcatgtattgaatttggtaaatgggagcgcatgccgcatacctcttggtaggaagttaggtcaaatcaacagtaaagtggctcaccatttctgaggcaaatggatccaggttaggccccacgaagcgtttaaaatagtccgtcaggagatccaatttcaagtcccaaacgtctccacatacttgccttaaaaaggcccatcatgggcctccctcagccacttcttcagggccttcgctttagcgtctcccttgggtaattctcccacaacataattatgcttggcaatgcagagttaaaccctttcctcgtcagggtgagcaagagttagaatgacgcctggaggcgcaggatactcatcaacttcagaaggaatccttgaatcgacactagggtcgggggtgtcaaccctctttagcctcttcgaaggctttggcttggtgacaactattggattatgttttaccaggatcta

SEQ ID NO: 327412 - DNA, 643 bp, Cannabis indica
tttacaaaaaatagtatcttatgtaattatccctaattattttacatactaaatactaaaatcagagagtcttctacctatcgatatatatgggtaaattgcaagctcctataaattctatatttataatattttaatttgatgatcgagaaccatacatattattttgatttatatttgtttctatgtacatggaacacaaacaacaaattgtaaggatttggacctaccatattcattttatatatagtttggaattgttcattgtggtatatacatgtaacattttttaatagatattatttattaatggttattaaataaattttacaataaatattaattttaaaaatattaaacaattagattttgatcctaataaaagagaattcagcaactcatagtttagcaaaacatgttcttcgattagacgataaattattctagttaggttccactgtcaatcgttatatgctacattgttaatcatgtgtgactctgttcaccacgtaaaaaaaaattactacttaattaaaaaatatatttcaaaaaatatttatttttatagtatatcaaaaatatatttatatataaaatatttcagtgaaattcatttttttttaaattttttttttatttaaat

SEQ ID NO: 327413 - DNA, 702 bp, Cannabis indica
gcacaatacgtttaaaaatcacgtgaacacgcctatgctagttagggtgttacaaagataatggtgaattctcgatcaaagagccttacagagtagatcaggagcatcggtttgggcagaccaaatctctttagaagaacatttgggaccctcatattcattcgagaatatcaatactactttggcgagttctttgcgaagctttacctactggttcaaagctagccttcctctcttcctttggctgcaacttttgtggtaatgatgaggaaacttgcttacatctgctttgagaatgtccaattgctaaggccgtatggttctcgagtcagattcctttaatggtggactgtatatcagggtcctcctgctcggatttcattgagaatcttctctcattggatgtgggtcttaatggatgggagttactttcctatattggttgtatctttcatgttatttgggatcatacgaactctaccagaatcaagggatcaagcatctcaattcccacactaattaacaacgtagccttatgtttccaagattactctaaatctcgatctcggaatgtccaggaggagggggttgcaattgatccctcattctgttgggttttatgccctaaataaaactcatttcaacataatcagatttacttattaatatagatcagaaataacattttaatgttgcatggtt

SEQ ID NO: 327414 - DNA, 823 bp, Cannabis indica
cctcgaaaagtggccaaccgacaacgaggtcgtatgaatttgatatttgccacatgttacacaattagaactcaaaagtaaacaacgtaaagaattttatagagctttggcccccttaattagtgagtaatgacctactccccttttagttgtattgataccgagggataatactattcatatcactataggtgggatctgatatagctcccttaaggatacaaagtaggaatcaaagatggcaaatctcaagtgttgagaatgctatatgggcgtgtagatgagagagagatatcagacttagagatttaggcttagaatgaggctaggcacttaatgacttaggtcttctagggttgagttaaggccctttatatatgagagcctagaccctaatttaacataaaataaatagatgtttgtatattaaattgattaattaaaaaagactaaaatgcccttaaacatagacattttcaactactttattaggatgttaaggcccaattcacagcccaactcgtagtccacgtgtaaaattgtgcaaaaagactaaaatgcccttacttccccgctaagttatcttgtaaccctaggagtaaaatggtccaatttcattattttgttaaaccctaatattttaagatatctaataatattgccccgtaaaatacttgatacaaatttgtatccatgtgacaaaaattgccatccgacccatttctactattattaggcataaaaatgtgaaaatatgaaaatttacatatagcatgcatatcacacctataattcaataaaatctctgaaattgagaaataat

SEQ ID NO: 327415 - DNA, 587 bp, Cannabis indica
ctggtttgccaatttttggccccgtttccccaacataataccagggactagtatcaaaagtggtgcatgggggttgctaactctcagtacaaggtgccaatggcaaatttaccctaggtggtagaggctagtcattgggatcatccgggttggcaaggtcgacctgactagttgtgttggtcaagtttgttgtgcctgccgggttggcagggttggctatatctgtacagattcgtggagattccagtggtaggctggaacacaaacatcaagattagcagtcatggggtctaaaggaagacccgatgaggcaggagttgtagctagagttctccttgttacaaccatggtgatagatcagatcaatcaacaacactctcaatgaaagcaccaaattgttaacctcaaatttggccaaccaacaacggggtcgtttatgactgatatcaccacatgtgaacaataagaacaaataaataaaagggacacagtatttttatagaggttcagccccttagttagcgggtaattgttaattctatttttggcatatttaattgataaaaatattttattatttaatgtat

SEQ ID NO: 327416 - DNA, 787 bp, Cannabis indica
aacatttgtatactatttgataacaaaattattaattgaatcatggaagttggtattgaaaataagttgtggcagcaaaagaaactctcaaaaagcttactggtacacaataattgcacagaacaggtgccaaattgctgaaggatacaacctgctttgtccaattcaaaacagggttcattggtgtgatgaagtgtgggggaggttcaatattcccaagcacagttttacactgtggctagctgtgtagaaaagactcaaaacaaaggaccgacttctgaaatttcgaatcatttcagatgcagattgctcgatctgtttgcagcaagaagagtcaatcgaacacctatttttaaggtgttcctatgcacaatgttgtgtggaaaaaatcaaagagtggctgtcatggagaacacaatcttatgatctacatcagctccccaagtggattcataaaagcaaaatcagcaagtttaaaaagaaggtattggcagctgccattgctcacttggtatactcgatttggtttgtaaggaatgataatttgtagaacaaatacatagaaaacaaagatgtaactgtacaaagaattaagaatagtgttaagcatagagtagaattagtttggccaaaaaagattggtcaaagatagagaatggttccaaaagttgtaaaagctgtacaaatagatttgagatctttctaagtaaagatgctctctcattgtaaggtaaaaagtttgtggatcaataataaacttgctgatttatcaaaaaaaaaataatta

SEQ ID NO: 327417 - DNA, 546 bp, Cannabis indica
tgggggtgcttctgtcaaaaatggtatctgtacgcgcccttccatacaacaaaatgagaatttaggatttcgagtattttgtaatttttgggttcgttcctcatatgatagaatggcatcacagtatttacatgtgtgtgtaggtggtccgaaattccacgttgttttccaattagctgtttagttagcaaataaaaatttacaaataatgaattgaattttattaaagtgaatattgtaattttataaaattattatactaccgtgattttcttggctttggatattctgaaccacttggttgtcaattccataatttgtgtcatcgtcattatatagaataataactattaagacaatttaaaattattagataacggtgaaataataacttattatcgagtgtctagacatgtagcttcataggaagaattaccttttgggcaatttttatttatatacaattaaatgtataatattacaaaaaatgtggaagaaaatataattacataattctatacaattttatgaatatttacaaataaa

SEQ ID NO: 327418 - DNA, 508 bp, Cannabis indica
gaatacaatcaacaaaaaattacatgacaatctaaaatataatatagctaaaaatgtatatgcatagaattgaaaaaaaaacaatgttaattaaacaaagaaaaattaaaacttatatcaattaagttagcagaaaaatagaaaattaaacttaaatcaaaaaattgttaaaaatatctaccatatttcatgtatttttttattatgtcttaatagtttgtttttgttacttcttaacaaaactgttagtataaatattacatatgcatattcctctcaaaagaggtaattattcacaataaaaatgtttttatgataagcattctctcacaaaagaggtaattgttcatattaaaataaatctacatattcacatatatatctattctatataaaatgtggctatataacaaattttttggtattaaatctaaatataattaatctacctaaagtgttgcaattaataataaatataattatttttttattaaaaattattttcaaa

SEQ ID NO: 327419 - DNA, 964 bp, Cannabis indica
aacccttacttcgggaggaagtactgagcacgcatcaatagaagttcactaattggtgtgtttcagatatcatattagcgaggtggattgcaatggattgcagcaaattattaaagggcatctagctaattttgtttaagtaaattgcttttgtaatttttaatattttactaattgattttattttctggacataatcctatatatcacgtacaatatttctcttatatactaaattttaaattatgtacaaatttttttctttactattaattaaaaaaaaaaattattgacatataaataacacaatttttcataaagatatatttttcatgataaattattaaaaaaagcatatatatatatatatataactagtatatacactttctcctcaatagatgtatgtgattaatatatttgtctctcatgcaattttggacaataattttgaagtactacaaaggagagcaatgaatggggttgttccctggagttgtaccctcacattcggacaattggaatcaaaatccaaaggatatgtatatgataaggatattggttaacgtaacatgtacagctgagttgagtgaatatacttcttatttttataaataagtgtctcgtatacatgtatatattatgtaagagtattgctattaggcattagtggtgcttagtactttctcgacatatcacgttacgattagttagcgatactttttaaaaattattatattaaactatatatgactcaatacttaattagactaatagtaatattaatatataaaactctttagcatttctcattgtgtaatgccggccctcttaccatatgtaattctcaatggccaactaccttcttattatttatttgtttaatggtggcaacataataatatatatatatatatatttatatagggatacgattttgtcccgtgatgtactttcacggaat

SEQ ID NO: 327420 - DNA, 608 bp, Cannabis indica
ctattatactttgtaatagtaattaaaaaaaattattattcgttctaaatttatcttcggaattaatgaaaatgctcttaaactatcaaaacattcaaatttaatttaaaataatatttaaaatttaactaattctaaatatcaaaatttgaaaataatttttaataaaaaaaataaataatatgaacaaatttattattaattgcaatacattaattaaatggattgaataaaaaatgagagagccacgtatgaaaaaatctaaccacatctgtttaggttgtcgctcatttctttacttaatattacttttttaaaaaaaaatattacaattattattagattatatttgtaattttgcattttaaattgtgtttgttgactaaaaacttaaaaatgactttgataatagctaacttgagttaaatgtagataacattagggaaatttatatggtatattaatttttgatatttttttttacaaaaatactaccagggggtatttttttctttctttgctgtgtttttttataagtttcattctacagtatactatgttaagtttttactggtgttctactggtggtttttaggtgttctactgtt

SEQ ID NO: 327421 - DNA, 1392 bp, Cannabis indica
tttgtcctcgaaatctaacctgaacaactctggatattgagtcttcatgtcagattctaactcccaggtggcttccttatctttcctgtctaagatctgaactggttgttcttcgtatgatagaactggttacagctcaagattttcataactcaacacatgagtagggcctgaaatgtactttcgtaacatggaaacatggaacacattgtgaattgttgaaagtgctggaggcagagctagatgatattccaccagtctaatcttctcgagaatcttaaaaggccctataaacctagggcataacttgcctcttttcccgaaacgtctgattcccttcatcggagacactcgtaggaacacatgatctctgaaaataccaaattttaaaataaaaaatcaaagcttcaattttctcaacctgtattaaccacaaataaatgagaacaaaaaataaacattctaatgaacacacatatatgtagataaatcgtttcctacaattccttcataacaacatagatacacaattcatcatgatacaaaaatgtaaacaaaaaacttaagcagatctaaataaaataaattgcattaaccgaaatttcacctcaggtcttgaatcagaaactccattaacaaaactgttggattagagaaaagatatagcttcccgtcattactgatttatttatgtagcctaccattttgagaaagaaagctacctcctccctagaaaaatcttgtccactactacagtactgaccacaagagatgatgagcaccgaagaaacttagatccgctgacgattgtaagaactatgaagaagaagacatagatatagtgggcagagagatagagagtgaatcggaaaggaagggcgcatctaaatctgataggaatttattggtttaatttattttatatattatatattaaaaactaaatagaaaacccataatcgggttgggcaggttatttttggtttaattgggggggttggacctattttgaacccgcccaattaacagattcgacgatttataattttgtctggtttttttcagtttgcattatttgtcgggctttttcttgtttggtttgggcgggttattcgatttgagaagtttataaaaaaatttgtatagccctcagcatgagtattagtgtgagcgagctcacgtcagagaagtgggctgtgagcagcagtgttgatccatacaatttatcagtggccgctaaacagtaggccgtaggggcaagtctcaattttttgatctattcttccttgcaatacaattttattaccaaattattgttggaaattattttaccaagatcttagatctactcacaagtatgtttattaacatcctaaataagaactttctaaa

SEQ ID NO: 327422 - DNA, 1323 bp, Cannabis indica
tatacattaaacataatcatgaaataaatcgtgtgaaccatgcaacataaaagcgatttctgatcttatattaattagtaaatctgattatattgaaatagattttatttagggcacaaaacccaacagtaacctcttaggcttttctagctattttttaaataatactgactcgtggactaaggctcgctaacaccccaaccacataaaaactccgagttccttcttcatattttattttcttaatcatattttctttagctcttaaataattagttttctaaaaatcttggtaaatattttgatattttcattgagatctagagaaagtagtgataccattcaagattacgttcaataattatggtactcacccgaacaaaatttggtcttgacttcattgacccaaaaaagggtgatgcaaatctcaatgccaagactgaagacgaagaagatccaactgaggtaaccagtcgccacaagaaggaccaggctgacaaggattctattcctaaagaccctatgaatgaagacgatgaatcagaggagactgattttgttgatcctgaaaataatcatcaagacatgcctgttaatgatgatgctgaaaaggaaggagatgcaaatgagtcagatcctatagtcaccatagtcaaaaagttgaaagaaattgaaaataaattgtccctgcaagagcaattctctttgatgatgcacgaaaaaatgacgagaatgaagatcgtaattaaagcattattatctgctacaagcaaaaccaatcatgatgccccaaaagataatactaccgggaaaattgatcccaaagttcctagaacctatgatcctcataaggacaagtaaaaatgcaaggtaggcgagacgacaaagaaagctttacataatgaacaacaaaagaaatctaaatctgccaaccaacctcaaaagaagaagaaaagaacccatccctcagggcgaggcgactagattgattctagaggtaaagctgcatagaaagacatatctaatgctaaagctaaaaagcctactactcggaaggatacaaattattatagtgattctgttagtcgaaatgagaatgtcaaagaagtgtatccgccatcaaataaaaaaagtgaaagtctttctacgaatgatctttggacaaggttgaacaccaaaagaaaaaatgctaggactgagaaagtcaagcctcgcaaagacaacctcagaaagcctactacatactatatgatgtttgtaagagagaaaattctgaagtttttttttatttttaaaaaagaaaagacagtagtgcatacaaat

SEQ ID NO: 327423 - DNA, 1585 bp, Cannabis indica
ttcagttaatttgatattgaaataaaaatggatcgtttaaggataattttaactgttaaccgtttttttagttttcagtttgaacaatttcggttttagtagtgtttggtaggtcggtttgaacagtttgaaaaattttctaaattttatgcttatattttagtctggtttaggtctcagtttgagtctaaggtcgagtccagtagggttgaggcgggggtttaggttaggggttggggtcaggggtcagggttggatccaaggtccagatccggggccaaggtaagagttagggttcgaggtacgggtccaggtccagggctgaggctgggatctgcgtccgagtctaggtctaaggtccagggttgagtccgagtttgggtcgggggctagggtccaggttcgagtttgggggcgagggtctgggtacgggtctaggtccaaggctgaggccggggtccgcgttcaggtctagggtcgtttgaggtttagagtccggggttagggttcgggtccgagtccgagtcgggggctggggtccaagttagaggcgggggtctgggttcgagtctaggtttgggtttgggctccaaggtctaggaatgggtccggggtttaggtactggtccagggctggtgccggggtccgtgtccaaggcatgggccaaggtccaagatcaaggttggggttcgagtcactcactcactcactcatttactccctccctcctctctcaacaaccatgacttttggtctaactttgctgtgattgtgagagatactattgtcatccctaaaaattgtaataatctcctatgcattaactgtaataagcttttaatctaccccatttacaaccttgttttctttaatcctgatttctaatcaattcccaaacttcacctttgtgtcattctggtttgcgacctcttcattaatcttgaagaactattttttagatcaactgactaagtttgcaaggctagttttagcggtaaaaatggtgttagttatacatgagagtagagtaatagaaaccaatccgaacgttgtttggttaacacattattgaaattatttggcgattgcccaattctttctcaatcaagattcaatggcaaattacataataataataaaaaaaaaaaattacactagcaaagatgggttataaaattatgcacatccaacccgactacaataaaaaaaaaaaaaaaaagttactgaaaaatcatgtgcaatcaatattgcgtcattgcttttaagtacccattattgggtctgaacaaaaatttgcaagtatggaatttcatcaaagatcaaactacaatatatacataatgtgaatattagaactacaacttcatcaaaaaattgcaagggatttcttcaatacatatttaatctagttctaatattaataatgtgatttcacatttgcccttcactcttaaactaatgacttttggaatattgaaaatgctaaaggcacctggtgcctaatacccttataaagttataatattacaattagtataatttaataataaattccacttattttacattaataaattataaaaa

SEQ ID NO: 327424 - DNA, 478 bp, Cannabis indica
caaacacgattaaaacttaataaaaatatactaaacttaatctaaaattaatacaacaaattttttaaatatgaacttgtaaatcactatacaagactaagagatgtaaataaaccttcatagagtcttggagtctactttgggtcactttcgagaattttgcaccattttgttcttagagtcaattttgctttaaaatgcttaatcctctttagttcttcctacaagatcaaaaaatcattaataaccaatataataataaaatattcattaatcatcaaaacaaggagacttacgaatttgggtcaatacccatgtctttgctccaccatcaccaccaccagttcattccaacattgtctctgctccaccaccaccagcagcacgtgctagggaggtttctgctccattagcaccaccgccatgttggaatttattttaccaggatcttagatctactcacaagtatgttgattaa

SEQ ID NO: 327425 - DNA, 905 bp, Cannabis indica
tacgtttacgtttaactaaaaaaacaaaaaacacttattttgtttttttttttaatttttatttatactcattttattttttattatgcaaaatgacaaaaaaaccttagcatctagtagaagagatttaccagaaacacctttaatttttctcaatttcaattgtttaaaaattaaagtcggtattattaaaatagggttactgtgtaaaaatgcaccttatactgtagctatatatagtatcagattagtagctttttactgtagcaacaaactccgttagtaatctttcattgtatctacattgcacttctgaaagataatgttttttttcagatgttttttctatatgtatacactgtgtatacatacatactatattcaaatttttacatggtttagggttgatatggtctattatattttgagttttttttttacatttttttgctttggatcggttttagactaatgcaagtgaatttgcattctttaaaaattaatgaaaatgattttgtgttagtgttaagcaaaaatttcacatttagaatattaaaaataaatgcaaaacacaatttcacctatgccgaatttatagcataagagtttattaatttaagttcgacccatccaagattataagaataatctcttaattacaatccttttatttaaaggaaataccctttgattccaattacaatgacatgaataaatttgggaaatttggggtaaatttggaattgcagctgaactcagtcaatttaattaaccgagctgcctacataccttctttgtgaaggatcaagccacttgtagttcagaatacagtattttaaaatttggatataaggattccagtagatgaccactttcaggaatcctttgctatctaaaaatttagg

SEQ ID NO: 327426 - DNA, 901 bp, Cannabis indica
ataaaactaaaagtgcattttaattaatctcatcttcttgatgtcttgattaaatgtagtatatagtatgatctttgtaagaggatctaataggttgtattcaatatcaaaattttcctctattacattctcattagtcacaaaatccatacttttgtgaaattcctatctatatttttactcatcttagggttctagattatttactgtttggcaattgcatttgtattatcatgaaataagactagtagttaatccaggtctagaataacgtcagtatgtatagaactttcataattgtctagtaacatttgaggcaactttaatattcattctaactagtagagttagagattccagataaagtttttaaacttctccaaaataattgctccacctctagagtaattaccatcctaaatgtagtctttctagcattgatgtaagtctaagtcggtgcagcctaaacgaatttaaaaaaccacccttatagactaacatataggtcctttttaattttaagatttatttaattgtcttccagtattcttgtactggataagactgattcctactcataactctcactcaacagtagttgtctggtctagtgcacactaaaatgtacataagaccttttactgttgatgcttaaagaattcttttcatggcatttatcttctggaaaagtgaaattgttcctaagataaataaactctatgtctggaagtcaaatatcctcctttagagttagccattaaaaagttctctaacatcttacttatgtaaggtgcttgcgaaaaaaaaaagtaaattaccaagtataccacaagccataggtttagatgattccatcaaacccatgatgttagactataatatagtgtatgtaatatagcat

SEQ ID NO: 327427 - DNA, 532 bp, Cannabis indica
aggagagagagagagaaagagagagagagattatagtctcaaagcaaagttatttataataatttccaagctataattgtaattacaatttaaagagaaccctgtttatagttgagtgagaaagataggtttccttttatatatgtattgttgtttgtaaatgtatggatgtgtgtgtacatatatagagggatgatatttgtaggaaggacaagcgtccaagacagggtttgccttgttgtccatcgttggtatatatagaaagagaaatggagttattgtatagtagtagtagtagtagtattgttattagtagtgagaaagagaagaaataagagagaaagagaccagcagggaaagctgtcgacgctgacccaaacgagggtagaaaggcttctctctcttacacacacattagtctctagaagagtcaaaatggacagctttgggcatttactctcatccttattcgaaaaagtcagctacacttagactcaatacacctcacatcactccctctctctctctctct

SEQ ID NO: 327428 - DNA, 1004 bp, Cannabis indica
ctaaagtggagattgttgaatttggctcaaaagtcaaattatcttaaaattgtaattatattattcaactttcaagaaatttgggacttgttatttgccacatttatcaattaagttatgcaatagcttttgacttatgctttctcatttattacatatggttggaactatctctcattaattacaaaaaattaggagttaaactacctcttattattacatataattgagagttgagattttctttttataaatatggagttctttaaagagcatttgtaattaaatacatagcaaatcagtgtgagataattcaatacataacaattcggcgtgtacaaattcagagtgaacaattcgatgtacaaattagtataatcaagttcaatgggtaatcttaatcaaaaaaaaaaaaaaatcaatggataatctaaatgagagagtatttgtatatccaaattttaagaaacacttaaataagtttggaaaacagaaatactattaataaaaaaatttatgtctgtattctgtgtattttctaatcagattaataatatcaactgcttgtggaataagtgaattgccaaaccacgtaatgtgtatttattattttaccgctctaatatatttatgctatctttccgtatttattgcttccacacacaacatatcctagccttgcttcttcaactaccagttccaaatttattattccagcaagaaaacctcaatataaattatcttcccctcttaaatataatcttaagtaataaaatgtaaacactttttaaaagattacacctgaataccaaaccaattataatctaaacactagtccaagaaaatctacaaatactagtataaaaacttaaagtaattagcaatttttccccccgaactttgatatgtactaaatcatgccccctgaacttttttagccgttaaaaactactccctgaactattaagattattaaatttaaggactttatctaattttagtaa

SEQ ID NO: 327429 - DNA, 879 bp, Cannabis indica
ttgtttcatcaaaaatatcgaagaaaaacattatagaaataactaaaaaaaataaataataaatataaatttatcttaccttaaaaacaatataaaaaatatattttatttttctatcattagggcactcctaatagctaaaaactgtaacttcgcggcccataatgtggctaaagtgggcgtaggcgtttgccaacaatgtcatgggcatggtagacatatctactatacctgttaatatcttttgtgatgaccatgagatctaacttctaattttattaataaacactattttactaaaaaaaaaaaaaaacaataattatactttattttaaaaacataactaattttgtttttatagtatatttttatattacaccatacacaactccttaatttaaaatacattactaaaatctcacatttttaaaattttaatatattttattcatttcaaatatgttaaattaatatatacacatatctcaatacaaaaataattattaaaacccaaaacaattaattaaatatatttagagcaataataatttttataaatgtagaacatacttagtaaattttaaagaaattttaaaataaaaaataagtttagaacatctgtaatagcgtgtttttagtacggttatttagattttttaaagtttctcaattttaaaaaaattgttatgagtactctaactattacattgctttcggtgcattgaaggtttttggaactttaggcgttcattgcgtcttacttttgtatttctctcattcaggctctacttgcttttttgggtctctgtaagaattctgccgagaggatatatatatatatatatctatctattttatataaagtgtgcctatataact

SEQ ID NO: 327430 - DNA, 614 bp, Cannabis indica
gttaagaaaaaagagttaaagactacttaagccactaaggctagcttcgtggtgagggagggatgggaaaaagggagaggtcatgggttcaaacccaagacctttaagctacaagttattaattgattgtaaaataccattacgttacactaacaaaaaaaaaaaaaaaagagtcaaagtgccaagggaaaaggaatgatgcgaggtcaaattgggtgtggaaatttaaactgggatgaattattgctacaacaaatttagcattctggctagtgacatggacaaagtgcagcagaattttctttagctgaaccagcgtagaggtggcagtcacttaaatttatgccaacttactgaacgtgagaataagagactaaggctggtgagccaagaaaaaaaaggaaatgggcttctattttagggtattggtatgtaccctaatgacctaacaactaaaaaagaagtacaaccaccattaatgaagtaagttgccatttttgaagaagtattaattgcaaaaagaaaaaatattgaaaatcaagtatctaaaagaggaagtcagccaaggaagaaggaggaggatacaagcttcattagtttgaatttctattctt

SEQ ID NO: 327431 - DNA, 2527 bp, Cannabis indica
aaggattgatgcaaacacaaaactaatatccaaacaacataaccattagtaatttctactgggcaaaactgtcaatcatttttttctttgaaaaattatttctaaaatatatacattctttaaaacaggaaacatgtttaaacaaaatatgatacttgtaatttcataatatatacatatatatacacaccacacactaggttggaaaagaaatcccagagcagatgcagttattcatatatctgataaatactctgcattttaatgatcgatcccaataaatttgcttaatacatatacatacaaacatacatatgtatgtatgtatacagtttcctccgatctcaaacttgacttatacatatataccattgaggactaaaatggatgatcacaaaacaaagaaaaaattcatgcatatattttttcaaagatgtgaataaaatttactctataatattttagagttttgagccagcaaataaaatttgaaataagggaactaacagagtttctgagatgttgagaacaaggatccaaatttaatttagcaaagattgtgagcaaggttgtagcaggctgttgtgtttgggcgtcctctgtatttatttcacctcaccaacgagaaattcaaaaacgtgagtaagtatatataaaacaaaacaacacaaacaaaaaaagaaaatattcaaagggtgaaacccagtcaacaaaccaatcaaagaaaaacgtaccatttagggaaagttaatttttttttccctggaaatttagaaaaatttaattagaccatgtttgaaagggttttaaaggatctggcatcagctttaccaatagtctgtgaagaagagacagaaaactattaatacaaattcaaaattaaatattgaatacatccaaatcattcacgtttagggaaagttcttgattcatgaaactaaactacaaggcaccaaaaaatgataaaaaaaagaacagagaaaatcaaaggtactgatttacttgattcttcaacgtcagactcacgtgccattgatttctcgactgctcccccttcatgatgagaaactactcttaccgtagtctgtgaagaagacacagaaaaccattaatacaaattcaaatcaaatgttgaatacatcaataccattcacgttttgggaaagttgttgattcatgaacctaaacaacaaggtaccaaaaataggataaaaaaagaacagagaaaatcaaaggtactgggttacctgattcttcaacgtcagactcacatgccattgatttctcggctggtcccccttcatgatgagaaactattcttcccgtagtctgtgaagaagagacagaaaatcattaatacaaattcaaatcaaaatttgaatacatcaacaccataaacggttagggaaagttcttgattcatgaaactaaacaagtaaccaaaaaagggattaaaaaaaaaagagagaaaattaaaggtactgatttttacctgattttcaacgtcagactcacatgccattgattcttcaactcttctcgccggagataccttcacttctcgatcgtatgaaaagggcgcaatgcaaactatttttcattaaaaatctgaaagaaatcaaatttatggaaattcatgagtttactttaccgcgggattggtttggacccatttacttattaattatttttttaaaaaaaagtcgtgaaaattttatttttattttccatggttgattttatctgagtcgggtccgatataggtccagcactgtggttggggtccaggatttggggtttggggtcaggattcgagaccgggtccagttccacggtctgggattcggagtcgaggtcagggtatgggtccaagtttggattggggttcgagtttaggtctgtgggtctggggtccgggttcgcgtcgaggtctgactatatatatagaggagactttaattgttacataaaatatggttacatttaataaatcggatgacaccttaaatttactaccaatttagtaatttggagggtttttacacttttactactaaaattcgaagcttaagatggttaaatacaagtaaaatgatatttgggagtgtttggtcgcgagaaactcataaataaaatattataaaaattaaaatgattaaaatataaatttagtgtgcgtttggtaacacttttttaatcagttttttatttttaaaattagaaaagtgaaatattttttaaaaatcatgttctataaaatagttttgacttttcaattttcaatttttttgattgagaatcaaacttttgaaaattttgaagaaaaataatttcaattttttttttaaatattttttttcttaattcaatattttggactttcgaccccaacttagaccttggaacccaaactccagatcagactcggaccccgactcagaccacaaatcaaacttaaatctcggactggacctgaaccacagattggacccgactcgaaccctaaacacggaccgacacagaccct

SEQ ID NO: 327432 - DNA, 923 bp, Cannabis indica
aaaatttaaatcaccattaaagaccaagggttgagctctaaagcttaaaccttgtctaaacaccacaccaagccaccaaatcagcttaaaccaacttaaattaactcaaatcaactatagaaacaaactcaaacaacttgaactactacagaaccctaatacaaaaattcatgcaacaaaacctattaagaacatagaaaattcacaaaggaagaggctagagagtttaccttgaattactacaccatgattcttctataacacccttgcaatgaagctgaataaaatatctagctgctggttcactagagggattcaagagagagagggagtgaagagagggaaggctagtttcttaatttttctttaatgaataatgacaaaagtaatgaacttaggtataatctactaaattaactaaaggataatctgaataataaacttaaataaatctcactaaaagacaaaaggaactccttggcaaaagactattttgccctcctatatactaaacactacactagccacttaggggtattttggtcattcccaaactctcaactattcccgacattcccaaaatctaactatatttccccgcaactactaaataccaaaatgtgattatattggccaaacgtcgtgttccaatgttgttgggcacaaaacatacagaaacataaaattttatgtatggcataaataatacatcctgaattcaaataaatatccataatataataaattataattattattctagtttcataattaaaccctaactatattccaaataaaaataaagcggtctttacaattatcccccgttaaaaggattttatcctcaaaatctaacctgaacaattctggatatgagccctcatgtctgactctaactcccaggtggcttcctccaccttact

SEQ ID NO: 327433 - DNA, 556 bp, Cannabis indica
cctatttccattccaaccccaaagaaaacctctacaaagtttttcaatttcctttgttatactttgagggagaatgaagatactcatccaatagttacggagtcccagtaacacagaatgaataagttgggatcttcctgcaaaggataggtgtctgcttgcccagctatggagtctttgcttgatcttctttaggatcacattacaatcctccgctctccattttgttggtctcaacggaacccccaagtatttaaggggaattttccttcagacaggtttatctccatcagaatatcatgcttgaccttactttcaacccctcccaaataaatttgggatttattagtgttgatagcaagacccgtagtagcatgaaattcattcaaagtatccttgagaacctgaatcgattgcatattacccttactaaacaagatcaaatcatcagcaaagcagagattcacaattttgaggcttttgcataaggggtgatacctgaaactgggcgtattggctgccatggacagtctccttgttagatactccattatca

SEQ ID NO: 327434 - DNA, 731 bp, Cannabis indica
tttttgtgaggttataatacacaattaatgttagttcttaaaacttcaagagccattttaaggacatatatttaaatgtatgttcttaaaaagtattttaaaagaggtattttgtaatagtgtgtattgaatcttcaaatactgctcgggtcagtttttatggtgtgcaagttagactattacacagggccttaaaaaagaaagagcccaatatatatttttttccttaatgtcttttaggttttttttctttggaaaatttataccccatactatcttttctaattttatttcaattttactgttacccggtaattattacatttttactgttccattttaataatgatatactgtttttgtagtaaaagaaattttgttctatttttaccacacgtggcagctcaatatgtttgtgtttttttattgtattttaagttttaaaaaaggtctgatttgacttgtgttgtcacatttgtgacattatttcttttctttttcttttaatttaatttgatgatgaagtactcattatgtacactacatctattacttctcattattttctttgttcatcatcttctttgtggtttttttttggtttcaaaattcataggttattatctttgtttttttttttccactctcttctttatcaagttctctctatttctctccattaacatattagaatatttttattatggaaattattttctaattaaggaaat

SEQ ID NO: 327435 - DNA, 707 bp, Cannabis indica
taaaactaacactacgtggcttggcacgtaacaaccacctagtatatatatatgtataaatgaagcgtaattattcaagaaaaaaatattttactgaagaaaaatccgttttaataaatataaaaagtgacaaaatatgaacggattataagtataactatataatcttggaatgttatccaaatatattttcatttataataattaaattaataaacaatatatttgttttcttcatttattaattactagactcaaaaagtgtcacatataaatttttatatatgtggttaattaattaatatataactttacgtcaaaaaaattatatataatctaattaattatatttattatccagtgtaatatacattttttttttcattttctatccttgaatattatataatactactcttatttgttataatatataccaaattaattattatttatttctgtccagagttgattggagaacgaattctgtaattataatacttgatatatggtaaaatataatattgaagaaattttttaaaacaaatacacaaaagataaatgttcagatagtaataataattccgaagacaaaaatgtttttttattaaaaaaattaagatagtgctattattatgagaattgctaaaaaataattattagtgctaatacttgttatattgttagttattagtataattaagtat

SEQ ID NO: 327436 - DNA, 409 bp, Cannabis indica
ccctatctttggccgaacccactctctctttcttcttccttaaatttcgaaaatccttagatcctggtaaaataaaatccaacaaccaggtgctaaaaaatcatcttgttcttaatctgattatgatccctcaaacatgtctgtggtatgtctagttgatgacctgatgaaagctttgacaacttttcactaagacggtcttagaaacaaaaaccctagtagaggatgttaacgtgggccctaggtgaaaccctaggtgcccaggttgcctttcgagttgcacgttcctataatttatgctcctaggccctccattaggttgctccttgtaataccctagaattatgaaatgaattagcaaaaccctaactagataattatgaataattgagaaattatattattatat

SEQ ID NO: 327437 - DNA, 1308 bp, Cannabis indica
ctctctctctctctcctttttatgacttctgtaagagcttatgttagattgtcatcgtgtttgagtaatttcggtttaaatgttttattattattgagttttatcatttcttttgtataaattcttgtcatcaatcttgctccattttcgaacttcgatcaatacttttaaccaatttattataaagagttattatgttgtgtactgaattatttcactgtttgttctttatctaaaatgaaacgttaatgttgttcagacattaacctaaggtttatgatatgacgataatattagtcctaagtttaacctaaagttttgtaatgccaattttgtaagacatatcttgactattttggttgaggccatcttatcttgcttcacctcttaatcagtctttgactactaatttcaagataattttgtttatctcaagtttaatatatatttaacagttgtcaactactacttttgattaattgtgtttgttctttgttaattattagtgccatttatgtaaatatatgacaattgtctttcctatgtaaggtgagggcctctaataatattattggtgccatttatatacatttgatcttgaggcaattctaaaagaaatactatttcttatcctttttgtcgattagataattatattaatgaatgtttgtacatgcttgtggcaattagatctaaactttttaatagatttcgttatcatattttcttttaattttttgcatgcatcattatgtagggtgtatttcgccaaataagttattgattgtgatttagacaatatgatgtggagtatgttctttcaacaaatacactataggtacaatatctgtaattacaaatttacaatctcttagtatcactggagatgaaataatggatagatgcatgtaaaaagaaaaataaaaaattatatatttgttcattctttttcatcagattattataagtttcctgttgcttaagcttaagtgccaaaattttagaagaaagtaggatcttatctttattatctttatgtgatcattttatactgcaaaaattgattgtaaaatataagcagtgtgtagttactagagaaaaatggttgggagagagtagtaaggaaactaaacatttaggtaccgtttggtaactcttttattttctaattttttaatcacaaaaaaaaaaaaaaatttttgtttttaaaaattttagtttttgaaaaataaaaatgcgttctgtaaccacttttgtttttcaattttaaaaacaaaaaacaaaagtgtgttctgtaaagtttatttt

SEQ ID NO: 327438 - DNA, 1438 bp, Cannabis indica
aaaaaaaagaaaaaaagaaatggtttacctttgttaccaacatcctggacattaatagagatatctttgttcacggattgggagacctcggtcgtatattcggcattaggggtttcattggaggagttaatctcagaagaaaagagcctgaagcggagtctggagcgagtcgaagcggggtgtaggaggagtgaagggttgggtcctggaatgggagtgggagacgaaagaaaatgatttcgggccaagtgagagacatttctgagcagagaccgcttcattggtgcttttagggtttaaggttttcagccctgggttttgttcatttactttcctcatttttttttttcttttttcttgacaaactaggtaacatttgtttttcggtgttacattttaatttattttaattatttattaattttagattaattaagatttttgtctccgaactttgacatgtaccaaatcatgtctcttgaactttaaagaccgttaaaaatttgttgaatttaaagacattggtctaattttagtaagaaaagtctaacatggatgaaagtttaggggtatgatttggcacatgtcaaagttcgaatggcataatttggtaaatatcaaagtccgaggagcatgatttagttcatggacaatcatcgaattagttaaattgaatgaaattggacaaaagtccttaaatccaacaatctcaatagttcagggagaatttttaattgctagaaaagttcaaggggcatgatttggtacatatcaaagttcagcgagcaaaaattctaattagccttaattttattttatatttgttgatttattattaattaattacttattgtagaaatttaaaataataaaatgaaaacataaattttaaaatacctaaattaagatcatcgtatctcacttttaatcatgactatattcaaagtcgtttgtcatcaccgttgtgtagttgtgaatacatttaaagtcaatgtcgtcaccgtattttactgcagttgccattacattaaaaatcgttattatcaccatattcacttgtagtcaccaatatatgtaaattcattcattgaaatgttaactatttattcttctagttttttcactaagttgtagccaaaaataaaattttatagtcatttttaaattgtttatactaacttgtggctgcaacattcttcaaaattttacaaattgtgaaaagaactcttaatcagtaggctctaaacttataaactaaagttttcttttttgtcgcatgttttatataattttcttatcaataaaaattatttattaattttctattattcctaatgttgagagagactcccacattatacaaattctaatatttatttttaaattatttgttttattattaactaggatgttagataaattaacaattaacccaaga

SEQ ID NO: 327439 - DNA, 1628 bp, Cannabis indica
ctaaaagtaacagttttttgtagtgattataaactataatatttaaatacacataataataatctcacctaataactaatactatttttttctttaatttttaattgtatcactttcaaataacataaaaaaaaaactagcataaaatttagtatacgtgcctggcatgtaactttttgctagtctaaatatatacacataaaataattagtatccaatttggattaaatacttgttagtaaatatgtaagcaattaaaattaaaattagttgtaatgtaataattgagtgaaaaaaaaatattgaatttcaataaagtataataaaaataaaagtatgattaatgttaaaaaaattattaaatggtatttaaaattaggggaattactccataaattatttttttttaaactttttttcaaatttacggtttgggtttctaaagtggttgcagtgctagttgcaataggagtttctgtacgattttttgttgcaatttaggttgcagcgctagttgcaatatgggtttctatgtagaattttgtaaaaatacaaaaaaaaaaactattttaaagtgtaaaaatgaaaaagtcccataaaattattatttttctcgctcccttttttttgtttggtattaaagtctttttttttaaaaaaaagagtcaccatattacatgaaatatattttaaagaaaattgtaatgattgtattaagtttatattctcttattacatgaattatattggttatatataataattattgttagatttttggtatattactttttctctaacaaaattgactattatttacgtttcttagtatagatatgtaaacttctctactttttaaccctattatcacccatcgacaaactatatgatactaaaactttaagaaaaaaattacattgtatacccactttactgtaattttttataattttaccttcatttccaaattcttttaaaatatagtcacttttatagatgatgtctatattataccccctagattaatgtaaatcatgtgctacacttaagtggagagtaagaatatattagtcaatccattcataaaagtgagtagattttaatgaaataaaatataagagtatttttaattaatagatacataaaagaggtattcctcaacttaattatcccaaactttaaccatgagaacaagacaaattaagaatgggagaacaaataactaaggaaaaaaaagtgaattcaagagatgctaaatattatttggtgttcaaagaaccatatgatatatcataaaaaagaagttcatcaatttcaatctttgcaataagaaaaatactttgttataataaaatttaaaaaatgtcatactatcatattaaaaaaaaactaaaattaattgtaatccatgaaaagctcttgggttcatttacgacaaccaatttatgagaattagaatttggtttctaatcctcttatagtgacaaaatatcatgatcataccaaaactacaaagcaaaacttattgtttcaaatataattgaaccatctttttgttttgttattttcattaattatcttttcatttttattttaattcaaatacatgttatattagcatataaaaa

SEQ ID NO: 327440 - DNA, 962 bp, Cannabis indica
caaggagaaaaaaaattaaaatactattttaatcttgatattacaagatctgaccccacagtgggattcaacttctccaaaactcttgaaatcttcactgatatcatcctgttgagaagtcgatgaaacccagtagaaaagtcgatgaacatatcgtgggtggagggtggtggatgtttggtaactagttgaacagtcacgatgggcattaagcaagaagaagaataagaagaaaaaaaaagaaagaaaaaagattttagcggaagtggagaaagtaattatatgatattccacacaaagaacaaatatttagtaatttttttattaaactgctatttattaaattttatctcttgatgtcaaatatatgatagtttggttatttttaaaaatattttcttgttagttataagagataattaatagtacaaattcaaagcatgaagaaaagagacacccacaaagatggagacatttaaaaaatgttatattctgacttagccaaacttctatttatagattttatttaaaaaaaaactaattatgtgtgtctaaatttttattttgatactttttcatggaaaatgtggaaaaattgatgaagcactgtgaagaagaaaactgaggagagagaagagatgagaggggagagagaatataatatttaattattcctaaaaaataatttaatggaactcaaatactaagtggtattatacactctttcatttttactgttaaatctaccatctatagccacaaaaacacccttatgaaaagaacaaaacaatgatctctattatagacatatcctatatgtatagggcccgtttggtacgcaggattggattggactggacaagattggattatgctgaaagtaatcctatatttggtttaagaatggactcgactattttatttatttccttttaaaaaaagaaaaacttaaattaaatata

SEQ ID NO: 327441 - DNA, 525 bp, Cannabis indica
atatatacatatgagaatattactaattacatgatcatatacaatatacagccatttatatatttttttcttaatctggatttcggtttagtctatcatcatattcaatttatttatatataattataggaagaattatataaatgtgtcaacacagcagagtcaaagaggaataaaagaatttgtaatggttgttcaaaaaaattggcattggatattttgatatatttggtatagattgttattagtttgaggctcagctcagatataattcttcttaatttttcatcttattgcatttgaccctacccaacaaacccacccaaaatattgagtttgacccatacatatgacgccacatatagagatcaaatatactcaaaaaaaaaaaagaaaaaacaagaaaagatttatccataataagcatgatgtacaatgatattaatagtcatccataatcaaaaaagggtaaataccattttggacactctgttttacaaaagttaccaattggaccctgtgttt

SEQ ID NO: 327442 - DNA, 684 bp, Cannabis indica
gaagaagaatcaacaccttatgcctctattgaaatagactggacttgagcagggagatagtgatgatgagtcccctgctatttctcaagaagatctcgagcaagaaaaaagtgataaagaatctcccctacttctcgaaacaactcaagagtagagatagtgacaaagattctctctctgtttccaacaatgatcaggataggctagcaacagtgaagatgtgtcatatgagtatcctgaagatattgaccgagaaagcagcactgaagactcccaatgagagagggagggccttatatcaccacagaagcattagaacatgggacaaacaggttggagtttgctatgactaccacttgaatctagtgctggtaccaaggtattggaacagagagcatctgagatgatattatcaataaagcaattatcccctagacagttcgcttcacagtgagattcactttaccttgtgaaagtgaatcaatcgcctcctaaaccaacaagatgcaaaaaatttatctttaggagatccatatccaaggtatggcccctacactattattctaacatggcattagtgtaatggggatcacttcagctaagctttgatgaaaaacaaaattctgcaactactacttctttttcttttaacttagctcacgatgatgtaattgaatttaatat

SEQ ID NO: 327443 - DNA, 574 bp, Cannabis indica
gcttgactgtagtttatatgcaggtagcaatgtacgtttttattgtttttgttacataaataaactccattatcatttagcttgagctctaacaagaccattgctttttttgggtttcgaaatataaaggaactaaatagaatgcaattatacttgtcaatttcattattttttaaaccaaaacaaaaatgaaaattgagatggtgttgttttgactggattttgaaaacaggtggggttggagatgattgacacttttgctcaatcgcaaggcattgaaataaagacagttcattgaacagctatttttggacagagtatgtttctattcacttatttattatatttttggtacttatttttatgtttgatatataggtgtttgctttttctatttgctgggttttgttactgacactcatattttccttgtaaagcctcaaatctatccgaattagtgaatttgtatgtaatcgagccttattcttcttatttactatttttttaggtgatagaaatttttgaatatgaagtaggtatattatttttttaattggtgtctatataaaagtat

SEQ ID NO: 327444 - DNA, 1162 bp, Cannabis indica
gggcgttacaattttggtatcagagccactaggtttgtctaccgaagatcaccaagacatgtacaatcatcatcagagaatagctcggctcacgattcaataagcctttacttgtttagtattgtatgtgattagtaaagtatattaggaagcatagtagcttataattctttattttaatgtgttgccttaaaatccataagagcagtattaagtttttgtgatctttgtctgacctgcctgacttatgggtttgcaggctaagtcctactaaatggacatccaccaaaatacaaggagtcagggtaatagggtcgagaccggaggcggtcagggaaatcaaattcctagaatccttgtggacgcggtagaggtcgtgaaaggtttcagggtggtcgacatgaaaacccacctcaagctcctctagattgggagcagacattcgcaaaaatgcaagatcgtattctacaacaagatgaaaaaattgtgaggttgaggtagtagggtcctcctacagcgcctccaccacaagttcaggccgctttagttcttgtggtgccagtagaacaacctcttgctgacaaccatatagagccactgtacgaaagatttcgcaagcaggcacctccagtttttttgggaagtccagatgtgatgaaggctgagtagtggctcacggtgatagagaggattttgaatttcatgggagtcattggaaatgaccaggtgatttgtgctacctttcagttccaggaagatgcgctcgtgtggtgggagttagtgtccctcacatgagatgtcactgttatgacctcagaagagttttcagacttgctcaacgctaagtattacaatgaggcagtttgcagtgctaaggggaaagaatttactaagctggttcagagtgagggtatgtcagtaacagagtacacaataaaatttgatcctctggccaagttggcttcgggtattgtgcctacgcacttcagtttgaaggagaaatatctggcagatctaattgcaaagattagatacgacctggtaattaatcaattaggtaggctttgtgactttattgagaaagggtttggaatcctttgttggaatatgttttaccaagatctaggactgaacatcgggcgggtttatcgggtttcaggtt

SEQ ID NO: 327445 - DNA, 581 bp, Cannabis indica
attaagctcagggtcctatttttactattttgaaaaatatagggtccattttgtcatttaacaaaacacagggtccaatcagcaacttttgcaaaacacagggtccaaaatggtatttacccttttataattaagacgatcagtaaattaagtagcaccctatcttgctaagcactctcagtattgtagcatttttgatatttcaatttcggttgatctttagactgctaatttatttcattgaagttgatctttcatttaaaaaaaaaaagtaaatattgatactattaaatttgagcattgttatttcgtattttaagatgcctaacaatgcacgagaaggtattttataagggaaatttgattttctatacttattaaacttaatattttttttaaaaccaatacattttacactataaaaaatatgccaaattttgttttgaaaaccccaaaaataccccctcataactcaaaccctttctctctcctccctcactctcagccgactctctcaactcaccaacccaccacccacggcacccaccaccctcacccacggcagccaccaccctcaccca

SEQ ID NO: 327446 - DNA, 670 bp, Cannabis indica
aattttattgtgactaaaataagattttttatagtgatcattgacaaattaaaattaacatattattttaattgaattacatttaattatcatatttatgtaatgttcctacatttaaatttattaactttttaatttgattattttctaactttggaaattgtaaaacaaaaaatgtaatattgtaaatttgattatttaacaaaataacattattatcatttatttattttttttttaaaaaaaataactttttttattatacatatttacttatttttaaaatttataatatttgttttgatagatttaatcatataccaaatatagtattccattcaaaatatatatatagtattaatttatcccgttaccaaaattttattatgaagttaagacttagtaaccgttaaatttagtataagggttgatcttttgctctctcttgggatctcaaaacctaaacattaagagcatctccaaggagtacaccaaatttggtatcacactatcaccaaatttagtgttaaaaaattattctccaactacaacagaaaaaattacaccaaaaactattctttattattatattaattaaatttttaaaaaaaaaattaatattacgtcaattgttatatttaaataataattagtgtaccacttttaaatt

SEQ ID NO: 327447 - DNA, 568 bp, Cannabis indica
tagcagaattactttctgctgctgcaaacacttacagttttatatataactgacatttgcaaaaacacggtttttcagttattatatgttcacaaattaaaagggtacgtaaaaataaaacaaaagaggagtagggatgactgataagaaaaaaggggttatatcctttgctttatttatttatttatttttttgttgggttttgttttgttttgtttctttttcaatcttttatgtacgtatacacctttgcgaccaacccttgtatatcttcatgacttgttctgtggtgaggtttcttttactacgtaatggctcttaataaagaatcgaaatgtgtgaaaatatatttaatatatttctatttcacacatgacctcatatatctcattttttaaaaaccgccaaatttggttaaaagagaaataatcttaagttacatcacttatctaattttattgctcttcaccatatataaatatgtaattatattaattttgaaaagggttaatttcacaaatgcacaaaaacaataaaaaaaaataacaaaaataccgtttcacggaat

SEQ ID NO: 327448 - DNA, 1306 bp, Cannabis indica
tacgggataccccgatcgtttaacatagtaactggcgaagaatgggaacaccccttctttggtatggcaacagacaacataggttacaaaagtttattagaattaatattgtgggctaatataatcataggtttaataccataaacacaatcattaactatgtgcccaataattgtcaacaaccataatgggatggttaataattaataaatgtattagacgcacatgagagcaccctaaaactataattggcccattaaattatagtccaccactaattgtactcattaacccaataagcctaataaagcccttagggttaggtgttggatataaaaggggttaatatgtgtttagtatgtgaagagagtgtgtgtggtgataaggaaaagggtttgctatcataagctcctcttctactctcttggagatacattgaaggattttggtttcatagcaacaatgaaaaatgccaatatgggaggtatgtgttttcttattttatgatgctctaaataaaatatagatcttggttgatgattatgagtaatcaagactagcatttaatgtggtcttggttagctcataatcatagaactttaacaattagtatcaagagctgatatatttgattttagagctcatgaacttaacccatttttattttctgattatttttttaatttttggattaatatattttattaaagggtaatgtgagattaaatgttgtataatgagttttttttcaatttatttttgggactgttgctatatggttttatggtgaaatatgaagttttcataatgttcattaatggagaaaaacctattttgggtttataatattttatctattattttgtattttttgaattaaatgggtattaggaatgatagagtgttgaaaatgtaacaaaacccctcaaacggcatcagatctagtggccggaggtggtctatccaatcgggtcacaaagcgggttgcgccgatccgaatagcagacccgtagacccgcgagctggtttttgggtgatagggacgagaaaaatgacatgtcgtttgcctctgtcaggcaaaaacgacatgtcgtacgcgcatatggttcatcccccactgagaaaacacgacgggtcattttgctgacccttttggatgtcgttcgtggcaaacgacatgtcgtacgataataggtccagccccttgcagcgcaatacgacaggtcatttcatgacccctgctgcatgtcgttttcatcaaacgacatgtcgtatgacagttcaaaaaaaaaaaaggaaagaaaaa

SEQ ID NO: 327449 - DNA, 566 bp, Cannabis indica
cataggaaataaccatgtatggtgaaatcatcaagaaaactaatgtaatacttgaaaccattacctgaagcataaaaggagggaccctatacatcatttaaaatcaaatcaaaaggttttgtggtcttattttcagtgcttttgaaagtaaactggtgtaattttccagtttgacaggcattacaaaaatctagtggcttgcactttacatttggaacaacatgagaaagaactttattgagtacaggttgggaatgatgaccaagtctgtagtgccaaacattgccaaatttggacttgtcatgaacaggattacttgtggttgtatgattaagagccttgggtttgaaactgacagaggcaggaacaacaccttgagaattcgatgctgtgacttgaagcttataaagaccttcactgagatggccttgcagaagaacttgcttggttgtcttgtcctttatgagacaagacaattcatcaaattcaataatgacatgattatgtttggtgaattgatagatactaagtaggtttttggtgacactaggtacatgaagaatatc

SEQ ID NO: 327450 - DNA, 1171 bp, Cannabis indica
ctataatgactaaaatttgtattactataaatacaattattttttatttatttttattaatttattagtatatttaaagttaacattaaattatgaattatttatatatatttattttatattttaaagttaatgattaaagttatttttttttatattcttttaaacatattaataaacattgaattttgcataggttttacaattgtgtatttatgtataatatcaaaaattaatgtaaatatattaaataattatttttttaccaaataaagtataatgtttacatcttttatttgtattattaaaaaaatcataatagttcaattaaaaaaataaaaaaggaccaactaccaatttccttttctaaaaaaaggaccaactaccaaattccttaaaattaattgcccctttgattttgcaacttctttcttacaagaaaaaggggaaaccacattgatgtgcatattaattcatcacattactttgttactttttgtacacatattttgcagcaaaacacaactattatttatttttctttgaatttaagacacatttataaaagttcatatttcaggaaaattgtattttgtataaatatatctagatatatatatatcaatcatgggttatcggttacatactcttggaacattttgtgaattattaagaaaagttgatgagaaggtcctatatgtgatgctttatggatcagtccacatttttttggcaacacttattttattttcaagtgtatttatagtgtatacatgagcaattgagttaggcactaagaagtactcacttttgtagaagatgaaggtgccatacaaaagctcatctgccgtctaacagatccaagcttgtgtggtgtgtacttaatttttttgaagaaaatttctttattaaattattattttttaattaactaattaattaattaaaattagttttataaactttttaactaatgagtaaaactgaaacattttctcttcaatttttttcactaacgttcacacaattcaactttctctcttcgcgatcagaaaaatgactttcatccggttattgcattatgtgtgtttcctatataattgtgacagtcagtagtcccgtgatccgtaaggggaaataccgggtaaacgtgtgcaatcccacattgcct

SEQ ID NO: 327451 - DNA, 1106 bp, Cannabis indica
cttcgaagctcaaattagtaatcggatggaattgtgatgactgctctttagattgctcggttgtattatgtgtatttatataaaacgtataatatataatgtgcagaatatacgtatgtatatggaatgaatatattattaaatgatcagattgggggaggaattatagtacgtgggaagcacaacctctagaaaatactcaggacatggtaacacgtagtttaggtatatgatatacacgaaatctaaaattattgacttttttttttttgagaaaataaaataacataattgactttcacatatatgtacaacatttagaaatatatatgactgttattgaaggaatttagacgatgggaaatttaatttttcatgaatatattaattaaggtaaaattagttagaaaagtaaaagtattggtaattagtaaagtgtgtcaacatttagttatacctcaagttaatgcagatttttgttaattatattaatgcttaaatcgtgattgttttgtacagaaattaatagtagtaaaaaaaataaagaacacaaagcttttttttacgtggttttgcagttaaaattctgcatagtctatgagtctatcttattagatatttttgatacaatattacggctttttcgcttaaggattttccatccttttttcagtgtatcctgctcctatttattgttacataagagggtagttaattacaaatcaaactgatatcctacaacaataatcccctaaaattatgagattaatcacgtcccgcgtaaaataaatgcatttattatttgaaaatcacttagctgtgattggtccgcttttactgggttaatgcatatgtgtattaaaaatgttgcaaagtgtatcgtgttgggacatctcgctgcgaacatagcaacaataaccctggtagcgagctagagcttttcccatgtcttttcgaggttgataatgtaaatctcgtcgttcctgtgattcacaaagctccatcgaacaatctgttggattttatgccctaaataaaactcatttcaatataatcatatttacttattaatatagatcagaaataacatttaatgttgcatggtt

SEQ ID NO: 327452 - DNA, 1256 bp, Cannabis indica
tttaaaaattaattgaaattactttattatatgaacgtcaaaacttttattaaaaaagcttttatatcaacatcaaatattttgtcattttccaaaatatgacaaaaaaattaaataaaaggcagtataaaacctttaaaaaaataacagtaaaaattaaaaatttaaccgtctgacagtatttttttaagtaaaataacaaaagtcaatataccatataattttctaactattttatctctaacaaattgttaattatctttttagtaatgtgtaaagtgccctataattaatattgcttactaaaatgatattaacaaaaatatctctttgtttcaattaaattatagatttcactccaaatttaatttaaattgattctttttcctttttaaatttactactataacaaaaaataaaaaaaaataaaaattaatctctgttataatctttaatctatgtttgtatatcaaataatattggtttttttatttttagtaaattgccaccaaacccctaaatcttgacctaaaatgagcagtgagtttttttgttttttggaagaactaaagttcattaagtaagaaaaaaattgggaatcacagggggatcaccctccccttgatacagaacgttgtctagaaattctagcactccttgctaaactatccgcataaaaattgaaattacgattaatgtactgaaacttacaaaaattaaatctacgactataatctaaaatagacaggaacttgttgagggatctccaattcttagaacactggttaatggctagagcatgagtagtgagtttagatgggaagatagatgtgttttagttgttgtgtgtggtgcattaactcctattctgaactgcccataaccataggcaagagggagttggaagttgcatcttcatctccatttcttgctctatataaactttcttcttttttcttatttttagaaattaaagatatggtatttattattaggagtttttttagggtgtattttcaagaatgagtgtattggtacacttttttatgttttcaccatttagattacaattttttagaggaaattacacattttatgggtttttatattttttgtttgaaaatatggtttttttaagaaagatattttataataaaaattgaagaaaaaattgaaaaatataataaaatagtgagagtaaccaaatatccttagaataactagttctcttatactattttttctatattattcaa

SEQ ID NO: 327453 - DNA, 672 bp, Cannabis indica
aaaaaaattaaattagttgcgcaaagagctattatattactaatttattataatattgagacacatacattaaataagtgaaagccgtagtattagactttcaatttttcatatttggtttttgtttttttattttgacatacaattttttgaattatttcttgtatttctcttttattttatttttccttaatgtaaatgttttataatattcaattggatatattggcgttgtaagtggttcggctcggtgtatgcctccccagggatgggtgaaaattaactttgatgttgcttgcagccatcgcgcgtgacgattaattggcaagaaagtgagtgaattttgatatgaaaatttagattcctcttggttttttccttgagctgaaaaagagagaaagatagaaggagaaagaagataatttggtgtgttgtatttgcctaacttctacataatttctaacctatacatatttttctcttaaaaaaatgataaggataatgataaaaaaattgaattaaactaaaaatttatttagttaagggaagttttatttacactctaaaaatttctaagtacaccttatattaataatttttattttatataaaatttatatctttaattctactaagtatttttaacttttttctttcaatttatattcttaa

SEQ ID NO: 327454 - DNA, 718 bp, Cannabis indica
ctgtggagttctttcgagatgggctaccagaaaacaagatgcaccttattgatataggtagtaccaattagtctatttaagccctcttcaactgtgtagtcccatacctacacagtcttagaatcattacactcgaccttccccaagcgatgtggggttgcacatcttacccggtatttctccttatggatcacgggactactgactgtcacaatcactatcaaccaataatctggttgttaatgtttagttagttaatgcggttatgcaagttgtattgttagttagtttattatctcatcttgtaccacttatcagattatatgaataaaggctctaaactaactaattggttaagcttgaaagtataaatttgatgttgattttgatttaggattgatactagtattgatgtttgttaggttggattaattgcttatagtgatcttgatcaaagcttgatttttggtgtttctaatctactgtattgatggttgtggttagtaaattataatttctgagtttgagcatgttttgttgagtttttggtatgtttgggcttgagttttggttgctaaaaattggtattttttgggtttggaacccaggtgctgcggccccttctatgagcgtcgcgacccgccccttgaaatcctgggtgtttcaacccaggtgttgcggaatgcttggggagtgtcgctgtaacgtccccgcttca

SEQ ID NO: 327455 - DNA, 1751 bp, Cannabis indica
gagaattcttgaattaaacaccatctgctgaatgagtcctcatataatgacggttattagagtactgttaatatggcactgatgacggtttaaagattcaagttcgtatgttgctttatttaatggataggaaaaaaaaaagctatactaaatgtagaggcattaaatttcaagtagggaattttattcttcttttggttgtcccaattaagggaaatgtaaagttgagaagaaagagaagttaagtctcaggttaatcggtccgtttgaatttctggaaaggataggttgggtagtttatcagctaaccgtactccctgttttatctaaaatttccaatatctacttcaatgtttccgaagtatgaggtagaagcaatttacatatggaattatgaaaatattgaagttcaatcagacttgtcatacaaggaacaatcggtatagatattctaaattgaaaaagagaaagtgttgcggaaccaagactatatcactagttataatgttgtgaaagaacaatattagtgaaaggcaatgtcggagctgaagtcgcaatggcaagagctgtatcccgagttgtttgagtaaatttcggggacgaaatttctataaggaggggatagttgtaatatcccaaaaattttattgatatttacttggccatattttattaaatatgtaattatgtggatattagagtaagattacaatcttacttaagctaattacgagttaattagtggaatttgagtaaatgaataaataaagcgtaatttattaattacggaaattttattagaatatgtgggtatcgtggataccatttttgaaataaaatatcttcgggttcggcgatcgtgggaatttggcggaatggttggatatgtcatgataatgaattatggattagaatgggaattatatcggactagtttaaaattctaagttgtcggttttgtggaatatttagaaatgaccaaaatacccctatgttatgttttggcttaggtgtgcattgaggataaaatggtaattttgttaagtttaatcctttattttatttaatgctttagtattatcctaagctgaagttttattttagctaatacattaagtttattaaataagtttagaatggaaaagaatgaaatcaaaatctatctctctctcttctcttttcggctcaagaacccagcagaaaaccagggaaaagcttagctcacttcatcaattttctagcaaaatcttcaaccctaggagctaatcaagttgtggtaagtgttcttcatgtgttcttgatgatttcttaggttttgggtttgatattagttggggttttggtgatttcgggattaaggtattaaattgagattagaacaagtttctaggcttagattggagtttgtttatgcttgatatggttagaatcaaagctgttagtgttgagttaatggaattttagggtttttaagtttaaacattaagtgattatgctattttgattaaatggctaaattactgtgaattgacggttggattatgttgtgttggtgatattggattgatctggaggtgttgggcaggtgtggttctaatttggctcgagtttggggagaaaactctaggctgctgccctgccagaatcggtcgaccggttggctctggtgtatcagaaccggtcgaccggttgccatcaagggagagttttcaatttttttctccaggctggttttagggctcggggtggtt

SEQ ID NO: 327456 - DNA, 705 bp, Cannabis indica
cccctaaaagtaatacacaaattctcgaagtttacttttaggagcgacattatcgcctctaatacccctaaaagtcgctcctaaaaattaatttttgacttttaagggcgacatagctctaaagatttttacattaaaaaaaaactataatattagaaatattaatatttaatttatataaaacaattataataataaacaatcacattaacacatatatatacactctatacataaacacacaaataaatatatattcctaggcatactcacacacataaacatagatacatatacacatttacaattacatactcacacatatatacacctgtaaaaaatacacatatacatatatacctactcatatacacatataaaaatatataacattgtaaaaaataacatacacaaaatatgtattgattaaaaatatcactataaatacatatatcaaagtctaacataaaaaattacaaatttattatctactttctttttaaataactttttgataaattaattttatcttttaagtgatatatgaatacaaattaatcaaattattttgtaaaaatataaaaaactaataagattaatatatgaataaaacatgtaataaaaaaattatttataaattatataatctcaatacaataatacaattagtcaagtgcaataaagagaatgagagagagagagaga

SEQ ID NO: 327457 - DNA, 1323 bp, Cannabis indica
catacttagaatatgaattagtaggataattagcattaattatctataatttttgattttatatagtatgggcgctattttcaagaaatatgtattatcgttataatttctcaatttcaaagattttattaaactctaaaggtattatatatgtcatgtgtcaaattcatcttttttatgatttttgctcgaaaataatagaaaaattgacggatggccagaaagtcacgtgggttagtttagaacattttatcaagtgctacaatcattattcgtatttgaaatatcggtttagatgagattatggttttggagtatttttgaaatattccagaaatccaattatgaataattaggatttattatatattatgggttaattaagtagtaataagtaggattatgatcgtgctaacttaatttagcataaattataaattttgctataagtggataaataagcttaatttgttcattacggagatttaattgagatatgtggatataaggtaagttgtttgtttgtgaaataaaaatatttttaggttcggcgaccttgaaaacgtgattggaggccaaaaatgtcacaacagtattagttagaaatattattgggataagttgatttttagaaatagcagagtattttgggtactcaaaattgactaaatactttagaagtagagattttttagtgactaagaaataataagataattatgaatatcaaagtttttattaatattattatagtaacattattttatagaacttatcaatgcatatatatacaataaatttattatacatatataataagtttataaacagaagaacaaacagtacgatacgaaactcttttcctccttcgacgaaaatcttttccacctttatccattttctttaatttttaacccaaaacctagcgatctaagcttcggtagtagcgggatagcaaatcactaaagaaggaaagcttaagataaggtttaattttgttttaagttaaaaacgactagttttatatagtggctttgtgatttagagtggttatggagattctgacttcgtagaattattcttttgtagctatgggactagttttgatgtttacttgttgaatttgaagtgatttttagttagaaatcgagttcggaactttttaaagcttagtctgaacgttaatggcattttccatttgagggctcgattttaatttcttttacgtaaggatggttgtatttatgatacatatgtgccttgtgaagtttggagtgatttggataggttttggtggtatttcgtgttggaaatttattttac

SEQ ID NO: 327458 - DNA, 1753 bp, Cannabis indica
atgctatagtgttagtttgggctttggctatatgctaatatactttcgttcttatttttcggtatagtgtatttttattttgttttacttttcataatttttatcacatacaattaattattttcttgctaccacaattattaattattgttatcatttacatctcatctcaatttttatgttttttttgttcatagcttaatatttacagtattttcagaaagaaaacaaatagtgtaaattattttcttactactatgtttttgtcatagcttaatatttacacagtatttttaaaaaagaaaacaaatagtgtaaattatttgtctcactattatatttttcgtcacttgtagcttaatatttacactatttttataagggaaaaaaataaaattagcaaagataactataaagtaactaataatatattttaattattcatttcatatatatttcaattatattattaattattctatttacaaaaaaaatatattaattattttactattttaaaaatgtggtgttgggttaataaatttaaaaacatttatacccttctatttagagactattctaccttttataaaactaaatatttatttatttttttaattatgttatacttgctatttataaatcaaactcttagcacttttgtcttattaagagtattaaactcctatcaaaatcattattagactttaatcaatcactttttcttattattttatatttatatatatatatcttttgctaacatatatttatagtatagaagtttattcatattatatatagggaaatttaaaattctatacataatatataaactctaatattatttccctaaatctaaatgttataccataggccatatatgactacatttcctatattcccacaatacccctcacatttgaaccaaacaattccaaaaattctctctttctctctcgcccaaacgaccacccacaacctccacggctcaaccaaagagcacgggtccgacacctccacgacctccgacgacctccgatgaccacccaacccccctctctcttcctctctctcaacccgtgcaacccaccgaaaaccaaaaaaaaaaagaaaaaacaacaggtccgatggtccaatggtcgaactgtaatggggtccgatggtcggactgtcataggaccatcggaccccatgacagtccgaccatcggacccgttgttttctcttttttttttttggttttcagtgggttgcacgggttgagagagagagagagaggaagaggaggggcgctgggtggtcctcggagatcgtggaggtcgtcggaggtcgtggaggtgtcggagccgggctctttggttgagccgtggaggttgtgggtggtcgtttgggcgagagagaaagagagaagctttggaattgttaggttcaaatgtgagggggtattatgaggataatgaaaatgtagtcatatatggcctatggtataatatttaagtttagggaaataatattaggatttattatgtatagaatttcaaatttcccttctcaaatagacatagtctaacttgagaattataattgattaattaaaatcaattaaatgagtcttacaagtaatattgtctcagctagtgtggggaccatgggtctatatatccgagctttcaataagcagatcaagaatttacaacttaaatttactgacttattaattcttcattgaatccacgcatagaaattagaa

SEQ ID NO: 327459 - DNA, 755 bp, Cannabis indica
ctccaaagtccattatatcggattaagatccgaagtttacttgtaaattctggcagagtattcaaccgggatatgggcaccaaacagaaattcagtacaactttccatcctcagactgatagacagtccgaaaggataattcaaatactggaagacatgttgcgagcctgtgttatggatttcgagggctcctagagcaagtacctgccactgatagagtttttgtacaacaacagttatcaaagtactatatggatagatcgctatgagatgttgtatggcatgaagtgtagatctcttattcatttggatgaagcagaagaaagaaaatacctaggtccggaatcagtgcaacggactaatgaagccatagaaaagattaaggccataatgcttgcctctcagagtaggcaaaagagttatacaaattcgaagtgcaaaaatatagaatttcaggtaggagatcatgtattcttacgggtgtctccaatgaaggggatcagatgtttcgggaagagagccaagttatgccctaggtttatagggcctttcgagattctcgaaaaagttggactggtagcataccgtctagtcttgcctctagcactttcatcagttcacaacgtgtttcatgtatctatgttacggaaatacgtttcagatcccactcatgtgctgagttatgagaatcttgagcttcaactagacctatcatacgaagaacaaccagttcagatcttagacaggaaagataa

SEQ ID NO: 327460 - DNA, 888 bp, Cannabis indica
attggtgaacaagttaactacagagatgaaggatttcttcaaaggaaaagatgccattctaaagctgcttaaggagttcaaaacattgctgtcctcggctgatctgctgctcactgatgctgaggagaagctcatcaaagacccaagagtcaggaagtggcttgatgatcttaaggacaccatttatgatgcagacgacttggtttacaagatcgacactgaagcatggcgaaaccaactggaaggttgtagtcctcatcaatctcatagcggctgcacttgtactagtaaggtactaataagtcaattatagtctaaattttaaatttcaacttcagtatctaaataaattaaaaaatataaagtatgaattaaaaacggtacatttaatcatattttctaataaaaatggtaaatctgtttattcaagttattcaatccacctattgtattaattgggtaatttggtttggtttcagcagtttatttgaattagagtgtttgtaaaagaattgtacacccccaaatagttatacaattccttactctttcactatcaattaatctatagaataatacttgtcaggcactcatgagactcttctcatcaactcctttaacttcttttgataagaccattaaacccgagatagaagagacacttggaaaattgaagcttcttctagacaataagcatctcggtttggaacgtgtgaagaatcataaacttccagaaagggtgtgtgctcctttggtggaagaatccgatgtttatggaagggatgttgacatggaagctattgttaagctgcttcgctcagatgatggcaccagtggtgacaaattgttagtgatccccatagtggggatgggcggtattggaaagac

SEQ ID NO: 327461 - DNA, 802 bp, Cannabis indica
cctggttcgaggaggttccagcgccggtggcggacgtgggcgccgtaaattcatgagtgattctaatcactttgtcaaaaaataaataaataaataacacattatattcttttaccagatttttttaattatggtatgtttgcaggattcggattaataagtatggtaatcactcattttcatttgtttactttatttaatggtagaaatactcaagaaaagaataggagaagttttcctcccaattttttcaagtatggactattacgggtaatgctatattttttagtttatttatttattttttattattaaaaataagccatcaaatattatataccccaatatatatatattatataccttaaactctaaccaaaccacttttctattctctttcgtttctttttctacagcagcagcattatatcactctacagcagccgcataggaacagctatcaaggtgagtttttctctttcatttcattattttgtctaatgatacaaaagtgatgtatataatttttgagaggagtgctaagaacactctctatcacaccctcttttgcactctctatctaatttgatggcaaatgtcatcttttaaacaatgtttagttttacttaataattagtcatacttttgtacttttattacaataataccattctaactaacttactcaaataacttctatttattgaagagaaaaaaatatttagaaaaaaggccataataaaaaaaataaataaataaagctaagttttaaaaatgttacatttatttagaaaatgagaaa

SEQ ID NO: 327462 - DNA, 530 bp, Cannabis indica
tacaaacctatatactttccacgagaaatatctcatgtaaacgaataaccaaaagaaatacagagaaaactcaaccatttaaaagatcttgacgacgattggaataagtttacaaaagcaccaattaacctcctatttcatttgtggataaatcatattccgcgtgttatagtgtaaattttttgtctaataatacgagtatagtttcatgaaaagctttcacttggatctaattttcacagaaaaagatgatttagtgcaagtgtacacttgtctccacccctgtactgttaattgcagaaagtgttgtaaaccgtagaaagtactgcagaaagtgttgctaaacgtaaaagatattgttaactgtagaaagaagaagtgtgaacacaacaaccaacacaatcaaagagaatgattggttcacctcgcttgatgtgaacttgtgagaagatgcgaccgagaaagggtctaatcgcatactatgccccacatagtaaaaggataaggagggccgagagaagttaatactg

SEQ ID NO: 327463 - DNA, 511 bp, Cannabis indica
gccaaaaacgacagtataaccctcgcgcccgcccgtttggcatggcatggaatgagaaactaggattaggttaggactaatcctgtatttggtgaccaaaaataattcctcattttctagaatataattcaataaaacaatcctcctcctaaatagtttggctaaaaagagtcggatatatcttcaataaatataaatattgtgttattgttcttttaattttcgcatgtcacgtggcactaaacagtctaatacatctcaagtatgtacacagttaatggggtatatttactcaggattccgtccagagtaattcatagccaagccaaacaaggtccatgccttgcacttcaccaaccgaattcaatatgtcaagcttagttccataactacgtaaaaaaggaaacgcgatatcagaagatctcataagatatttttcccttaaataatctccacaactataacttagttaaaataccctattttccatgaaatttatttttattgtcac

SEQ ID NO: 327464 - DNA, 1667 bp, Cannabis indica
atctttaccatgtatactacatacatccgaaactagcatactttgtcaatgttctagaaagaacataacacttatccaaggtgtaagtatacttttatcgctgactatcacatcagtgtaaatccagtgcactgatgaattaagggacattatcttttgaagcatataatcacaattaccttccactgtgtttacatcactgtaattgtgaataactatatgttctggatttaacagaatttgtacacattaaaccataaacatgaaaactacatgtaaacataaatgacttctaatcttctaatgataacaaatcagattatatggaaatgagttttatttagggcttaaaatcccaacatatacattataccaatgtactctgtaccatatccgtacaagtgttggtagtgtaacaaacatacaagcatgcatatacacttaacatgtacatacatttgcatattcatattacatattatacacagttcttacctccttttcgaactcaagtgagttggccaacctaaacggaaagtctcgtgctggatggatgccctaatcacatattaaaaaccgggtaaatcacatgtcaaaaccctaatctgggagacccgaacctacaagtcaaggttctattattactaaaagggactacagtatcctaggaaatagggaaataccaaactaaggcactaaaatgggcaataattgagaaaatgagttgttcggggaatctgtcaaaatcggttaaccggttttacaggacctggcaaatcggttaaccggtttgcaccaagttttcccaacaactccaaaactcactcaaaacttatccaaatgccaccaaaccatccagagtacctaaacagggcatacacaacacattccaaccaataaaactcaaaaaagtacccataatcaaaatgtgccatggatgaaccaagcttgagttttcaaactcaagcttgtgcatccatcacccaaaacaaccaaaataacaacaaaagctatttccaactcaaattgaccttaaaattcgaacaatacataatccaaaccctaacagcccctaaaactcaaaatcacatactcaaaccaaatttaaagttttaaaaacacaagtctatggattatagggttaccttggcttgaatcccacttgaattccttgctgaaaacacaaaaattagcagctaatccccttggttcttgctagttcgaagagagagaagggaaggagagggtgttttcttgattttttggctttttcttattttccttaatttcctaatgtgaataaagattaatcacattaatctttgctgaaatggtgattgctaggtgtcacttcccaaggctgccacttatttcccccaattgccaaattactaaaatgcccttttacttacaactcaagccaaataaagtctaggggaaaaatgatcaaaaactataaacccgctcaaactagatattctattctctccaatatacatcccactatgaaataaggttccagacttacccatgtgattaaactagccatccatcgcattttttgttgtcaccgaacgaaaattataaaaataacataattcatatataattcaaataatacacttagagtttagtaaaatcttcagaattgagaaattataactcta

SEQ ID NO: 327465 - DNA, 634 bp, Cannabis indica
ctctaccttatggctttttttgaatatgaaaaatgagctgaaggatctctcattttataggtgaaggaggtccttgaaaataagaataaaacaataaaaaaatacaagttggctatttttaaccgtagatgatgatcttacagtaaaaaaacttttgaggttgatcgccaattttcggagcccgggtcacgatggcgagacctgctctgggtaagttgtgacttatttttgtacctccattaagagtgcaatttggagtctataacttcagaattgcaattgaagtgtgagacatgactctatagaacattgaaattgcttcgaaacgcagttgaatcgcgtcaagcagatcaatattgagtgagttatggctgaaggttgttttgcgcccagtgtaacgtgtgtgccaagaacgcactttacaagctaggcgatgcccacaagttggccaagtggtggcgcatgttgttgtgcatgctggtggcatgctgatgcttagtttatttggtagtggaattttcgtagatatattcaatattgtctagatggggacagaacttagtattcaccatttatatgggtctacgaatacaatggcgcaatcagatttgagaaactctgtgatttggtatat

SEQ ID NO: 327466 - DNA, 675 bp, Cannabis indica
aacaaaaaaattgtaatgataacagggaaatgcaaaaatatatccaaacaacaataggaatacaactattacgaaactataaataaaccactcagtatcaaaccataaaatttgttagaaattaggcctagtaccgatgacgaacataaaaaataaaaaaaaaataacaaaaataaataacaacaaaaaaaatatgaaatgtgaacaattaacatacataacaccataaatccaaaattacaacaaactactcaaaatacaaattaattacatgtatggaaatatttacatatataaaaacccataaaataaaagtaacaaaaacatgaaaaataacaacaaaaactaaaccctaaagtaaaattagaacaataaaaccaaccaaaaacaaaaataaataaaatttcagagcttgagaaaaactaaaacgaaactacaaacagaccttaggaaagtcatctggttccttctttcccttctgacagttggaatttttttcaggcaaataaactttcgacttcttcttcactggtggacaatcacctttagccatgaggggagcaaaatcagagttatcatcttcaacgtttcttttttgatttgttagcaactcatttaagcattttggaagcttttttttttttttttggcaatggagatggagaagcagagaaa

SEQ ID NO: 327467 - DNA, 1208 bp, Cannabis indica
atgcaaatattaagtagtattttgggatagacaattatggtttaccattgtatgacataggggccgagatcgtccatcattctctaagcaggtcagccaacatacctgaaccgaaacttgaggtaagaaaagtataatgtaccacatggcatgacaggtttcgtaattgtcgattatctgattcagcaatgacaatgtgaatgtgatatacaagctcacctgattaggtgatgtgatatatgggtgccgagttatggcacaggcttgcgtcattaggcaatgtgatatacaagctcacctaattaggtgatgtgaaatatggatgctaggtttgcctgagtaggcaatgcgatatatgaatgttagactatggcatgagcttgcctgattaggcaatgcgacttatggatgccaggctataccataagcttgcttgattaggtaatgcaatatatgaatgctagactatgacatgagcttgcctgattaggcaatgcaacatatggatgccaggctagatcataggcttgcttgtttaggcaatgcgatatatgaatgccatgctatggcatgaatttttgtgagtaggaaatgtattatgttgataccgatatttgggttgttcgtgtgaggaaactgcaaaaaagtcatgactctaaactgaaaccattgttaggttttttcctgtcggcaatgcttatttaggcacaggcgacagttacatgcgagtgccaggctatggcacaggctcatctatttaggcgatccattcctatcggcgatggttgtttaggcatgggtggtagtgacatgtgagtgctaggctatggtacatgctcgtctgattatgtgatgcactaccttagtgctaggctttggcacaaactcatttggataggcgatgcaatacaatagtgccaagtgttggatatattttaccaggatctagatttactaacaagtatgttgattaatatcctaaatatgaatatctactaaaacaatgaaaccaaacacataagagtttaagaaaaccttacattgattgcagcggaatataatgactcctttcgctcagatctctaacccttacttccttttgtcgcaaagtattatctaaatctgagcctggatctctttctctccgttcgggtttggttaccaccgtcttactcactatgattgagtacttgacttgctatttgcgg

SEQ ID NO: 327468 - DNA, 565 bp, Cannabis indica
aattaattactttcaaaatacattttatatattatgtcccaacatatattttaaaaaaataataatagcgatagatacattcataatatgtagttcggagagtatagttataataaagtgttcaaattatttgaagtatatatatatcattaatcatttttgaaatagaaggtttgtcgtgaaattaagatttaaatatatatcttcatatattaaaagtatctatctaacgacaattgttggtctaacgttttgctattttttattctgttaactttaacggagaccatcacttcttttaattaatgctatttaaactaaaatacatattgtgatttctatttcttctctaacaaaacaatattgcgatttttaatcccagtaattctccattcccacaagaaataaaaaactgttatatgtgattcttcatccccatttattgtgattcttctctcttctcacaaatccaaatttcaatccttgaagccccactggtccaatggtcgtctctcatcgctgaatcttctactgtttcttgttctctgttgaaaatattttacca

SEQ ID NO: 327469 - DNA, 1452 bp, Cannabis indica
gggcacaaaacccaacagttacttcatatgtgtatggattattggaaactgaataagcttactatcaagaataactatcctctaccctgaattgacaatctgtttgaccagttgaagggtaagatggtcttttcaaagatcaatcttcgcacacgttaccatcagctaagaatttgagaagaggatatctcgaagactacattttctactaggtttggacattaggagtttctagtgatgtaatttggactcaccaatgccccaactacatttatggatcttatgaactgagtattcaaagattttctggacaagcatgtgttagtgttcattgatgacattctagtttattccaaatcgaaagaagaacatgaactacatcttagattagtacttcagtaatgacgcgatcacaagctttatgctaaattcaagaagtgtgagtttaggttaacacatgtctccttcttagggcacatagtgaataaagatgggatcatggttgatctggccaaaattgaagctattcgggattagccaacgccaaaatgaactactgaggttagagccattttgggtctagttaattactatcgtcagttcgttaaggttttcttgaaaatagcaacacctttaatggaactgacccagaagaatctgaagtttgtttggactgatcggtgcaagaaaagttgttaagagttaaagcaatgcttaattaccgcttcagtattaactcttccttttgataaggaaaagttttgtcatttattgtgatgcctcgagacaaggtctaggctttgtacttatgaaaaatggaaaggtaatagcttatacttcttggaaattaaaagagtacgagtagaggtaccctactcataatctagagctcgcagtagtagtatttgcactaaagatttgacggcattaattatatggaaaaaaatgtaagatttacactgatcataaaagtctaaaatacttctttagccagaaagacctgaacatgagacaaagatgttggcttgagctggtaaaggattatgactttgaaatcctttatcatcctaggaaggccaatgttgtagctgatgccctaagtagaaatggtcaaaaccaggtgaatacaatgaaccatatctccaaacaattggcagatgaaataacccgagctaacattgagtttgtaatgggagggtttgctaacattaccctgtagtatactcttctggaaagaattaatgaagtgcaatatcaagattcaagtttagtgaaatctcaagacagggtttcagcgggaaaaactaatgatttcacagtggatggtaatgggttgttacggttatgaactgtgtttgcattcctatggatgatgatattaagagagaaattaaatgagtctcatacgactccatactttattcatctggggacaacaaaaatgtatcaaga

SEQ ID NO: 327470 - DNA, 586 bp, Cannabis indica
ggaggagtagcccatttatcttatatattctattatatttccacacattagcgatgtgggactatctaacataatgtgccaaatattacaattatattgctttaaggtttttctctctagctttctctcaaaaactggtgccatggcaaagatgagggcaaatgagtagagaaaaccaaaatcaacagtgaaaaaaaaaagaaaaaaaaagagaggtcctaattccacatctaatgttctaaagacaaaattgatggatgcaattcttagaataaaaccaattgaattcacaaatgatgaggaggcttacaacaatggaatgaagatgacagaggtatcaagattaaatacggagccaatttcctataaatcctcagtacatttgatctagcaacaggagcagattcaaaagttctcacatttcatggcagctactcataggtgctctgatgaattcctcgatgtaaccaaccatctcctccaattttgagatcctacaatgatgtgcaaaatttagagagtagatgttaggttatatttagcttatgtttcgggtctaacagtaagcattttctcggttattggt

SEQ ID NO: 327471 - DNA, 634 bp, Cannabis indica
aatgagttttatttaggccataaaacccaacaattacctggtttggagaatgttgattaacactgtttggagaactagacaaatggtttgaatggtttaaatgtgtgcaatgaggtggcagtggtgaaagagctgggtcaacctagagattttgagcttgcctccaattttcttaggctcattaactattcttctattgatttttcttctgctggctcgaggaagggtattgatgctgggctgcctccttttcttaatgttggtggggatgctgtttgttgggtaaggcttttttcaagtggtggacggaagcctatcttccatgggcctgattgtgatactcatggtgggttgtctttgtggtgtggtgagaaaggagttgtccttagtgcctcgagtttagggtcggttggggataggccttcttccaacgggcctcctatggttgggttggctgcctctttagggccggttgagttaaaagttttggaggggtccaatgatagttccatttgtggccaagaatctaatatgctagtagatgaggaaagggccttgtctaatttttttcaggccgaagagactaacctagaacaattaaagaggtgtggggaggtgaattttctttagaaga

SEQ ID NO: 327472 - DNA, 840 bp, Cannabis indica
cgaaaagcttcaaacgagcaacttcaaatatcatatctgtatgataaattaatctacctctttttacacaatgtaaataccttattctcataaggatacaagtcgctgtctacgtataatctcaaatcactattattcttgttttgcctaagaatcaacttactgattgaagacataatttttttacatctttttattgccaatatattgatatatattagctttcaacaacattttgtacttacaagtagcttttgagtcaaaataattttttcatgttaattaattaatatttataaattacatattgagaatacttatattcaagcatatatatatatatatataataaaaattatatatcaatgtatttaattatgaaataaattgtttatataaaattctaacaaataaagccaacatatattgtatggtagtgctgcaacttcaaagaaaagtatatttctaaattttttcttcccaattatagcaagtactcgttgtatgaaaacgtcaaacttgtcacatgaacatcacccatattattaatactctacaaaccttgagaatacatttgatgtggtttgtgaagttcattaagactcacaaagtagtctcttgaaacattaaccaaattgttagtacataatttgtaaccttaaaactagttaaaattataaattagtaacttacatacctaagctcgtgagaagtttttaacgaaagcttcaaacgagcaacttcaaatatcatatctgaagtataataccttatgaaattccgtattttaatattaacagtttgattatttaattaaatgattaattaaatgcggaataa

SEQ ID NO: 327473 - DNA, 857 bp, Cannabis indica
gagagaatactatagctagctatttttacgtgtttggatcttttatatattttgataaattacattttgtgaaatggatcaaaatagctaagttcgccatccactgctaattgatcttatacacttgaaattattttgatcgaaataagttttttgatgtgttttccaaaatataatttaataaaaatacaccaaaactaataaaataatattatccctatatatcataaaaaaaaataagaaaaatagtttatatttaaatacataatatacatgggtagtttgtacacaacgacttatattcttatttggagaattaacaaaaaatgcataaaaatttgagaaaaaaacggtacatgttaaacttttatacaaaaatacatactgtaaataagaaaatgacaaaatcgtagtaaattacaatttttttttgtaaacatttgtacagttttatacacattaataattaggctaattagtaattttttctcccgaactttgacatgtactaaatcatgccccctgaacatttttgaccgttaaaaattcccccctgaactattaagaatttaagattgttaaatttaaagactttggtctaattttagtaaaaaaattctaacatggatgaaagttcagtagacatgatttagtacatatcaaagtttgagggacataatttggtagatatcaaagtctagggagcatgtttagtacataaacaatcaccgaaacaataaaaattgaatgaaattagacaaaagtactccttaaatctaacaatctcaatagttaaggggaatttttaacggccaaaaaagttcaaggggatatgatttggtatatgtcaaaagttc

SEQ ID NO: 327474 - DNA, 513 bp, Cannabis indica
aaaaacaactaaaaaataacgagatttcaacttcacaataactaataaataaactataaaataacctgaaaaaacaatctacatgacaactataaataaactataaaataatcaaaaaaaaaatattttattatgtttactgaaaatttgtttttataaataaaaaatttaaaagtaaaaatgagaaatttttcatgttgacgtattttcataatttatttcaaatttgtagtcttaaatttttccaaccaccaggcccagcccagcccagctctgttcagcccagccatgtatatatcatggagaaaaaataaagggttgggttctatggtactcgaaattccttgtaaatgtaaaaatgcttagtaatcaatttgggctatttacaaaaatgtgggaaaataaaagtaagttttgatatatatggcataaaaacttaattacactaaatatggtattttttaaaaaaacttacaaatatgggaaaaagtcatgagtaatgccataaaaaac

SEQ ID NO: 327475 - DNA, 926 bp, Cannabis indica
ttttttgtaaatgtgataaggcaaattacctcagttttcccatagtggacataaatttcatttacatactcaacaactgaaagtggatctttcaaattgctgctgtcgatatccatgacaggttcctcttccacatcttcttcttcatcttccacatcttccatttcaacttcctcctacagtatttatatgcagtacatccacagtcattttttccaaacagcaataattatagttgatacaatttgctaatccaggaattactatacacaatacttaccacctgatcaaattcatctagaagagcttctgtgtgcttcacaaacattggtactgggacatccttgttatcctcaaagtcctccacttctacaatctgacagtcctctatgccactagactttactgccaataagtttagattctgagtttgacgattacaaacctgcagatcatcaaagattccatcagacaaagtcaattttttaacactcttaatcataaaattttaaggcaacacaaagaaatgagatggaaattacttcagagcaatgctgaacgacatgagctggtagtagcttcctatacaaacgccaaacaccaagcgtgaaacaaagaacaaggcaaaattagataccgaccttgtaacttttatgaattatatttgaagttctgtagaaaaaataatgcataaagtgaagatagatcagacacaagagttttgacattacccagaaaaatcccttttgttgatgacataaggattatgagttgccccaaaaatgttaggattgatactactcaatgcccttctctgattgtttcccatctccttagcaaacttagcacccccaattcttgaaccttctttaaaatatcaaagaaaatacagagcataaaataagctttagatctgtgtttaaaat

SEQ ID NO: 327476 - DNA, 724 bp, Cannabis indica
tgcctttactaatccatatactagagcggtcattacatataccgataataataagaggatctacttatttgtcggtactaagtggtcgctattaaacatgaataattttctatccttaaatattaaacgatgtgaggatatacgggatctaatactcccgccctgacaaaggtcgtttaatttattatttattttataatattattttaattattatacatatatctttatatatttttgtagtttgttagtaaatgtttttgaaaatatatttattttagtttaaataatattgtatattttaaattattataacattgaataaaatattaatatttagtttaaattttttaaaaaaataatacttgtttagcttgaaaaaattaaaaatctgaactaaatcaattcatgaacactctacttaaacatgcctttaaatttaacaaataaattttagaaaaaaattatctacttagttaccctaatctttatcgggtaacctcacaacaaaaaatgcagatatattttatcagtgtcttgttctcgcccctaacttagttcagctcaacaaccatggagttaatctcttggtaggtcctctgggcgagtatagcgatctagtacacgaggacaaggaaaaattagtatgaagtaaaccataagaagaaaataacaaactaaaaatgcaaaccttatgtaacgccctaatgctaaggcacgctac

SEQ ID NO: 327477 - DNA, 1372 bp, Cannabis indica
cacatgtaaattctacaaattattttttcacacactatttttctttttaataaattatgaaattttattaatagcaattaattattatttctttaaagattaaaattaaaataacaaatgaagtaattaatcgcttaattcttaaatcgtttgataaaaaatttaaataaaattatatgaaaaagattattgcagcgtcggaattaactttaagaacacttgtattttgtttcatccaccgttcaaaagatacaacagtagaaactgttgcagcaggttcaaccgcatagcttaagcactcaactattgtacaaggtacgtaactgcactactaacaactcattcaatcgaaaaaaaaatattattgtgtaaagtacgtagctgcactgctcacatttagtcacaaaaaaaatattatttccaaccattgacaataatttaatagcagccattgaagaataaagaaaaatcaacaatgaaataaaacataacagaactatatgcgtcacataaaaaagattaaatcactccaaatcatctcacataaacaagactaaaacatttaaaattatgatacacagacaaaactaaaatatatactcaaaatcatatcataaaaacaaaagataaaactaataacaataacaaaacataaccctaactaaaccgcacctcttatttttaatataaaaattaggctataaaataataggacaagttgaatgattttgcatagtttgatattaggccaaatatattaggcaatttcgtgtttgtagtgttcttttgatattttagtacatgtagttttctaacttttattcctaagaaaaaaaaaaaaaacttttatactctttaagaaaaaaaaaaggagttattcgaacaaaaaagaataagactattattgaaacaaaggacacatattataatcacataatctgtttttttcaaaatggacaagtagatgggtcactataaaaaaataataaataaatatttatttattgataaatagtatggtgtggcactataataaaatttcactttataattgttttttattgaagtattgtcttataattagttaatgatttttatattatttattaaattaaaacaataaactctaatattaaattgtattaagtgatattatatctcataaatatattcaacatttcttattactctataatctatatactgttttttactttttttaaaaaaaaattacagtttaagttgctccggtaattgctctaataatttttatgtgagttgatatttgaatttaagttgctttattgattgctatgtgagtttttatgtgaattttcataaaaatacaaaaaaaaatattttaaagtgttaa

SEQ ID NO: 327478 - DNA, 746 bp, Cannabis indica
atttttgatattgtaaactaacttcaaaaaatttttataaattcacaaatggtcctaaataactataataatatatataaaaaaattagactaaataattattttgtatgacgaaatagatagaaggtttgccaaaatattttatttgggtaaataatagcataagtaattaaaattttaagtttgtaagtgacataacctaataatttttttaatggtataagtacccactatttataaaattataattctcttttattttcgttggtagagttagtgaatagcctttgtattgataagttctttcaagtagggtcaattgtgatgactttgttgcatctttgaatctcaacccattagaatctaagataaaaaaaaaccattagaatcatatacatacgtgttattattttatttatttttgaataatgaagaaataattaaaataaataaataaaatgtacaaaacaaatggaccaaatatatctaaacaagtttttaatctactctgaatacatttgcaactaattcatgagatgatatagactagaaatacttcagaaaaattaaatagcaaacttgaaaaaacaaaaatagtataatagttggagaaaatatttaacgctaaataagaaaagactttaaaagaaaatagagaccaagatgcatccacaaattcacaaatttttcctccaactccaatattagcaaactgcagatgaataatttgaaaaaatacacaaaat

SEQ ID NO: 327479 - DNA, 674 bp, Cannabis indica
atgctttcctatttattattaattttttttttgatgaatcctatatacatttattattatataaatacactattaaattgtattaatagtcatattatattttataaaagtgttagacactataagtatcttttaacatttagacgcctacgagtggtgaactcaaaactaaaatttaggaggtaataccttttttctgtaaagaaggcaaatggtaaactaaatattaaaaatagcgataattttattagaatttaaacttttaaccattataatatgttaagataacttaacatcatatcaaagctaatattatatttatcatctttaattacaaatatgttgtaactaactacaatatatatacattttcttctcaattttttttttaaaggagatgactttctctttcgtctttatatgagtccgcccgtaacgtttcttttaggtggtattagagaatatagtgcccaacaagaatacttaataattaatagagtaatttacggcataaatacttaaatttaactcccagttacaaataaatacctaagtttaatttttggcggtaataatacctaagttatatttttagaactctgtaagtatctaaccgttaaaatattatgtcattatccacgtatcatttttttattggtatattttaattaatt

SEQ ID NO: 327480 - DNA, 556 bp, Cannabis indica
ataaatatatatttagtgtatcgggaccttaaaacaactcaataattttaacaaaatattttaccttgaagcttgggcagagactcgtgctgataatgtattataaaataatataaaatatataagaagaaaagaagaagaagatgaagagagaaaaagacactgaatgagaatttctcagttgttcatttcaatgggtggaccccaatttatacaaaaatatgactaaaagaatgaaaaactaaattaatgtaataaaggaaaatacaactaaacattaatggtaataattaatttggtgatttaaacatttataaataatcattactacaaaatcatcttttagagacggttttttaggcctttcaatttcggttttggcgaaattctctaccaacgctgatcagggcgaagctaaatagttttaaaaaaccaacaccttatatatatgtaactcatatgtagtccgggcaaatccacataatgtctcaaaaaaaaaatctaaaaaaaatatatatgtattttaagtagttctaacatatatttataataaaaa

SEQ ID NO: 327481 - DNA, 822 bp, Cannabis indica
tatatacaagctttgtatatattggcttacataaatagttcttccaaaaaaaatgcaatcttgatacgatcaaataatttcaaaaaagttcttccaaaaaaatgtacttgtttagttatgtttagttatatgaaggaacaacaacaaatgaaagatttatgtgattgaattatcaggaaagaaaaaaaaagatcatacttacttgtggtcttggtgatagtgtagtttctttgtatattttattttgctacagtgaaggatgttttcttcgacatctgtgatgcaccatatcaaaagaggaacattagtagttgaaaagaaacattaagtcacttgttacataagaaacatggatgtggtcatactctgatctccatttacggtgttaaaatcatcaagaaagtagaaacttcaatcgacgactctaataacaatccagaacagcagctgaaactccaatcgacaactcaaattataatcgaattataatcgagatcgattttatatacagactcgatttctcaagagaattagtttcattcggatcaaaattacaattttttttttgggaattagcttaccatcgtaaacttttattttttgtttattctttttagagttaacctgagagttttttttaggaggattagtttcataagattttattttttatatattatatatatatatatatattttaggagttaacgtgaaggttttattttcatatatttttttgggtagttaacagtaaagatatgtttaattttattaaatatatatatgtatttcaaataagataccaaatataaaaaatctaat

SEQ ID NO: 327482 - DNA, 648 bp, Cannabis indica
aaaccttttgttccactgtcttagtgactgtttaagtccatacaatgatctctctagcttgcataccattccttcttgtcccttctttatgtagctcttgggttgctccatgtaaatttcttcttccaattctccattgagaaaagttattgtaacatacatttctttcacctctaagtcaaacttagctgcaattgctagcataattctaatagttttatactttactacaggaaaaaatatctttgtaaagtctattccttctttttggctaaatccttttgtcactagtctagctctgaacctaattggttcacctagtctggtcccttccttatgtttgaacatctatttgcatgttgaagaagatccctgactcatggctgccaaatattttctatcctttacctgcaccacataccactcatgagtcacaaagattcagcaagaaaagaaataacataatatcacaaagcagtacaaaaatattataatgactgcattttatgatatggattagtaaaggccattagtactaattattgatatttctatagttatttatgaatttatttaattatgggtctcctttttagaaatgggcattagaattattatttctcaattctggagattttattaaactct

SEQ ID NO: 327483 - DNA, 854 bp, Cannabis indica
ttttggtgtaaaaatttctaaatgcactacattataaatcactaaaaaaactcccaattttctttaaatttcaatacaaaattgtaattcatcacgatgaatagaaataatagtaaaaaagcaccatattctagaatggtggaagagtgttacagtcaatttttaataacaatatctatacccaaaatatatacccacatatttttcatacgacgatattcattatagttaaaatatcatttctgtaatatcaggagctctgtttttcagtactgtaaactatttagaattttcaaaatttacaaatataatattataactataatgaatatctctatgaaaaaaaaaaattatttcagcatacgattttgggtgcaaagataaactaaatttttttaatgagaggttgtaataagcactcctcatcaacactctttacgatggaattacaaaactataaaatagcagttaagttaattaggaccaatttcaggcgaattggtttctaagtattacgctcgcttgataattaattatgccgttttcgatttcacattttcaagtcatagttagagctataaatatgggccagattttttgacacatcacaaaaccgacacgagcatgactcgacacgaaaaaatatagatttgggcatgacaaggcacgatgttgcaaattagtacggcataacaaaaaaatggtcttcagtgtgacacagaacaacaagcccgaaaacacgacacgtaagcacgaataaactaacttaaaatacaacacgttaaaacttctcataataataataataataaattataaaataactaaaaaaacagtttattatttttattgaa

SEQ ID NO: 327484 - DNA, 1031 bp, Cannabis indica
aagttcatatttagggtgtcaatcaacatacttgtgagtagatctaagatcctggtaaaataatttccaacagtatcaaccagcacaataaattatgacataaaaatacacacagattaatgaattcattaataaaaaatttaatatttaagtgatatctaaactgtataatgataatagtaataatatttacctcaacaattggagtatcacatgttgaagatgaaaattacaactggcgtcgagattccttattatgtgacatacaaggcattttggcctacatatataacaacatatcagtaacataatttattggttattgatttcttttttgaatcatttgaaaaattaaaacgtaaccagttgtgaagaagtggcattgccattgtaattaagagcctggaaataaatatgttcaattttaagtactgaaaaacatggaataataataaaaactaagagatattattaaaaattaaagagcctacaccaaagtacgctattaaatacaacacttttttgtgctattttttttagttcacatatactgtttaaattaatataacattacatttttttttcttataataaaaataggagtgaaagcaaaagtcttatgccactttcgattaataccaagattacaaagattatttaagtcatcaaaaatatctgattttatgacttggcatcatcaaaaggattatgtgaatgatggttctaagagacatccaagagattcttcagcatggatgattttgatcacaaacataaggattttgcggtagatcctcaaaatgttagacttagattagcttttaatggaatgaaacgttttaagacattaagtttaagtcatagcacatgactagttattatgataccatataatctccctccatggttgtgtatgaaagaacctaactttattatgtccttgctcatacctgatcaagaagcatccggaaataatattgatatatatttggagacacagattgaagaattaaaaactttatgggaagttg

SEQ ID NO: 327485 - DNA, 697 bp, Cannabis indica
aaaactagctacatcaagtacgtaccaactattatttcttataaaataaactattttttttttcgatttcttttaattaagttttataattaatatgtatattatatgatgaacaaaaccgtgttgggccaagccaactgcatataatgctgaatgaactggccacagctgatatatatacatagcttagcttcactctttacttttagtgaaccttcctttgcctattgctacttcattacctaaccatatcaaccttttagctctatcctaccattaataatgctataaatacctctcctcattcaaaaccatattcaccaatctattaaactttccttcaactctcatatcttactttacaaacactactcatcctttcatggcttctctttcttctaccaactcagctttactgttggttactcttcttgtttttggctcttttgtggttagtgtctcagctggtgatttgaaccaagattttaagattacatggggtgatggcagagctaatattgtcaacaatggagagcttcttactctgttgcttgacaaagggtcaggctctggatttgagtcaaagaatgagtatttgtttggccaaattgatatgcaaatcaagcttgttgctggaaactctgctggcactgtcactgcctattatgtaagcaaaactctaataacctacacaatc

SEQ ID NO: 327486 - DNA, 713 bp, Cannabis indica
tctctcattgaatgaaacttatgtgaatacgaaaattaatgatgtcaaaagaaaatcaaagacatgttaatatatattatattgctgtctataatgaattaggcatttatcatttataagacaatataagagtaaaagtaatacaacatatttattgagaaatattaaaaaaatctctttgtgatatctttttaggtattatatcgtaattaatgtaattaagtattaaatatcaatttaataatttttataaaatattattaaccaattataaaacgtcacttttaaatggtgctaaataacaatgttcacatgtattagacatttagagagtgaaagcgcgtctttattttgacacttggacatttaggtcattaaaaattaggctaattaggattttccttaaattttaacatgtatcaaatcatactctctgaattttttttgccgttaaaaatttcccttgaactattgagattgttagatttaaggaattttgtctaatttcattcaattttgctatttcagttattgtttatgtacttaaccatgctccccaaactttgatatctaccaaatcatgcccctcgaactttgacatgtactaaatcatgtctcctgaactttctgttgggttttatgccctaaataaaattcatttcaagataatcagatttacttattaatatagatcagaaataacatttaatgtt

SEQ ID NO: 327487 - DNA, 1219 bp, Cannabis indica
ctgtatctttcaagatggcatcaggaaaaacattgaagatcattttgatgatttcaataagattatcttgatcttgggaacattgacatcaagatcaaggatgaggatcaagcagtcataatcttaaagtcacttcttagtgaaaactataagtattttgtagatacaatgatgtatgagaaatattatgttacattaaaagaagtacaaaatgcttaaatatcaaaggaaatgaaaataaaatctaaacttcaagaaggcagttccggagaatgattgttggttcgagaaaaatctttcaggaaagagaatggagatggaaataatctgaacaagggcaagtctctttcaaagagtaaaaatatgtttcatatgtaactcaacatcacatttcaagaaagattgtccactgtggacgaaatttaatagtagtcattctgaaagtgtgaatattgcatctgatgaggatggatatgacagtgatggagtacttgttgtctccaaagattgttcttcaacaaattgggtaattgatttagggtgctcctttcacatgtaccctgatcaatctcaattcagtgaatacaatgagatcagaggaggatcagtgagattaggagataacaagccatgtaatgttactgggatatgcactatcaagttaaaattagatgaaggtagagttatagagttgatacaaattagacacgttcctgagattaaaagaaatcttatctcagtagctatgatcgatcaagaaggatgttctatcaaaattgaaaaatgagttatgaaagttttcaaaggctcaataatagtgaaagagtgaaggagaatggaatttacttgttgcagggtcaaactgtgaatttgaggtgaatgtagcaattaaaacatcaaggaatccaactttaatatggcactgaaaactttctcacataagcaatggaggaatgaaagtgctcaacaagaaaggaatctttggaaaagatcaaatccaagagatggagttctgtgagcaattgttcttgaaaaatctacaagagtcacgtttggtaaaggtgttcatgtgtcaaatgcaattttagattgtatccattcagacttatggggcccttcaagaactgaatctagaggtggagctaggtatttttttttatcatttatagatgattttaccaaatatgtttggacttatatcttgaagaataagaatgac

SEQ ID NO: 327488 - DNA, 1351 bp, Cannabis indica
agaggctggaaaggaacactgggcgtgcttgttacggaagtctctatatggcttgaagcaatcttcgagacagtggaacatgagatttgatgattatatgaccaagataggtctgaagaaaagtaagtttgatccttgtatatattttcaagatagatatagagatactttatgtttgttgttgtacgtatatgatattctgatcgctagcaaaagtgtacaagagatcaagcacttgaagctccagctaaagacggagtttgaaatgaagaatttgggtctggctagtaagatcttagacatggatttaagaagggaaagacgaaaaaagactattgtacttgagtcagacgagctacatcaaaaaggttctagaaacttttaaaatgagtaactgtaaggtagtgagtactccgcttgcacaacatttcaaactgagtgttactcagatgctagaagaagaaattaagaagttagttatatcaagagttccataagccagtgcagttggctctgtgatgtcatggtctgtacaagactgaccatagcatatgcactaagcacggtgattagattcatgggaaaccctggaaaggagcattgggaagcttattaatggttatgtggactctgattatgcagggtgcattaatacttagaagtctttgacgtgatatgtgtttactatgtttggaacaactattaattggaaagcggacatctagaaggttgtggtgctatcgacaacaaaaattgaatatatggccttgacagaagcgatcaaggaagcactttggttaactaggttgatggaggagctgaagctaaccaaaaggttattattgtttattgtaataatcagagtgcaattcaattaaccaagaattatatgcaccatgaatgtactaagcacattgatatcaagcttcatttcatacgagaagttgtgaagattgccaaagttttgactgaagagaatccttcagatatgataaccaagatagtgccaagtagtaagtttgagcattgcctaaagctgatcggagttagctaagcccggaggggcagaggggacaacaacatttaaacattaatttatcaagcgactttaacttgaaaccaaggtggagatttgttgattatggttgcaaaatttgttgtctgggagtggaagttgtgaatctagagagtagatacatgaagcttagtgtggatctagaagttcttgtgcatgaggtcttgtagagtctaaaaggttcttcttcataagcttgtatcgtgtatacattgtctctcccggttagcttgttatgaatccaaaggtacaatcctggatagctattgctagtct

SEQ ID NO: 327489 - DNA, 677 bp, Cannabis indica
atgtggcatatatattaaaataaactcgaagtacgttattataataaaataattatttctacatttaaaatttaaataaaatcctttaaaatagaaataaacaaggaagagatcatgaataaaattaattaatatgacataactgtgcaaaaatcttcgagtaccttattgaaataataagtacatggataaaattagaaaagtataaattatgatagatcatcagcttatttgataagtgaattagttaataaaatttgggataatattctttgttggtaccttattcaaaatagtgagactcaatgccaattcaacccatcaagtaattacaatgacaagtataggggtaaaatggaaaaagtagaaattatgataggacatcaaaatacttaattagtcaactatttaataaaaattgacaaaatattagttgcgatgaaaagatgaacatttttgtggtacatcaaaaattaattttttggcatttataacttcttaaaaaaacattcaggtaggttgttaaataaatgttccacatagtatggttaatcttttttcataatacaatcattttaattctaacctatttaataatttcaaattttataaaaatcaagtcatattagtacaccagaacccaaaaaatactattttaattattataacacaagaaa

SEQ ID NO: 327490 - DNA, 744 bp, Cannabis indica
caccctggaaaagcaaatgtgatagaggatgctctaagtcgaaaagatccagggcaagtctatgaattaaagtagatatcaccgaagtgggattaggatatgactagagccgggattgagttcgtggttggaaaacttgctaatatcacgttgcagtctgatttgttagaaagaatcaaaacagcccagcagagtgatcctaaactacaggagtttaaggaaaggcttgaagctgggtcaacaaaggactttttaatttcatcagatgaattattatggtacaaggacagggtttgtgcactagccgataaaggtatcagacaggagattctagaagagtctcatgccacaccatattctttacatccgggaacaactaaaatgtatcatgatgtaaaagccttgttttggtggttaggcatgaaaaggtgacattgtgagtatgtatcaaaatgcctaacctatcagcaagtcaaggcagagcatcagagccagtggtttacttcaacctctgaagattcctgagtggaaatgggaagatataaccatggacttcatggttggattaccaagaagagtagggttctatgattctatctgggtaattgtggatcgatataggaagtcagcacatttttttaccagtgcagactacgtacacagtggatcaatatgctgatttatacattaaagaaatggtttgacttcatggtgctccaaagtcgattgtctcagatcgagatc

SEQ ID NO: 327491 - DNA, 860 bp, Cannabis indica
aaccatgcaacataaaatgttatttatgatctttattaataagtatatcgatgatattgaaatgggttttatttagggcacaaaacccaacatggtggtccctcaccccaaaccatgtcacgaggtggtcccccacatggcagaggtggctctactagtcgtggtggtccctcaccccaaacaatcgtggccctaacaacacttcaggctagagggttcaatgtttattatgccacaaggttggtcacactgtcaaacaatgtttttatagttttgaaaaaccttttactggccctgaatccttcgtaaacttccctgctaatgccaacattgctgagtgtcaagctctctatgcaacctctgaatctatttgtgatgatggctggtacccaaattctggtgctggtttgagcactagacagctccaatcttagcactagcacaccctacacaggtaatgaatagatctatgttggtaatggcactggtttgagcatcgagtatattggtaaatcctctattctctctcctttctcttctcaatctttaagtatcaataatcttttttaaatgttccatccattacaaagacccttctgaatgtctcccaatttgctcaagataatagtatattctttgaatttcaccctttttcttgttgtgtcaaggatccagccactcagaagatcttattggttcgggagcttgagaaaggattgtacaaatttgactctcctcacctcagtcatgctccatctcaatcatccaaagttgcttcaattccttaatttaatacacatcagatgtctgcttttaatcctgatttttctttatggcacagcaggcttggccaccctgct

SEQ ID NO: 327492 - DNA, 1075 bp, Cannabis indica
aaaacaaagctctccattctctacataaacattattatcattaacttatgaaagaaatctctacataaataaatgtataaaagaaataatatcatacctttttcgccattgtatgaaatatctgcataaataaatgtataacagaaaacaattataagtaaatggtctataacgtaagaactatttctaaaaaaatacattttgataatagaataggctgtaaaattttaatggcagtatgcataacaataatactaataataataactaaaaaaaaacagattacacactagaacaggctgtatcttcttctctttctcttctcaaattgatagacttttttttttcagaagttgcaaaagaggttagagttttgaaagaggttttcagttcaagttagtgttactgtatatttataggagcagagagactagggttttcagaagttcaaaacaagagaagttggaacagtttttagaagttgccaaagaagggaattccaatgtaaataagtaattttttctttaattagtggtgggtgggctgggttaattttttgaaacatgtagagttaaattgcatagtagaaattaggggtgtgcagaaagtcatccaatccaatcccaaccgaccgatccaatcccaaccgatccaatagaatcggatatccaatcataattggatcggatcggatgaaaattttaaaaatccaattggatcggatcggatgttggatgagacatccgatccaatggatcgaaccgaaccgatccaatccaatatcatccaatgtccatccaatcatatttaatatttataattttatatatttaattattttgttttaaaaaaatatattaattattaataggttttactgtgcacctgcacacattgatttaatattttatataatatttgcatttgatgtattggacttgtttattaagacttttgcttattaagttagatttttgttatatttttattatgggattatgaaaattaggttgaatttggattaaattattgtttattattggattattaggctttaaattatgttttttcatat

SEQ ID NO: 327493 - DNA, 541 bp, Cannabis indica
agcatccgctaccacattttcttttccagggtggtagagaatctcacagtcataatctctaaccaattccactcatcgtcgcttccaatcccatatcatgtgtagaataccactattcataatccttcaattgcctagacacatagactataactttctcagactgtatcaaaatgtaacataacccttgtttataagcgtcataatgaatttctcatcactggctgacaaggttaacattgatgcgctaattaactcctgcttcaattcgtggaaactactttagtacttgttagtccaaacaaacatacaattcttttgagctaattccgttaaaggtgtagaaatcttaggaaacccctcaatagaccttctgtagtaccctgctaatcccaggaaacttctaacctcagttacagacttggatcgaggccgatttcgaaccgcttcaatctttactggatccaccaatataccatctttgtgttggaaatattttacaaggatctagatttactaccatgtatgtttcattaacatc

SEQ ID NO: 327494 - DNA, 734 bp, Cannabis indica
aagcttgtggtttgtgcagtgagtaattatagttgatataacagaatgacaatgatttcagaattgacgtttgaactggcctgaaaagtatgttcatcacacaaataatattataatggggtctatcgttttctttcaagacggctgcgggagctgccaaattggaatagttgttttttggtttttggtatgtatattactcttatctttaaaagttaataattcataaaaatcatattaacttaaattatggttggtagttacatttataaatgtatgatgttaacacatcaattaatacccttaccaaaaaaaaaaaaaaaaaaaaacaacataaattaacaaaatcgattaatccagtttttacaaacaccattcaaggttaactgcagactaaaaacacaggacaatctttaatttagtgtagcgtagttcttctttataagtttgaatcatgttttgttgaaaaaaaaaattgatttttcactcccagcatatttttcccaacttttctttttaaattacaaaacttgcctgttacagtggtgagttagttttctttgcttatggtccataaataaagattattgttttgggtaccaatgtgtcaatgtgttcatcacggtgtcttataattaatattcttctataatttttaggttaattagtaatttttctaactgaactttaacatgtagtaaatcgtgctccctgaatttttttggccgttaaaa

SEQ ID NO: 327495 - DNA, 898 bp, Cannabis indica
aaaaaaaatatatattcaaaatttatttaggaatcttgcatgattgtaaagaacaccatttatcttcaaaagccctcaacttccatggacgaacaccttcaaaccaaagcttgaaacctgcaaaagattaaaaaaaaatagagaaaacaaaaatatccactatcgaagactatcaaagttagttaatcaaaatgataaaggtgttagattcagagaaacataacaaatatgaaatatcaatctgagaatattattgattatggagctgttagctcaatttataggtacaagagaagttagttaatgcaactaattaacagagtgtacagtaggcaaaaactaattaagctaacagactttaactacccaaaacaattttaactaaataacatcactagcaccaccctcaaactcaacgtagatagtgaaaccaaattgagtttgtcacgtaaaagcttaaacccagtactagataataccttagttaaggtgtctccaatttggtcacaagcaggagtatgttgcacaagtagttggttgttgaggactctctattgaacaaaatataaatccaactcaatatgtttagtcctggaatggagattggattagcgaacatgagtacagtactttgattctcacaccatattgtaggtggcctcttaaattgaattccaacttcagtgagtaaagagtcaatccaaaccaaatcagcagcagccagagccaagcttcgatattcaacctcagtactagactgagacattgtagtttgcttcttagaggaccaagatacaatgttgggaccaaggtaaaagcaataccctgaagtaaacctcaagattcgaggccaaatcaacataaaaaaaaaacaagtagatggacaaataagaaggag

SEQ ID NO: 327496 - DNA, 571 bp, Cannabis indica
tgtgaacagctgcaacaacatcagtagtatttgtatgaacatcttcgatcagccatcaacatttaatttgtaatttagaagcaaattgaccataaaccataccgcaccactgtgtgttatgtccaaattgatcaaatgactgcaaatcttagatcgtatgttgatgaaagatgcaccaaataattgaccctatgcatgtaaggaacttcctgccagtcaattgctatatgtgtatgccgacatccataaaaaatggattcccaaatggaatgaacaataaaaactataaaaaaaaatatagtaaacatttttattttaattgttttttttttattttggtattaaaataaacataaaaataatccgtataatcaagtgttacacctctcatcataaagaggagctagttcaagtctccctctgaaatatcaaaaaaaaaaacaataagttaaagttataataaatgtctatgttaatttttaattaacaaatagtgctatttgtatagtataagatattatataaacctatacgtataaataatgttaaactgtacttgtctattgacatg

SEQ ID NO: 327497 - DNA, 521 bp, Cannabis indica
agctcagctcggcacggtcagacggcggtggcggcatgcgtgatggtctagtgtgtgagtcctcactgatgcacacaaaactggatgacccttagggcccaaactcaaatctcaagattacactttatatacactttcaaggaagtgtacgtttctatcccacgtggaactcaaaatactattacgcaccattttcatatatttttgtaaatttttaagtaagttctaacaaaaacaattgaaatcataaaattcacttacattttagtattttaactcatcaattataattaaaatataaaaatatggagcacaatctatttaaggaaaacgagtcggtccgaataaaacacgacacaaatttgagcacggcacgaaattaccgaacttgcaaatcatgcgagcctactttataaaattattgtacaacacaataccacttatattttttatagcacaacacggcatgaaccatatttttttatggcctatgtaacgccccgatattttgccttatttta

SEQ ID NO: 327498 - DNA, 605 bp, Cannabis indica
tattgaaacttatattgacgggacacacacctgcctcagagttcacaaccaaaaaagataattcatttatttaagtagagtgaatacaatcatgcaaagcaacctcgggttacaaatagcgagacagccacctcgctattctaactaaagaaacttggcgaggcgaactatctattaacacttagattttttccacattatgataaacaaagataataactcggggttaagcgagatataattgtccaaatcagcaataactatctataaagataagaacaaaaagaaattaagtagttatccagtattatcctacatgcatttaaatgaaacgtgagaattgttcacgtttcatgaacgattacatttcaaattgatcccaaatgtaaataactgccgacctatattcttataaataggggcaaattccacagaaaaagggacgaatatttagagagaaaaaagatcaccaattgtatcttgtatcaattatacagaaaactatcataataaaatagactcgaggagtatgtagaattaactgcaaaaccacgtaaaatccctggagttatttaatagtttattactatttttgtgatatattt

SEQ ID NO: 327499 - DNA, 1440 bp, Cannabis indica
ttatttagggcataaaaaccaacaagggaatccaccaagacactcgcggagaccaaactaaaatgacaaagatagcacatatacctacttgagtggggaatgtgtgtcaaaactctttcaaagatgaatgcctattcgacaggaaccctaagaaataagatcaagaaatggtccgactaggtcgaggtcaaggactcctggttagtgtagattgaccagaacttatgcacatgaaaagcaaacacagagtggggaagatacatgtcaccattatcacgatgaataggagagcatgagtaactcccagcgttatcaatctgaatgtttttttgcaacaaggtcgattagcaattacgaccaaaagaatgaaaggtggcgcatccccgatctttgtgaacacttaaaccgtatacaacttgatctacgcaagcatcttaattgagatgctccagatctatggttaataccatttgtatggagaaactaaaagttttttattacaaggacaagcatagaaattttgataataaattcaatggacttaataaaactttacggtcctagtatagtaggtttgagattatccaaacctgtggcatgtggtatatctagtaattttcttactttggtgtaagaaaatttctttagcaagatgctggagcattttttatggctaattttaaaggaagccttttggctcctagacatagatttaatttatctacagtttcaactattctagaaaagataaaagtcatgaaaagaattccctaagcaccaacaatgagaggtctcatgtatattttagtatgcattagaccacacacttactgttgagtgggagtagtgagtaagtatgagttaaatctagaaaaggaatattggatgataatcaaataaatcttaagatcaaaagaggaacaatatgttagttgataagggtggtattttaatactcttagactacaccgaataaggtttttagacttacgtgaatgctagaaagtctaattatgagatggtgcttactttggagctaaggcaatgaatttttgagaagtgtaaaaaccaatttgaagtctctaactctactagtgagactgaatgttaaagtggccaggaaggctaatatataattattcagcctatgaaaagttctataaaacttttggcattattccagtcatggattaacgactagtgttacttcctgactaacacagatataattgccaaatagtaaagaatctagtatcccaagaggagtaaacatatagaaaggaatttcacaatatcaagaattttgtgaataaggagatgtaatggtggagaaagtttgtattgaatacaacttgtcagatcctattacataaataatattacatgttacacttgatctggacatcaaggtgttgagacaatattagtgcaagtgggagt

SEQ ID NO: 327500 - DNA, 638 bp, Cannabis indica
gagtttgaggttcgaggtccaaggtccaagtctgggtttgaggccttggtctaggtcctagatctggggttcgattcaggttcggtgttcggctttggggtcgggggtctaggttcaagtctaagtttggatccggatccgagtttgggctcggccagggtttggatctgggttcggggtttgatagtctgggtcttggttcaggtcctggtctggggtccaagtcttggtccgaggttcgggtctgggtcttggtctaagtttgggtctgggtttggagttcgagttcgggtctgggtctaggtccaggtctaggttcgggtccgaggtcggggtttgggtccaagtttggagttcgtgtctaggttggggtccgggatccgggtccgaggtcagggtttggtttcgagatgtagttctgggccgaggtccacggtatgtaagcaaaaatataaaatataatatgttagacaaaaaaagttatttttgaaattagaaaacaacattttgatgttttctattttctagtttttttaaactcaactttttaataaactgtttataaaaaaatttagctatataactcatattagtttttatttttttttgttgcttttaaaaataaaaaataattttaa

SEQ ID NO: 327501 - DNA, 592 bp, Cannabis indica
acaaaaatcagttaaataaaatatataaatcaaaaaccaattctttaaattaactaaacaaaaatgggttcttgaataactaaattaaaaaccaatttcttaaattaattaaatcaaaaatcgatttttgaaataaataatttaagaatctttttctaaaataactaaataaaaaaacaaaaagagacataattaaaatagaactggtttcacaataaaatgactaaaaataaataacacatgataactctgaaataattataatttaaaatgtaaagaaaaccaaagccctataatctaaatacattaaaaattatgccatgaaaaataaaatcttaaatttgttcacattttgtgtaaattctactatattttagggataattaaattattgaacaattttttttgatgaatcagatgattatattgctccaaatattcatttacaaactattagcacgctaacaatagggcatatctatatcaactatacaaatcatttccttttaactttacaacaactttacaacgaattaaattattctttgtctttctcattgacctttttaggcaaaatcaaatcaattctctg

SEQ ID NO: 327502 - DNA, 898 bp, Cannabis indica
gctccaatcttcttcttcttcttttctaggattttgtttctgcctcctttggctctctttttattttttaaaccctcttttgctttaaaaaaagaattttcaaccaaaacacgcgaaaaagataaaaaaatctcgtctttcttcgatgacagcgcagcgatgctaataatgggcgtcgcgacgcctggagcaacttcaacactccattttccctttgtaagaccccgttgtggcgccttggaggtgcaattagtgtcgcaatgctagttttgggcactgcggcacttgacacttttctacttcgacctctctcagtaaaatgcacataacttttgcatacaaagtctaaatgagctgattcaagatgcattcaaaatctgagaaagagctctaaaacttttattttttgatattttctaaaatatgaacaaaacgtggttgaatttctacttgaagtttcagctatatttttcttccaaagttctctatgttataaattaccgtattttcaatatttgaccaattttcacattatgagtgtcaaaaatttgaaatcaaagaaaataagcgtaattctatttcaaaaactagtctatttcaaagggaaatttgattttctatacttaaaaaattaatttttttttatactaatacattttacactacaaaaaatatgacatttttttcaaaaccccaaaagtacccccctcataactcaaacactctctctcttcctctcactgaaaacgaatgaaaaaaaaaaatggcccaggtccgatggtcggaccatggggtccgatggggtccgaccatcggaccccaaggtccgaccatcgcacctgggtttttttttttcattcgttttcagagagaggaagagagagagtgtttgagttat

SEQ ID NO: 327503 - DNA, 1586 bp, Cannabis indica
cctgaaatttgatggaaccataaaaaaaattgaagcccttaatttaaagaaaaaagttaataattttttcaaaaatttaataaaaaaaataatgtaaattttgaagaaaaaataaaataaaactttttttaaggctactagactgagtaggctttaggcacaagtctaatccatctatactcagaggtcgaacctgctctaaaattatcacaataggtttatgacactaatttgtgtttatgagatatttggtcttcaaaattaggcgtgtcaatttaatgtggtagatattattgctattgaattaggattatgtgcttataatgaaaatatattatataaaaaaaaagaaattttgagtttttatgtaaatatttagaaaggaaaaggacatagatttaaacataaaaaatgatgaatgaaggtttgggattgaatttcaaagcatccaaactcgaatactttaaaattgaggggcaattttagagaaattttactttttataaataactcctattttttatattatttaaaatatcctttttaaatttaaaaaataaaagataaagcatctaataggagaaaaaataaaaattgctaagggcgaagctgagtctagtacaatttgagttcggtttaaagtccgaaaactacatataaatatcagatgataagaatattgaaggatgaaagactttgaattgagctctgtagaatttgatttctactttgttagcttgtcattactctgtgaaatcgctaactcatttctcttatctttagccagagttcatcatcaacgagactccaacgcaattcttctcaacaaaatccatggagaaacaacaacaaaatcaattctagcaagagaaattgtaatttgtaacagtgtaactaaatttgttgtcaggactatttcacaagtcatcacctatgaaaatcaaacctccagctatcatgtttaggaggttagttggataaatttgagatttttgatgaattttatatatatataaaatctgtctaattttataccctaatttatttagacattataagagttttttagtttaattttatttttgattgtatatgttgtagttatttaggattatctgtaaatttttaaaaaattttaaacaatttacaatgccaaggttcaaatattttgttaacgcgttgaatttttttcttatacatatggtaaacaactcattgaaccttatttttgacactataaactatgtataaatttttgaaatttacaggtagttttaaaatttgtctaaaatattatttttttaattttatctcaaatatatatatatattttatttttaaatattttaaaggctaactaaaattttccccccaaactttttaggccattaaaaatttccttaaactattgagagtgttggattcaaagaaatccaccaaattctgttcaattctagtaacgtagtgattgtccatgtaccaaatcaagcccctaaacttgaaatatctataacataaatgatcatgaaattacacagagaagtcattgaattcaacaatctcaatagttcgagaggaatttttaa

SEQ ID NO: 327504 - DNA, 738 bp, Cannabis indica
cggtattatggcttaaataaaaagaaaaatggtatttataggattaagttttaaatttggtctgtcagcgtaattttctctaaattataactatgtaatccattcctaataaattagagaagctcccacagttacaaaggaaacttcaagcccatataggtcatgtgttgagattgggagagtggatcctgggtttctctacttcacatgatagttctaggtgtaatatctcaaaaacttaattctggttaattaaactatatttaaaaaatatgtagtaataggtgtattaagggcataaatgggtaagattacaatcttactagaataattatgtgatagctaaggattttaatagaaatgaataaataaacatactttattaattatagagattttattggaatatatgagttgtatgcatgctatttatgaaataatttttttttcaagttcagcaatcgtggaaacccgattggttagctagaaatgttatgcaataatagtttgagatttagttatactgggaagttttagtaggtgtttgtattatcggagtatctcggggtacatggttatggttattttaccccaggtcttacactatgtttggtagaggggagagaaggagggagggattggagaatctttttgtttggcaagagggagaggagagatggaaggagagggtctccctccaaacacactatttttaatccctcttaacatgggggaatt

SEQ ID NO: 327505 - DNA, 723 bp, Cannabis indica
tctaatttctagagttatcattcctcatcctggcgttatagttgatcatctgctgggcggccgactggtggtggtggtggtgatctttagggaagaactggtgatggtagtggtcccaggccgcggtccgagattaatttgccgactcatttcactcattttttttttctttttctctctagatctttgtttttgtctctgatcttcttcttttctcttagccttagctagctagtaatggaaatagttgagattatttacatctatattgataagatttttccaccaaaacccaaacgaaaagaattaacaaataatttgtttggacagatttttgtgcctgatgatgatgatgatgatgatggtgatggtgatggtgatggtgatggtgatggtgatggtgatggtgatgatgatgaagagaagaaggaaaatggattttgtattaatcgaaataagtttctatcggtcacttatttaagacaaattagtttcggggtaatttttatttatgtatttcattgtttagccgcccagtagacaaatgaggagagaaagagggttgggaagaaaaagaagaagaaagagaaagaagaagaagaagaaaaagaaaacaaaagtaaaaaaaaaaaattaatttttttaaattaaaaaaagtaaaaaagaaaaaaaaatattttttaattttttaaatatttataattaatttttaaaattaatatt

SEQ ID NO: 327506 - DNA, 991 bp, Cannabis indica
gagttactagttactagttactagttacctgagcaatccggcaaactgtataatgaccatcatttccccaaccatgaataagggctggaaacataataagcaaagacactaaacacaatttaacccaccaattctccatattgttattatctaaaacttgggttcttctctgtttttgtatgtatatttatattcacttgatatttggtatttaatgagatttttttaattttgagggtggtgtgaatagcatgaatgtaatatccaatcatggattttttttgactttgattgtgtccatatttgcattcagaccaattcagtagttgttgttattttgactaaaatgaccttgggagagactagagagtgtaactttaagactaaaagttgagggttattttggtcaaatgaagaagaaaatattgaaaaggaaaaaaaatatttgaaattgttgataacgccataattaatcaatattcaataatgaaattaatgctgtttaactttataaggagattgatatatagatagatacagttttatctttttgtcaccttatttttataggttttatatatctgtaggattacattttttttatgattgttgattttcatccgttaaagttggagtagtgatgatttttttggatgggtctaaataatcttaatttgggatttcttaaggattcataaataaattaataataaaataaaatgacttgtcttaatatagttaattatgaaaataaattattgagttattctgtatttttttttttaaagatatgaaatcattaattgggatttcccatattagaagcatatataagaattatcttatatttatagtatttacctatactattagtatgagattatttggaaaaatgtccaaaaacagattcgagcagctatgtccaaaacggacgatgtgacagtcagtagtcccgtgatccgtaaggggaaataccgggtaagctgtgcaa

SEQ ID NO: 327507 - DNA, 690 bp, Cannabis indica
tcgctagagattttttttttgtttgttttgctctgataccatgttagaatttgtgaataaggtgaataaggttccatcccaaaaccaattggcaatgtagaactctctaacattctaaaagaaaattgttaaaactaaaagacattagtggttccaaccactttctataagtgacgtcccacgataagttaataatattatttaaaatttattttattaaattacataaaactggatgtacttaataacactattaggtgcatgacatcgatagaagtgttaagcactaattatactttttttttttattataatattcagcaccttctttttcttttctttttaataatgtacagtacaactttgtgttgtttatgttaatttagcacaatatggtctaaataatagtaaaacatttcttggatatacaatataatatgtaaggaaactttatgagtagtacttattgcttttgtgtctaccaccataataattatagggaaattttgatgggccaccttattttggcaattatttttaaaaattgacgttatttttgttatgttaagtttccgtatatgtagttgacgtttttatggtaattttctattttttaacgtattgtatattgggcttgtaatcccgattttttcggcccaattttttaaaactacactctttgtatgtgtc

SEQ ID NO: 327508 - DNA, 1016 bp, Cannabis indica
ttattgaacccaatatttttattgttatttttttaactttatactatatttagtactaaaatataaatttgcatctatttttaacataatacaatgtagaaaaaaaaaaaggtgccctcacttataaaaaaaaaagtatcgccctcccaacgtaaattttgggttcgccgttgtttatcactgatctatataaatcctactattaataagtaatagcaatttctactcgctctcacactttaattcctaaacttatatcatgcttattcttttattgatcaatatatgatatttgttattcttttaacgacttcttcatgtatagatatattctttctatttgctacatcatttacaactacctttcgttgattgcaattctttgttgcttgttatgtttatttcttttttgttagcttttttttttttctagtgtttggctttttctcttaaaatttttattagtgctcaatgttataattagcaatatatctttttttcatataaattgttgatatgtatacatatatctaattctagacacacgcaataatacatgtatatacatatagtatctattatacatggacacgtctataatagaaggccttgcttatgtacaaagttttaaatttttattatttttcattgattatatatatacttgaacatttatttatcccttgatgatattttttcctttttcataacgcacattttatgatatgttttctataaattttatttttttgtgagttctttacaaaattttaaagtttaaatctttccattcttataccgtttaaataaatatttcatatttgttgtttttctctagaaacatattgtttattgcttttattaaaaaaaaatcttataaatgtctttatatatagatttatcaattttaattttaatcttctgtataacttttgacaataattcttcaattagaatttgatattgtatggtaagctctacatatttctcaatttgtagggttagtattttttttt

SEQ ID NO: 327509 - DNA, 549 bp, Cannabis indica
ttagctcgagcatcctatttagttactggtcgtgttatcaggagtagtgatgttactccagattttaatcatgtaatcactatggattgcaattaataaagattattttatttcaaaaaaaaaattagttgccttttcttaacaaaatatttttttaaagaaaaattaaataacttttgatgatagtactttttagcattttctaaattttgtttgagccaaaagtatattttaaattttttttatatatataatatatatactagttagaaacaaaactcaaatatacatttatcattttatttttttaagttttttttttctttttagaaacatattaaaatagttcgttgaaattattatttatttttaaaaatactatgaaaactttgaatatgattttttttttttgagagaatagctttaggaaacacttccttgaagcaaaacgctgaagaggggttgagtattagaataattcgttaattgttataaaataatataaaataatataaagtagatgagaagaaagaagaagaagatgaagag

SEQ ID NO: 327510 - DNA, 1271 bp, Cannabis indica
gacacactaaagaagcgccttgaggagacaaaaggaaactggtgtgaattactcccagaggtcatatggtcacacagtactaccgacaagacaaccactaggcaaattccattcgctctagcttatggctatgaggcaatgtttcttgtagagctagtgccactgtctcacaaaaggacaacctatgaccaggatacaaacaacatcttgttggtagaatcctttaacaaaatagaagaaagaagagaccaagccaatctaaagctccacgcctacaaccaaaaggtcacatggtacttcaacaaacaagtcaaggataggaaattcttcataggagatctggtgctccaaagagtgttcctaaacaccaaagatctagtagcaggagtgttcagacccaatttggaaggcccctatcaagttatataaataactagtaagggaacctacaagctaggaaggtacaacgagaatatgaagctcgtactcctaccaagatactggaatggagagcaccttcgcaaatactatcagtacgcttcttacaaaatgatattttgcagtagtggttctaccaactcatcataagagtaaaaaagagctagtactcatgaccttttggcgtggccgcccatcgttcttctatggtggctctgctttgcaagtctagtaggggtagccatttgatatctacaagcgaatctacaaatatcgattaatgaataaaaaatgatgtttatgttccaatatgttgtgtctaaacaacttgctaacaagattcttaaagttattcttttttcaattccacatgcgtacaataggtagcacactaagaaaatacccaagcaaggtctataaaattcggtgaattgcaagtgagcaatagactgtaagtctacatgctcacttggggtgcacccacactgtacaacacattaactagcacaaagaacttatgcagagaaattttaacgcttagtataatctactaaacctgcctctaagttagctgcaagcatactttagcttggcataaaacaagtaaatatgtatacttacacgtcgaggcaatataaagatagctaggattaaagactgtctggttggtcaaacaatcgataatacaaagctttaaggctaaatagtagtaatattcagccccgagcagttcggtaatagcctaatcctcgttatttgtattgacttaagatcaaggagaaaggttccttttcttatagctcttacaataatatctctgaatgtataattct

SEQ ID NO: 327511 - DNA, 597 bp, Cannabis indica
ttttttactatttttactattttactagtcacagaaatagcctagtagtaccacacattaagtttgaatctccttactctaataaaatattaaatgaaaaaaaaggagataacccaccattccttgaagataaatataaaatgaaaaaaagattaggggttagaagtgttactaaatattttgattgaaagcataagttcccaccaatcttgatgactgaataaagatgaattgtattgtccttggctagaaattaccaatggggtttttggttccaagtttgcaatttctttcattttgtgataatagaaagtgactctaaaattgttatcaacatgctaaaaggaaactcttcttattggatcatttgttagagctggtgggttcaatgatgatttttgttgcattgcattgcacaaaattggtccatagataaaacctcaatttactattaaacaagggtattcctctcccaaaaggcattctacattgggaaattatagtaaatagtcctaaatcagtatgttagtttatgtcctcattttaaaaaaaaatatagcaaatgaccctaaattaagattatgttagtaaatgtcc

SEQ ID NO: 327512 - DNA, 1336 bp, Cannabis indica
ctaaacactttgttattatcagtaacagatttcgttattgtcttaaataaggcacttataaggctcagattctaaatcattgagttgggtttgccaaattttacatctaacttctcatatttttttaaaaaatttctatgaaaaattaataatgttaaaatttaatgcaattttattatttagttatcatcaaataaacacatatttattttatatatataatttaaaattttttaaacatctactctgaatggcgaattatttactagtacaattaataacaaagttttatataaacaactaacgtaaaagagtaaaataaaataaaaagaataaaataatcttatataactatttaacacactattaaattaaacttttaacactataagttatattttagttattaatcaatcatttatctattgaatttgctgttacttagattaaattttgttgaaataaattatattttaattttgtattattaaaggaaccgaacatgatcttttaatttttctttctcacggttagattgaacattgaatgaaccgaacatggtattaagctcatataataaattagagcgtgtgtggtgtgatgattgaaatgacacaaataaataaaaaagggtccatctctgtaaagtgttggttaatcatggactcggttttataggtaatattcaagaaatagattgggcagtggcggcatttaagtatgtgggactctctatgcttcttaccaaattttgattttaattttgaagtttggataagttttgtcctatccctatccaagctgtaactatccatggccagtttaatcaactttctcctcgtgggcgagctttgactaatcaccttattggtgaaatttgactagtttaatgatttgccacacacattgtcatatatataccactttaacccttgccctcaatttcacctacaccacacatttggactgttaacatgtcatttatagctgttatctagaatttctctctcttctttttcaaagcaagctgtacactccctatttataatttatatgcatatttgttgttgctagcattttttttttttcatttataaaaagagaaaagactcattagttaggacatatttttaaccttgattctgccaaatcaatagtgtagcatattatctgtaaagtctttacacaattgaaatatccatatgaaaaaaataattttttcttagaggatcttaatagtggtaaatagattttgtattgctattttcttttaacatttttaataattttttttttttaaaaaaaattagtataaatatagcattgtatcaatttt

SEQ ID NO: 327513 - DNA, 1290 bp, Cannabis indica
aatggttttgcctttgggtgagcttatatctaataccaaaacacaatgcattttaatatgtgcaacttaaatatctaaattataaaatagtgattcagataaataactttaatgtatgcatcccattcggcattagatataagaatggtattagttgtaggatcataaacatttcctgttttcatagttattggcaaccaagtttgatatttatcatttagataatcaaaatgattcttcaattatttttgtgttgcaaagaaagaatgagtagtctctaaaatttgtctaactttattccacgaatttgacttaagatacttcttgagtacaagtctccaaaaatatatttaccacttccatattcttccaatttactctttgatttgatttacactagattgttccatctaataacatacaaatgatatatattgaaaaatatttatatgcaaaaaatatataaaatatgtgagtggcatatggttacatcaatatttttttttcctgtacatttaaataaaaagaaagcacaatacttaaaaatagaattaaatcaaataatattatatagtatagtgtagacaatactacactataatttaccatcattctatctatgtatatatattttttagatacacaaaatttgtgtgattaataattttttttttcaattttcatacatgcatataatttaataaaaactaaataataaataaataaataaaataatatattatatataatggtgatggtgatatatgatgatgattatatatatatttataaatatgatgatgtgataggctgatcatatatatacataatatcacacgttatatatataataaggaaaagattatgatatttttttgataaagaaagatgattgtgatgttaacggtgatgttgcgttaacaaaatgagaaaatgaaaaagaaaaaacaattgacaagttgaattaagtagtttataatctggttaaaatttataaactcaatctatgtgaaaattccctatatttctatagtaaagtttaatcacaaagaaattattaagcaaagtaacttataaaattatacaaataatctagatacttttgtcctaaattaatatacatccataacaatcagagcatattcaaatctcatttttcaaaattttgatttgaattaataaatagcaattatagatgaccagcagggccggcccaagcattgggcagcttgggccattgcacaaggcccctatttttctaaggcccatttttttttttttattaaaaaa

SEQ ID NO: 327514 - DNA, 757 bp, Cannabis indica
agcatttctctatataaatatatctattgatatttaagaagaatataaagagagtgagagcagtgtaagatgacaacaatgaggtttatttatttattatgtttttttttttttaaatataatgtacaatacaaagcaaccgggtcgggtccacactgttgggtctcatttccactaataagtctctttgaatcttaatcaatataatattctttttacgtgcttacattcccagttcaacacgttcacgtacagttctatgcacccaaaaaagaaaagaaaacatttctaattattagagaaggaaaagtgtaaagacttattttattaagatacatataattcaacacattacaaatgaatataataaacaatgatatcttaatgaatgattgattaattttcttagatgataattaactgagaaaacccacgggattaagttttctcttttttctttttaatttcattgctaaaattcgagtgtttatatgttggtaggatgtatagatactactacaattatagacttaaaaggctattttttctactctttttataaaaaagaaaactaaagcgtgtgagtcggttttttggtaaaaaccgtaggtatatatattattaatactttttaaaggtagttttagaatcaggtatttagagtgtgagtcgagccatctatggcatcggttattcgaaaataaccgacgtggcttgtaacgcccgcattttaaatttactagactcaaaagataac

SEQ ID NO: 327515 - DNA, 986 bp, Cannabis indica
tttagggtcatttgctatattttttttaaaaaatgacataaactaacatactcctatgatttggggccatttactataatttccttttttttttacatattctccttatcttactcttctttaattttaaaaaaatgagcctctctcacaatctctgagctccctatttctcggatcactgtgaacaattagaccattcaatctcaagaatcatttaactctttatattttaaacattgagaatattatgtagtttgtttttgttatatgtgtggtatttgtttacactgatataattttatagcttttttgtctaagacgtcaagatttggttttcttgtggttgatgggtttttttactgtttatcgaagatatatcgatagcatgtcgatattgtcgatgataagcaagacaaggtcagggaagaccattattgatagtttttaaatagtttatcgataatttaccaaaataagattttggcacaaattgtcgattgtatatccatagtatgtcgataattttccaaaactagttttctgcattaattgtcgatagtatatcgatggtttgtcgattgaatgtttgatagttttatctaatttttaatttaaaagtaaagatatgtttgtcgatttgatatcgatgggatgttaattgtttattgacatgcctctcctttaaatattgaaaaaaaaaattattgacacaaacaaaaattttaaaacataaagaaagacaaaacgatcaggataacaatcttaaaatttaaaagtaacccgtatatataaaatttaaaagtctcgagagttacggtgatttatgtaatgcataaacataaaatttaaaagtctttagagttagagtgatacatgcaatatgtgcacaacgacccgagcatcaccattttgtctttaatcgtgatcattttgtaacgacggcacccttcgggtagggctgttcatccgatccaatccgcactttt

SEQ ID NO: 327516 - DNA, 760 bp, Cannabis indica
cagttttttttttttgaaaattttgcttctaaaaatgacttgtcgtatgaagtattctccttcctctgtaatgggtcgtcttgacccgattttctgcaaataggtcaaatggacctgtttcaaaagccgacctaaaaataccgcttttgacactaattttcatgtttttcaacccagatcgatgaaaaatgaatatatgaagagattcaacacatttttaagctaaataaacatgttaaatttaattttaatttcaaaaaaataactcccaatttaccaacgtatacctagattcagaagctcaattttcatgtattttgaacctagttactcatgcataaacatgagaacaataacttaaggaattttaatattattaatatggtaaaaataaataaaatcaaaacttcaaaatcttaaaatacaaatgtatattataggattattaatgtgatatataatttgaaaaataactcttactaatgaagatgataaataaataaaaattggccaaactagtacatcaaccaatatatgaaatctcaaaatattgaacatatttatatactatgttctcaaagatttattttacataaagaataagaaaattatacccttcctaatgatgaatatacattaaaaaacattaacaactagcaaaattttaagcaattaactataaataagatttcattaattaaatatatgaaataaatcaaaatagaaataaaatttgttctgataccaactgtaagatatt

SEQ ID NO: 327517 - DNA, 1076 bp, Cannabis indica
aaaataaaaattaaaaaatataactaacgtaacaataataatttaatagggtgttcataaaaactgataaagtgaaaccgactatcaaaccgaccagaccataaccgaattttcagttccacgtcatcactgaatttggcggtcggtttcggtttttttgacatggcggtcagttttggtttttaaaataaaaaaaaatggttaaactaaaaaactgctaaaactgacaaaaaccgcaataaaccgtccaaaaccgctaaaaaccgtcaaagaccgtatggtcggttatatacagttataatttctaacagtaggttaccggtcggttataaaattgtaaaaaccgaccggtcggttataaaattataaaaaccgaccataaccgactgatttacactcctctaatctagtatataataatctacgtaggggtccaaattacttcttttaagttttaagttcgtacgtaatagactataaatttataattgaattgctggtaggggcatatgagcaatgctacatatcttaataaagtatatcataaattactatgaatgatattgtagcaacacttatatttaaaatatatctatctaaaagattaaaacataaattaataattataattgtaacttgatttgtctttgtcgtatgatcatacctttacacacaatctaaataaaaaaaaaaaaaatttaaactttccctaaaactaatatttacgtgtctcgcacgtaactcctacctagtatatatatatggccccccaatccctctatatataaatatatatcaacaaaatggttaattttttttttgtcttgctttaatttctccttaatttgtaggtgaaagtcaacataatatatgccatcttaataattgtatggtagcagtggctgagacgcttttgtacaatatgattagttgagccgtatacgtgtggtgctctttatttggaagtatacgtgtgtttcggtaggtaatattattttagattctgtgttttggtaaaaattgttaattaaattttttattttttaaaatgacaaaataaatcttgtattttttaa

SEQ ID NO: 327518 - DNA, 1822 bp, Cannabis indica
cttgaacaattaaaccaaacgccgaatacatcaccaccgaactattaatagcttgcacagagactaagctatcactctccacgcacacttgctgaaacggcttgtccttcaaccagctcaaagcctcccgtatccccatggcttcggcatcagcaggatctggtttccctggccgagacaaccccactgccgacagtagctcagccttgcaatccctcaccacgaacccgattccaaaccggctgtagctgtcaaatattgcagcgtccacattaagcttgatcccattagtcactagtttagtccaaagctcatcccctttgttgaaaaattgaggattcaacaaagggtaattttcactcgattgagcttttctccattgatcaagtgatcttaaagcaaactgaacaacatcatccacagtctgattcttttgatcccaaaccaactcattcctagccttccatatagcccaacacaatgtccccacctgagcaactttccaatcatcaacccttgccattagatcttgcagccaatctttaaaagaatcccacacccgacccccaccatctaatgccattctcgaccaacacccaacaacgaaatcacaattaagaagacaatgcgatatagtttcgctggacactaagcaaaaaggacaactataatccaagggcaccttcctatcaaagagtctcttccttgtaggaagacaatttgaagcagccctccaaagaacatccttgacagtaggcgtcacttttaaactccaaaggtccttccaaaactttgattcactatctctcaccccagagctagactctcggttaacaagcaatgataggctgtcttaaccgagtaaacaccatgcctctctttgaaccagtaccacgaatcacgagcatctccagcagcaagaggaattcctaagataacctctgcatctccttcattaaacacgtcacgaaccacctcttcatcccactctcgacacccaactttgaataaactattaaccctatgatcgttgtacatagataaatcagaggtaggagttggaaactcttctcttggaagccacaggtccgacacaaatcggatagaaagaccatccccaatccacattcttaacccagcttttaacacactttgagcctccaccaaacttctccatataaaacttggattggagcctagttcagcagtcaaaaattccccatgcgcatagtatctcactttaaacacctggcgcaccaaagaattgggattaataatcaatctccatccttgcttacaaagcatagcaatattaaaatctcgaagactcctaaatcccattccaccgtcaaacttttgcttcactagtcgggaccaactcatccaactaattcctttattttggttccaagaagatttccaccaaaatcttgccatcaaactctcgatctccttacacaccccaaccggaagtaaaaagacgctcataacataggtaggtagtgattgcactaccgttttaatcaacacctccttacccgcatgagacagaaacttagtatcccaacttttaattcgctttagaaccttctctttaagaaaccccagaatagcattcttatttttaccaatcgtacttgggagacccaaataagaactgttagcatcagcttcaatcatccccaacaccgcacatattcgatttcggaggtcctccctagtattggaactaaagaaaaccgaggacttagccttgttactattaacaaaactgttgggttttatgccctaaataaaactctttacaatctgattagttatc

SEQ ID NO: 327519 - DNA, 1231 bp, Cannabis indica
ttgataaaaaaaaatggatataggaggagaaaattttgttgaagaagggagaacgaggatttcgttcgttcatttcgtttatattactgtaacttatataatatatcttactattataattatggcttattagtgtgatagttgatgaccaattagctctttttaaaatcttattattaccaatattaccatttggttgactggttgttgactggtcataagggaagttgtattattatattaataacgtcacaaattttgttgactaattataccaaaactttaccaatataagtgttcttcccaaaaaaaaaaaaaacattccataaactttatattttcctcttcttcttttgttgactaattcaaccaaaaccttatctcttcccaaaaaaaaccttccatgaactgattgttcttcccaaaaaaaaaaaccttccataaactttatctcttcctcttcttctctccttctctttctctgtaactacgtttcatcttcacattacgttggtgatgatgagtttgggtgattcaaccacaacctctatctacacttactgttattatttttgttctgtgaagtttatatatgtatttggaatggatttgaatggtgtggtgtggtaaatcttcagcttcgacatgcacattactggattgatttagatgttaataccaggtatgttcattgatttcaaaatccctaattcttttaccattctttctctctatctgtatataaaaatgtaaaatccctaattttttttatttgtttttcttcaattttttttttcaaattccctaatttttttacctctttttctctccatctgtatatataaatgtgacatccctaatttatttctattttttcaattttttttcataaataaaatttacagccacttactattttgatgaaatttatctacctttacacatatttcaatttaagttttttacttttgaatttcttggactgatgcatgtatgataatttttcccaaaaagaaaaagcgaaaaaaatatagataatttttggtgttttttttttaaaaaaaaaaattaaaaaaatatacaactacttgttaatttatctatatttagtttactcattaaatacgtgttacaatactaaatttttgatttttcatattatcaatttttttataatttctaaatatctattagtagagtttttaaagtatttgaagataaatgtttgatt

SEQ ID NO: 327520 - DNA, 674 bp, Cannabis indica
gcaatgcaaaaaatgtacctagtcttattataataccgctaaaatggattattattaagttttattttaataaaaaattagttcataatactattttgtattattttgaaaaatataatatcaaatttattatttaataaaacaataaatctaattaattaataaattttataagacacaaaaataaaaataatatttactctatttattattaactaaaaggagtgtaaaagttagtcttcaattgaatcaaataagaaagtggtataactatttatattaattaaggatctttaaattcttataatataacaaagattatattaattttatacatttccaaaaaaaaaaaagtgagagattatattttataactcatttataaaagtcttataaattgataaaaatctatattttttttgacataggatacaaatcaatattaactgatcatattttatacaaatcgatatttttcattgacataggatacaaatcaataataataataatcttgcaccgtgcgaatcacccatatataaacattctttaagtggccatagcagggtgtgtatgttggaagttctgggtttgagtctcaaattatgcatggttgtaatatataaacgcttaaattaaagaaatttttacatgaaaaatcctttttagacact

SEQ ID NO: 327521 - DNA, 1124 bp, Cannabis indica
attacacgcatgatccactaattcttttttttttttcagaatttttatattagcacctgattagttttgtaggcagaacagagtacattgaatactataatttatttcattaatcaaacacaatatcaccaaattttcttgctacttgtagttgatctcccacaattttgaacaattaatcaacagatctgcaaacaacattctatgagaagttccttctcgtaaaatttaaaggttgattgcttttattctagtggtgtagtccaaacactattaggtgagggagatggtgtttcaatctagtggtctgataatcaaagcaagatttaagagagggagataattggagattcaatctagtcatcaaaacaagatttaggtatatatataccagtaaaaaaaaaaagcagatttacagttgtaagtaacaatagtaaaactttttaaacatactaagatttgagcgatgaaagcaacatacctaaataatgaacacaacaagaactgaaaactaacagagaaaaatgacaataactatattacatacaactgaaagctacttttggtaaatatgggtttttagttaatttaagccctcttttctaattggtgaagaacctcttgcttccttccatttatcataaaacctcagaacatgttaatttgtcaaacatgcattggaatcaacaaatgaaagttttaaacctcttagaaataacaaaaacttcttggtccaatttcaaaaagctcatcgaggaaaagaaaaaagcactaagagcatggaaacagagaaatgaaaataaaaacaaaatagttgtattcacacatcataacacctaaaaaaaagtaataatagatttctcaaaactaataaactatttaaatttcctctaacctcaatatctataagaatagaaaatagttctctcatcagagtatgtattttgcgaaaatgtaaaaagtaataatattaaggttgagaattgaatcaaatttaatacaaaattagagaacaacatcaaaatctatctaattaggtttcgtgtaaagactaattataccaaaaaaaccaaatctaattggagtaatttctctaatggaaagagctaaaaatatatttacat

SEQ ID NO: 327522 - DNA, 633 bp, Cannabis indica
atccataacataggctaaaaatagcctaacacactaatatcaatgattcaactatatttaggggtgagacttgcattatactagagatgtttaatataacacgttgatcagattgttgagattgttgagattgctgagagttttcttgcatcttctgtgctagtataaccataagtctttgatattgtgtagccaaatttcactcttcagtcatcccctcattagtgccactgcatgctgcaaaattagttgatgatcgctcaagttgatttcctggtttaggaacctctcttggaaatctctcatacaatcgatggtcgggtggatattcatgaactctataaaattttgtaatagtgtgtccagagatactacaatgagaacaagcaggtcgattatcagatcaatcatatcgattatcaggacaataattgcctcaattaccttgtgcacttcctgcaaaattgacatgagttctcaataggaggtattgaagtttcagtttatggaataatgattcctctctgtttttcttcttgaattatgcaagcataagttttagagaaatttacatggtttactaacttttcccattttatttcaaaaatactgttacaagggtatttttacttt

SEQ ID NO: 327523 - DNA, 645 bp, Cannabis indica
ataacattaaaacataacttttaaagcttaaattatcaaaatgggtaattaagtaaaaaaatggtaaaaagattagaaatacaaaagaaaaaattaaaacttaaatttttttagtactttcagcctgttatcatagctaacattgctctgtgttagctcaaatcttagaaaaaaaaaaaaaaaaaaaaaaaactaatatgcagagcagaaaaaaaaacaagtagacaaaaaattcgaaatctcccagtgtcgaaacccgaaacccagttctccctactatccttgatctgtcgagcttaccctctctctctctcttgtctttctctcttctcgctgaacaaccacggccaggccagacgccggccattcttagtcatccaagcttgaaatgaagcccagaaaactcaaaatccaaactccaaccttctacccttgagccccttggttgttcgtcgttctccctctctccttcttggctgtgcacgacatgcgagctctgatcaccgcaggccgaaatggaggccatggatgatctctctaggttgtgaaatcttgtggtggtactcaagggctctcatggttgggtgaaagaagacgaacaagaaaaaaaaacaaggaaagaaaagaaaaaataatataaaataa

SEQ ID NO: 327524 - DNA, 1062 bp, Cannabis indica
agaaattcaacaagatgcctttctctctcgggtttgagctaatttagccaatggtactatggttccttatgttttgttgaatgataaattagaccctgtattttttaaaatagtactaaatagtaccatgaactgattttcggtcaatgtaaaacttaataattagtcgatctgtaggtgttattacaaaactggttatgtttctgcgtctgtttgtgctaggaattatcttcaagttggttgtattaaaaaaatgttgtctaaaattgagctcatgatcctatttgtataattttagaaaatacagagttcattttgtcatttaacaaaacataaggtccaattaataacttttaccaaataagagatctaaaatagtattaacccttacaaaatgttattaaaactatggcattatagtggtcttttataaactaacaaaacaactatcatcaacttgtttggttggaataagttctctttcatattgaattgtttaatattttaaattttacatcaatagcactcataataataaaaggaattaaagatcacaaatcttctcttcgttaaatttattagtagctaattaattaagcttatccttattacatgtatagtgtatgtgttgtattataaattctaattttaaattagttaaagaaactatttgttagcaatctattgataaataaataaatggttagtgggcaaagtttttttttttttcttaagggaacatcaaccactattaataaaagggaaattttattttttatatttgggtccaaaattaaaaaataattcaaagatagtcatcctctcaaaattgatgttgttcttttattaggtaccaaaatacccttcagataacaaattcttagcttctattgcctttctcttttctctttctttttatcttttcaccatcaattttctctctctcttcaaatcctccattatataagatttttgcgctaaaaatcttgtaagaaaaacactcattcaactgagaggagtgctaccgtcaacctcctgttacaacctcttagtcaacctcta

SEQ ID NO: 327525 - DNA, 1196 bp, Cannabis indica
tgatattactcgattttattttaaatcaacccattgcttaattaaacagtagcgtacatcaatgtgacgggaaatgtatgtcataatttgattgagtaaaacccttctccttgtatcagatattactaatgggacttatttgcattgtacacattatttaactattaaatggttaaattcacaaaaaagaatattacgtgtacatgaacatcattacgtgtacatcaacctaccaaccactatataagtaaaggtttggattatgaaacaagaaatttattgaaactccgtattagctattaccatctactaactaaaatagacacttactcaaaattcaaccctttcgaagcaagtcctgaaaagtcccctcctcatccccattctttaactagagccttaagtacaccttcaaggagtcctagactccgttcagcatcaattatagatgtttaaattgtgctaggctggagggtgttctacatgaacatgccaaacttatcagggatgcacatgtaaaagcaaccgaggcaagacatgaatcattgcgacttgcggagcacctctaccattgtgcccatgccatgcaagatgcaaacatttctagagaaaaattcgagaatatcattgatgacattctggactacactgaggtcgccatatctcaatacccaatccatcccaaagaagaaccaagaaaccctactccaaaaggaagtccttcgtgacacaagtccccgttcagagacagtagccctccatctcaacgaaagttccctcatgttatacaatttgattgaacatccattgagtttcatatagtggtaatttatatatagtacttattttaaatctcatctcatatggtcgttatagaactttttgttatgccatttattgagataccctataagaagtttgctctatcgttgtactattatatcaatgtaaaggtgtctattatctaaaatctattttcattttgaacttatttgtattataaaaattatttactttaattttaattctacaattacttaagaaggagaaaagtcacattactacttcaaaataaaccaaacttcaaattttaccacaaacactgctaatacataaaatcttaaagaaagatataacatggaaactaacacagtacatcatttactgtttttgggagaaggatccattcctccttt

SEQ ID NO: 327526 - DNA, 1195 bp, Cannabis indica
tatatattctattatctttttatgcattaacaatatgaaactctctaacagcttctcttctgatcaaaattattatgccaaccaattttcatgattaccaataatttagcttaatgaacaataaaagctagacattccaccgtggaggaaggacaaagtggaataaaacttgcttatgctgattatagaacttgaaacaataggtgatcataactcctaagtaaatctctttttgaattttgtatttagtaaaagttttttattagacatttaaactttatatttttcaaataatacaaaataatactttaaatttaatttttattaacatagcatataataataataacttgacttgacttggagatactataactaaattagcttttttttttcatgttaaaaattatctttaaattaattatacaaaaaacagataataaaaactgagctcaaaatattattttagactactttaaaaatacaagatataaaattatcatttaaaaaaaaataaaagattcaatcagtacttttataaaatataaatctagacaaaaaaattaaaaaaagaaaagaaaagaagaaaattggagaaagagaaataattgtagtagttaagtccgtaagacgaaattgatagtttatgtacaaacacatgggcttatgtaccctcttcactatcagtctttattagttgggcctgggcccgtttaatcatcaaaattcaaagctagctattataatcctcattgtcacatcctaaatacgtgtgaagtgctacttctgaaatagtagtaaacggcctcatatccttttttagtgatacttaaggttcctttttaaaaataatagcaaatgacttttattattttttagtacttaaaatacccttagttatataaaggtattattaacattatattaaaggggggaaatagtagtaaatggctctttattgaaacttaatgttcttttttaaaaataatatagcaaatggcctttattattttttagtacctaaaatactcttagttatataagggtattattaacattacattaattctccaaatagaaatgaaaactttgctccaaaatctaaatgacaaagcctcacaattgaaagcaacgaagctttgctcatttttttcttcttttaattttctcatatctccaaattacaatgattacc

SEQ ID NO: 327527 - DNA, 819 bp, Cannabis indica
aaaaaaaaatcttattttagcacataaaaaagaaaataaattcttcactaactttaattattagtagtccttctaccatggatcatggaccacatttaaagacaatgttacatgtgactattcaatttttgaggtttaagggcatctacagctacgaataatgtttgatgatatgaatatatttttagtattttttaattgatgtttattattggaatggaaaaaaatgctacaaaaaatatcatactataacattatttacattttttcttttttatgttttattattattttattataaagtaaaagttttattttattaatatatatcaaataataatatattattattttaataatttttaaagatgcttactattagatcattttaaaataaaaaatataaaaagtaatataacagagaaataaaataaaataacatatttttagtgatgtaaaagtttttaacaatctaaaagaatactactattagagatatgctctaatactacagagaattttatttaccctacacaaatattataagggattttacatcacatactgaaataattttaaattttttatttttttattgtgggacgaaattttttcaaaaatactatgtaaattttatactgtgtactgtaataagtctttatggttgtttcagggtcattttttagttgttcaactgttgttttaattgttctattttataattttacagttgttttataaaaaaataatatatgttttgtaaaaaattctgtgtgagtaaaattataaatttttacctaaaatttaatatttttataa

SEQ ID NO: 327528 - DNA, 1084 bp, Cannabis indica
gcaattttttataatttttgctcggcgagaatggagtatgcgatggatggccgttagaatcacatgagtaagtctagaacctatttcttagtgggacgaatattagaaatatttaaaatgtcgaatttcgatggggttatggtttagaccattttacccctaagcttataagttgcttaaatgagatgtaagggcattttgggtattatgtttttagggttgaggtggttggattgcagcttggcagctggcacttaggtgttattttagccctgtccctttgattaattagtgagagtatttaaaattcaaaaaaaaagaaaaaagaagaagaaaagaagaagaacaaacccaactatatgcttattttctcttaacccttcaaacccagcataattcagcaacaaccattgaactttaaggaaatttgaggagtattatctggatttagacagagaaattaaaggtatgaaccctaaagctcacccttttaagtgtttttagttttctttagttttgagcataaattatagaattttggtgttgttcgagttagggttagtaactgattatttccagctattttgtaaagttattttaggattgaatcttgtggttttgatgcttgattctcgagttgagcaagtttgagttctaagaactctaacttggctcaacaatggtattttaaaattttgtgaaaaataattgctgtttttggttgcaaactaccctttgatgttgttataggtgttgtaatttattttaccaggatcttagatctactcacaagtatgttattttaacatcctaaacatgaacttctaaaacgatatgaaataaacacatataaagtataaaaaaccttacagtggttgcagcggaatataatgtctcattccactgagatctctaacccttgtatcctttctgtcgtggagtatcaccaagatctgagcatgaatgtccttctcttcagtttggattcttcacaatattccagactatgataagataccacttgatgtgtgtgggcactattgtatcactaagggtttcgaaaacttgaagagagagagagaga

SEQ ID NO: 327529 - DNA, 1471 bp, Cannabis indica
gaacaaccagttcaaatcctcgaccaaaaggattaagttctctagaacaagaccataacattagttaagatactctggaggaacagtaaggtggagaaaactacctaggagttagagtctgatggctcaatttccagagttgttcaagttagattttgaggacgaaatctttttaacatggggataattgtaatgaccgcatacttagaatatggtattagtaagggcaattagcattaattaactatatcatgggccttatttttaaaaaatagacattagagttataattttttaaatttaaaaattttattaaactaaatgtatattatatatgatgattatgcaaattaattaccaatgatttagaaaataaaataaacaattaacaaacaccatgaaaattcaaaatccccaaatattttcctattattacgaggtaggtacattagatacttggagtgtcatgattaataaaagtaaattatacaaatggattttgtatgcattgttgttaatggtatagtgagtttactgtacactcctaaagtatttggaacactcatatctctttataaaagagggtccttttaaacctttttttattacttgtaattatttaaaattttataatttttttttaaaaatagaatattttataatatataaaataagattcaatttgaatccttggatataatgtacaacacatgaagagtcaatttttttaccatccacttaaaattgctattaattgcaaacctaactactacttgtttcaatttttccttgttttatgaaagtggccaagttgtatctctcttaattccttactttgtaaacaagtagtaagctcatgattttccattatatcttcctttgtccacataggagcttagctatgaacttcgtacaaacttcaaatgatgagaatgttgacaacagtgcataacaaggaggagcctgttctttagatttgccttgttgactactgttagttccaagtgtattgcgattttcattacagggttgtcgttctcgatgtgtactatggttgctcgatgcacactctaacctcaaggaaggtacctttacaacatcatcgactactaaatcatgttgatcatttatattcaaatctacaataggatcattattgtagaagggagtatcaaactcctcaaactgatcaaatcctaccgctccttgctattgatctacattggtaggaacctcctcattcacaccaatcacaacatcaattttaggaatgaaagaccctaccacacttcgagggagaggattagtaggcggggtacgctccaaattccaaacttttcttaccttggtcacaaataatggcataaaatttgtgtttgacattgttgccctcatctctaagaatgttcttagttggcgtttgttaggttatatttagcctatgtttcgggtctgtaaagttagcattttc

SEQ ID NO: 327530 - DNA, 1019 bp, Cannabis indica
ctcatccgaaaccattaaattttctatccaaaccgaaaacctaatttcttgcatgccaaacaaacaagcaaatataattgagaactattaatatagctaattctattcacttatctgaaatacaactaagaattgagaattagggtttgattaaaaaaaatccataagcaaccaaaagaaaccctagaattgatcccaatttgccaaaacacataaaaaaatcaaatacagataaagccaccgaaatcaagctgtaatataaaaatcacaaaattaaaaaaaaaaaaatagaaaatccaattaagagggcgatctcacctgaattcgataagattctgagaaagtgtacgaactttgagagagagaaagtgagatagctttgaaagaggggagagaaagaaccttactttcttctctcccttttgagttttgtgtgtgtgttttcaatggtggaaatggaactctgattatgatgatcaaactttagtcacagtgaacatcctttttcgcatttgagaataatataatataatatatattttaaatttaattttaattaaagttgacagctgagtagtggaagagtataagggcgacacgtgttaaaaccgggaagagtgggccccgccccgtgtgggttttgagaggaaaatcaggtgaatgagactaattttgtttgggaagggagatgggtgtggtgtgtgttgtacttcttggcaagctggaacacctgcgccgccgctcgtcaattcgggtcacactctttggtttgacccttcatttcaaattttcatccaaacaaagtttttaagttaataaaattaataaaagaactataaacttatactaaaaggttggtacttatattttatgaatgaatattagcgaatgatggtgttagacatatctctttctcaaaaggttgattagtaggaggagttcttaaattatatggaaattagataacttaacccgccttagtgcggtagatataaataaaaaaaactttaatataataa

SEQ ID NO: 327531 - DNA, 3393 bp, Cannabis indica
ttttttttttgaaaccaaacgacatgagattcaggtacatgattaatgattttcattgattgaaaagtagggtatatatccatggaaaatgacactcgagttatattataacattcttttagttgttatggcaaaaacgacatttttttttttaacttttgtatcttcgaatattacaagcctaattattcaaatatacattactagcctaatatcataaggtaaaacttaaaattaattacttgaccaaaacatctacttaattatcaagaagatacaacgtaaacatcaagaaaccccttaacctaatttcaagtatgacacacaaatgatttcattaatttattttaaaaaataaatatatacacatatattataaatttatgcccttgtacaccctatatatttagtgctttattgatagaacagagtaattagataaattaaaaaatttgaaaatgagagatatgtcggcaggttttttttttcatgatttgggagaagttggcagttgtatctaaaagagaaacgtgagaatatcctaaaataaattatacaaagattataatgaattttttaaacagataaattatggattaataatagtaagaaaatagtaatgtgaaacatatcttgtttgttttgagaatttaacattgtaatgttattctcttagtaatataactgcttttaaagaagataatgttaataccttaaaaaaggatagtgttaaccgaggttttcggcaaccaaataaatgagataatgataagagattttggataattaatgcagatgatttttacgtggttcggacattaatgagctgtactccacgagtctctgttattaatgagagtatttgttttacagagaatgttcttggtgtgtttttctctctcctttttccgatcctctttcccatttttctcaggggtatttatagagattggtgggaatagataaaaaaggagtaacttgtttttgagtgctagctatggataagcacaagttcccaaaagatacaaaataaggcatgcattacttatactgtaggtgtcgaaggaattaggtgagattaaccttcatccttccttgattgatgtgattcttcataatggagtcgtcactagtcccttcgattatcatgtaatcgccctaaataaggcttacgatgtctgacatgtcctcttatgggtgttcctagacgctttccccatgttgcattcactactacaaaaataatttttctcgacatttttaaacagttgtttaaagtattcccggcagtttctataactgtcgcctatacgaccgtcgtaaaatgagtaaaataggcgacgattaaaaaccgtcactaatgtggacttcctgacggtttaaacccgtgccctatattataggcgacggtttaaaatcgtcgagaatgtaaaattaatttattaattaataaaaaatatataaataaataaatatatttgtaccgagctcagagaggaagaaagagagagagggagacagataggaggtggtggtggtccgacgtatgagacggagatgagagggacactgacgggaggtggtggtggtccgacatatgcaagagagagtagaaggagatcgacaggaggaggggtgggtggagatcaatgaacgagagagacgagaagaaatgaagatcgagaaagggaggaagacagcgagagaggagggcgatagtgcggaggcgtgtgtgggattttggaaagttaagatttttgttttagggtgtgggaaatggagaagaaataggtgagaaaaaataggtggcaatgcagccagttgtgctctctgaccctggtgtatttagtcaacctcgagtactctaaaacacttcagtaattctaaaagaaacttcccacaataatctcattaaatcactaactaaactcgttgtgatatttttggcctctaattgggtctccaaggtcgccaaacttaaaaatatttttattccaccaataactcacattatacccaaatattctaaataaatctccgtaattaataaattacacttatttatccacttatggtaaaattcataatttacgctgaattagattagcagaatcataatcctattcatcactctctaattaatcccaaaatatataataaattataattaagtttctgagatattacaatcaactcgataaaccaaatcttatgtaattttatttatagaaaaagacatcacaccaattttgataaaattctcaaaatttattgtaaaaaatggttcaaataacttattttataaatatataagggtaatttgcagctaaacttctcaaacttttaagtttggcacgatcaacctcctatgccgaaataattagggctgaattccccaatttacataatcgttttgctctgtactccttccatccactttagtttgttaagtggcaaagtgaactatcactgtgtacacaagcgtacacgtggaaaaatttcatcggtaatattaataattaaaaattttaaaattttggaaaaatattttttcctttctcttttttattattcttctttctttttcctcaactttttctctgtccctctctttctctcctgttacactaccactaccattatgtaacaccctaaagtttagtaaacggattagcaaccctaactaagttaattaagtattaatgagaaattatattactatatgatttaatatgtggaattatagagatttattgcattttgagaccatgtttgtgtgttgggagtatttttgtaattttgacctgagaagggtcaaaattataatttcacataatattgtgtttatggactatattattatatagtatgtttaatttgtctttctacatgtgatttttgacaagtcggcacggtatagtcacaatcgggtattttaggtccaaaccaggttcagggtccaaaatatatttattggatttagttatggcttatatgtgttaaatgagaaaatatgaattatgtgatatatgtgtgtgagtgggaatgacaaaattcccttgtatgttagttgtattgtgacagttagtagttccgtgattcgtaaaggaaaataccgggtaagctgcgcaatcccacattgtttggggaaaggtcaagtgtgatgattctgaggctgtgtaggtatgtgactacacagttgatgaggacttaaatggattgattggtactacctatatcaacaaggtacatcttgtttttcggtagtccatctcaaaataactctatgattaagcatgcttgacttggggtaatttcaggatgggttacctcctgggaagttttcccaagaagcatgcgagtgaggacaaagcacgctgaaaacactcgtgt

SEQ ID NO: 327532 - DNA, 578 bp, Cannabis indica
gttctctcataatttttatttttatttccacaaatttatagttttctcaataaaatttcattaatcatcttcataagaaaaaaacaaacaattttttgcccccaccaaaatatgccactgttcacacctctccatctcctcataaaaggtggtccaaaaatttaaatctcctgtccaccaatataaagtaaataaataaattgtacgtagcaatgttcagtcagtttatgttagcacgtgtttgaactgaagggatcactctagaacttgaattatacaccaaaggggtcaatatacttgtagagagatgtaaggatcttctttgttttatacatatacaatgagaaaccgacaagttcttcagctccaacaaaataagccacaaatggaaaaaggaatgcactaatatttaatttgatttaatttccatccatccacatataaagactaaatagaaaactttaaaatatattacgatctatatctgatattgacagtgcaggcaatacattttttgaataaatataatatgtataggtacgtcaatgcccacaaatatataacaatttttttataat

SEQ ID NO: 327533 - DNA, 797 bp, Cannabis indica
gctataagctaagcatcatcaaatataaagataattaaagcatatctcacaagatctgcacgacttacgactctgcagtgtgacttacgatgatgaaggatagatttatttagtttacctttacacttgaatgatactaactcataacagtaatatctccggtatgacccataatgcacacttacacttcagaaatctcttaaggaaaatttagataaacaatttgagggaagaacagtagaaattttatttactagaatatttttctgatgtcccttacaatataaaggttagctcaatatatagccatttacatggggtaggatacaaagtaagaaacttcctaaaagttttctacaaacagacaaacatgaaaaaagataaattgaaaacaaatggacaaacagacaaacttacaaatataaaaaacgacaaaccaacaaacaaatgaatagaaaaaattcttacaaatatcatgactgtcagaaatttttccacttattgctatcttaaaaagtaagagatatggagtctctttgtactacttattagggataagtaattggctcttggtcaacattgtattctgagtcataattggggtcctcctaaagtgggtgccaacctggtggttcatcatcttcatcacttctagttggtggacatgcatcatattcagaataagcaatctctccttctagtccattgtactgaaagatatagggatcctggttgatttcttggtccatgtatgaattttttgaatcctcaaaaatgcttgtcttacggagtaggac

SEQ ID NO: 327534 - DNA, 715 bp, Cannabis indica
aaaatacgttctgtaactacttttgtttttcaattttaaaaataaaaacaaaagtgtgttttgttaaagtttatttttattttttaattttatttaagtcggatctaggtctgagtttagatacggattcagatcataggttgggtttagcgctaaggccgtggggggaatttggattcgggtctggtcggagtcaaaaatattgattaagaaaaaaaactgtttaaaaaaaatattgaaagtaactattttttgtttttaaaattttgattctcgattaaaaaattgaaaagtgaaaacagttttatagaacatgtttttgaaaaatattttcacttttttaattttaaaaatagaaaattgattaaaaaagtattaccaaacaccacctttatttttaggcttaaaaaattactccataataaaatttctaattaatttcttttaaaaaaaataataataatttaaataattaaatattaatatttttaattagatttattcaaataccattcttttcatttttcctttctttctatctcttctcttcctcgcatcactcagaccctccaaacctacctagtcaggcaccaagaccactaatcaccaccaccaaaatactgacttttggcaaaatctttacaaaaaatactaccacacggcaaaaataacttttatattatcttggccagttttttttttcctttataatgta

SEQ ID NO: 327535 - DNA, 456 bp, Cannabis indica
ttttatttattttttcttttttaaaaaataaaatactaaaataaaaaaaagatctcaacttgtgacagttaatagtcccatgaaccgtaaaggaaaataccgggtgagatgtgtaatctcacctcgcttggagaatgttaaatgggatgattctcagactgtgtacgtctcaatcattattcttttgattaaaatccaaggatacaaattaaaattatttctccacaaaatctaataagtgatgcattttgagtaaaatattagggtcttaattagtttcagttcatcaaattatctcttgccatggattcaacaattcaaaaagttaaactattcgaaaatctctcaattatgtcgaaaatctttcaagatataaactatttaacttttatatatatctttttaaattaattaatcaaaaattcatcaatttaggtgacgtttggtaacattttt

SEQ ID NO: 327536 - DNA, 1297 bp, Cannabis indica
acatcacatatattgaaggaagttattcatcaatttagtaaaaattttatactgaacaaattctatcaattttaaataaaatgtttatgtacgtgttcaaattaagaactttaattttcattcaatactttcactatgagaagtatttaaatgagaatggagtgtttttttttcttttatttggcaagataaatgagaatggggttgagaggcagttagaactaagggtgtatgtcggtcggtttagtcgagttatattatatttttattaacccaatataaatatcgggttgtaaaaatttaatcgtaacccgcccaatgaaaatttagaaaaagttcaacccgccaaatgattttgtcggtttggtcaggttaacccgtccaaaccgttcttcttttttttttataattattggttattatgtttaggaatggaaattggttttatgaggtggtagtagattgaggcaccaacacctatttatatttgtttttaggccataaattctatttccaacaaataatttttactttatttttatgccaatgacaaatagcataatgtcatgtgttattcacttactccacacatgttgaaagagttcttcattataattatcagttattgtacatcatttcctgtatttagttaatattatgtcagttttgtaattagttcatggctaactctagttgtaaaatgattgttacctttccatgttagtcaccactattccaatttgattcggctaactaaattcttcaactgttcaaccaaaatagctttgtttgggtctagttaatgttgcatttattgatcccttaaattcaggggtggataacctcatacaacaagaaaaatatatcctgtcaatatcagtgattggcagacatttacactcctttatagatcttatttctgacaaaggtagaggtgttcaataaaatttacaaaccgcccaacctgaataaaccgcccaaaccaaaccgaataaaccgacaaaaaatataacccgaaataatacaatgaaaattcaaaccgcccaatgaatatattaagtggtttacaaattattctaaactgtccaattaacccgaataaatcgaattaaaccgatttacatattttttaataaaagtgtatatcttatattatataaattacatttattagttaaactattttgtatttaaagtttggacattttagtttttaacttaaaacttagatttcatagttaataatttatagtgtatttggatattgaagttaagtttaaaatctatactatattat

SEQ ID NO: 327537 - DNA, 413 bp, Cannabis indica
gtctcgtggagatagtatagaagtggctagccgcgtggcgagacgcatgcgagccgtgtggcaagctgtgtggcgagacgcacgcgagtcgtgtgtgcatgatgggtggcatgacaggggacgtgaggaggagatgagggcgagacatgggggctcgcacacgagccgtgtgtgcatgatgggtggcatgacgaggggatgtgaaagggagatgagggcgagtcgtgtgtgtgtgatgggaggcgtgatgggggtcaatgcaaggagggatgcaggtgtagggaaggaagtgagggaatatggaaaagagtgaagttgagtaagaactccggggacacgccgtgtagaggaaggcatatacccattgttggaatttattttaccaggatcttagatctactcacaagtatgtt

SEQ ID NO: 327538 - DNA, 2520 bp, Cannabis indica
cttcagcgcagaagcgacgagatgaacattatcaatctcggaaagtgtgggaaaagctctagctcgcttccaaagttattgttgctatgttcccgacaagacgtccaagaacaatatgagttgcagcatatttaatacacatttacattaactcggtaaaagcggactaatcacagctgtgtgatattcaaatattaaccgcatttgtttacgtgggatgtaatcgaatcccccatcttcaggggatgatggttgaaaaatattattcaactttgtaattaactgctctcctagaactatatcaaaaatctaattagattgactcgtggactatgtagaattttaattgcaaaaccacataaaaaacctttgtgttcatacatttttctttactgtttttatttttctgtgcaattttatcaccggttaggctcatatctggttaacaaaaatctgcgttaacagtttggtgctctcattgagagccttcgtgaaaaagctcagaaaaaaccctccttacataaaaaaataataatcctctttatggttgacaacaaagaaaataatcctcacaaagaaaccactcatcgtcctagaaaagagccaatgagtccccagagatctttcgacttatcatttgaacggaccacaagttcaaggaaaacccagaatttgggaaccgggcctaaaaggcctagaacaaacaatggcaggtctcctcctaatctagttgatgaggatggcgcctatgatccaacaaagtacataccaatcgtcgaactagaaaactgccatctcaggcgtcgattggaggaggcaaactggcgtaatggtgagttagagcatgaggtagctgcaaccaaggcggcacaagggaatagcacccaaaatcaacctgatcttagagagagagaatcgcgaggcgaacctcgagacttgcgaaccagggggcaggagatagcccaaaggaaccctcagaacgctcaagaaagaaaacttggggaaacaaggggataccttgaaggcaagatgccaaacgatcaactaagaactagggaactagaaattcctcgcagaaacaaggaaaatcttgggacacaacctggggtacatgggtcataggtgaggaatcgtcaatgtccttcccaagctcatagggaaggagctcgcacaaatctcgatatggggaatgaaacgaaccatacccaagggagaagaatgaggcatgaagaggcgagtgtcgctacgaagcatacaataacccacagtcgatcaatgcgaggaggagagaatcctcatcgcaacaatgatcaagaaggcagaatacgacctatgagtggaatgagatccgctagccgtcatagccactcagacctatgagaacacttgaaccagaaaaaacctaatcttcaccaacaactagctccgaagcaaagggattcaatccatttacaaatagacgagttggaggataagctcaagaggcatcaagtcagagagcaaggaaaacaattgggatttgatttcgctgaagaattcgagttggtagcgtctgggtcaaagaggaaagacgactctaagcggtcgcccgaagataataagcaaaagaaacacgacaaatatgtacacgtctatgctatttataccgagcttaatgaaactcgggagagaatctacctcgcgcatgaacacaaggtcactttcagcaaaccaaagcccatgaggcacgcgagacacaaaagggacccaaccaggcgctgtgaataccatggagatattgggcatacaatagaagagtgtcatcagttgaaagatgagatagaaggcttcattgtgcgaggacacttcgaacaatatgtaaaggggcaggacaatgtccataaccagcccgatctacccaatgaccgaagcgaccaggaaccacaacctccccctgttggaggaagggatacttcggttgtcatgggaggttaacatattgcaagaaaagaacggtgacacccaaaagggggatactaaagaaggttgcccagcattaattaaactagaggcaattagttcggtcaagaaattacgtagaactagtgcaaagtaattagatgccagctcgcgatggatgtcgtgtagagctgcgacacagaaaagtcagtcgtcaaccaatggcagttcgagcagaaggacaaacaaccaggatcagttcacctggagccgtggggatatggcagggattgaccatgaatatcaaaacccctgtgggaatatgttagggattgaccctgaatattaaaacccattttatcaaaactagatgcttctagaagattgataaaataagcgattgaattgggagggttctcatgagattaaatcgatagtaaattaatgattgtaaaccacatcactgatgtaatattttgcacttcagtcgtgaataaagttaatcatttctttcgacaagtaattataaagcacggcccttaaaaattacttgaggggcatatgtgtatgattaactaaaat

SEQ ID NO: 327539 - DNA, 916 bp, Cannabis indica
aaattttgagatattcaaaaaaatttaacacacgttaaaaataaagtttaaaaaatatatttcacatacgtataaaataaagagtttcgcgtataacagactgtttgaaccatgattttcgacttgttaaatttttttgaatctcttcaaattttatatgatattttaaataactgtaacataaacaagcatgaaaaaaaattcaattaaaatattttctcatgtactaaaacacatacaaaatatatcggtacgagtgcatattaattattatattatagaagcacctaatatttattaacccatcaacattattattttattggaatgtggctataaatgtacatcatgcatctgtatagggcctgctaagctgcgctcttctatttatatgcacacaaacacacacatatatatcatatgtaatatatataaataagattaattaattaggattattgaggtctcaattttgacatataataaatagtgtttctaaattttttaaattgttaaaaaaatttcttaaatcccaattttgacatataataaatagtgtttctaaattttttaaattgttaaaaaattttcttaaatcccaattttgacatataataaatagtgtttctaaattttttaaattgttaaaaagatttcttaaatcccaattttgacatataataaatagtgtttctaaattttttaaattgttaaaaaaatttcttaaatcattgagattgttagattaattcaagaatttttatccaattaattactaacgaatatttggctaggggatacaattttgtacgagtaaaaatttaaggggtacaatttgatacatatcaaaactttttagacacgatttgatatatgaatagacactatgataaaattaaacgaaattagataaaaa

SEQ ID NO: 327540 - DNA, 669 bp, Cannabis indica
tataaaattaaaaataattaatttaaatttttaaaagacattatttatattagtgggggctacaataactcaacggcgtccgtccctgcttgcttgctttgttcctgcttttcttcttttttcctacaatctttagtgctatgtccaataccagagcagttgtaacacaccagaggaatccattcatatttcacttccaattccacctcatgattaaactcatctatgaaatcaattttttcaggaaaatcctgagccaaactaacctgaattaatattcgaggatattgcatcctatctctgttcttggtaacattatccacctgaaatggctctcccaattaactcactattttgaacagagatgattccccccaatatttgatatctagtcctctcaattgaatccaagttggtacattcgacaccttctccttggtgaaatcatcgattggattccaaggtttcatcaccattggtttcctgtcaaagaatacgtatccctactgcagcaccttatctcgctgctccatgttctggaatcttatgataaaaattcctttagccagtaaaccaactttggccacttctgttgggttttatgccctaaataaaactcatttcaaaataatgagatttacttattaatatagatcagaaataatattt

SEQ ID NO: 327541 - DNA, 527 bp, Cannabis indica
tgattcttatgctggagagacatactatgatattatttgggaaaaaatataaggaaaactagataattgagatcaaagagatgaagagaaagatagagagtttgtattatttggggtgcctctatacccttcccaggggttgatatttatatatggacactgttggtacctttccacgccctaagtgcttggccacatcaatatgctaatattgtaatacaactaccattattagttatattatatccattttcatattcatgtgctcatatatatacataccgtttattattattcaaaaggattttaatataatatataccactactataatgttagttagatatatatacatattcactcacgtgctcatgattagtgataagtatataaatatataaagtgattttacaatgcacctcttaaaagagatgtactgatacacttttgatttgttttggtatctagaaaaaaaatttagtctattttttttttcatattcatgtacgttataactatttaagata

SEQ ID NO: 327542 - DNA, 1549 bp, Cannabis indica
agcctatttcaactcaggcccacccctatctgtgtgggtattttttgtccatatggttagttgatgaactggtttcaattatcttctttatttattattttatgttttgttatgatttttgttacgaggattcacatgtttgaaactggtttgttattgtacgtaattaagctttaagttttgttttttcttttgttattttgggaatctggtttcgttgtgtgaaatttttaactagatgataagtaaaattggcatctgataatttaattttctaaattatttgttaaaataaaaaataatgtgctatatatttttttaactaactcgtttttgtgtttcaattttttttattgtttagttgttttatgtttgttcaattttttatgtaattagcttttctctttaagattttaattggttttcgtgtttgttcgatgtaattggtttcttttcatatgatattcaattggttgtttaatgtaattaattcctctgtatcaaaaattttatttggttagttaatgcaacgatgtttacaaagtatttaagtttatttatatgttaagaattctcttatgatggtataatttttttaattaactaagttttttgtttcaattatatcattttattgttttaggtttcttattatttttattttaattaattgaatttagtaattggttttatatttaatttttgttttagttatttagctaattggtttatgtgagttaatttttaatttaattgtttaacgtttctctgtatcaaatttttgttaagttttttggtgtaacgagtttttgttatttagtttaaagtcattgttaaaaaatattttatggtatgtgttgtttttcttttttaagtaactgatttttgtaattgatatatcttttcaatactttaggggtcatatgtttgttcactgtttagttgattgtaaatgaaactggtttttgtattaaattattgtttttgttattatacgtatctggttctaagatttggttttaatttgattaacggtgtcatattttaaactagatattatgaatttctctttgtcaaattctaaggtccaactctggcgacaactccaacgtccaacatcggtgacaacttcaatgtctaattacattgactttttggtagcgataaattttccaacgatgatggcaattatgttgaatattctcattctattttctatttttattgaagctaatattttgttttagtggacagtgactgttttgtatagtgagttaataattgagtcttggagcttctcaaaaatttgtaactagctttaattttagtcttgtgttggttttaattttgatactaggttggaggtcaagtcttagagcttctaagaagcatgtaaaatttatatgagtttgggtatttgtaactaatttttttcgttaagaaaccagtttttgattatatagaataaattgatttattaatttatcgtcttaataaaattattttagtattccttcaatttttgtaaaaaaaaaaaacacttacgtca

SEQ ID NO: 327543 - DNA, 808 bp, Cannabis indica
attattaagttgtaactatagtaacagtttggatggtttctccatcatttcttcatgatgtattactcttttattatttttcaataaaatctgttgattattacaaaaataataataataataataataataataataataataataataataataataataataataataataataataataataacagttcttgacaaaccatattaactgctaaaaactattttaagtttatacttgttacaaacttaacttttgatacttatgttataaataactctaataatactactaataataataataatctaaaataaaatgggttttgattggtcaggaagaatatatcttagattctgtattttcttccctatctttaggtactaaggttaggggagatgtacatcggacttgatagagtgttggtggttataattccaaacaaaccctaacaatattattaattgttaaaataattttcgtcaactgcaattagtcaaaaatagacttcttcagtttcaattaccatgaaaattttggttgaaaaattaggttcaattgaagttttaccattttggttcatgcaaaatgttgtaccaccaaacacaagtgaagtttaagtccatcagttagatataaataaagaaatttacatggtatactaacttttgtatttttttacaaaaatactgccaggtggtatttttacttttttactgtattttttttataagttttatactgcagtatactgtgttaagttttcactggtgttctacgggtgttttactagtgttctactgttgtt

SEQ ID NO: 327544 - DNA, 1007 bp, Cannabis indica
aaaaaaaataaccctaaaatattttattttataattttgttttagttgtatttaatatttaaatacactaataatatatatttagtgtaatttatcaaaaataatatattatctatggtaataattcacaccttaaaatgtccttaacattttcctatgattatttgtagtggacaacttttttcaacctatttttaataaattagataatgttatcaaatttgttgaaaagcattgccaactcacaagtggtcatagatttttctattttctataaacatatatatattaagaccaatgctttagcacgattcatttaaccaaatattcataagtttctcagtgtatgtgcatgtcttattttctgaatttgttcttggtgaatatgccaaattaatataaaagatactagtcaacttattattatcaaatcataataataattattatttatttttctaaaactttgacatatacgtatttatgtgattttttatcaaaataaaacttaataataacatgatcaagagatgttatgacaaaactatttacattttctgtatctgttcgtgttaaaaattttcttaaagttagttatattaaaaaataaaattgttaaaaattgagctcggagttttatttttaccatttcgaaaaatatgatctattttttcatttaacaaaacaaagagttcaaaataatatttaccctactaataataataatagtttgagataaaaaaaaagaatatatgtattttaatgttaataaaccttattttgagtgtaatgtgagtgttatcatcaattcattgctatatatggacttttctttcccttgacagaaaatttgttcacttccttgtgtcgtatttaattatttggtttgttgatataaagttgtcttcataggcaacaaaaaaaaaaaaaatcgaaggggattgctaagtttttttttttttttgaagaaaagcgtaataatacattaaatgaaattagacctcatg

SEQ ID NO: 327545 - DNA, 842 bp, Cannabis indica
cataattcttataccctcccatcttaattaattaccgttttgtttgggtattatcaattaattagagcattgctattaggcacgcctagcaccttctgaacatgtcgcattgcgatttgctagctatactccataatatatattatattaaattatatgggacacaatactaagttgtactaatagtgatattgacacataggaaggtgctaggcaacactggtgctctttagcattgctcaattaattaatataagaatagggattattttataaatacttaaataattaaaaatgtacaattttatgaaattttaatttttttttatatttttacaatatttttcttacaaaccattatttacgtattgttctaaaaaaaaataattatttatacattttttcgttgcggaaatatatattttttttttaaaaaaataataatataaattttggaaatattttttttgaaaaaatgaaaaatttcataaataggtaaattagataaagttcaataaaagttatagatcataaagcaaaatcaataataattatcaaatcatttataacaaaaaaaaataataaaattctaaccacaaccacaaaaaagattcaataagcctctagtgttcaagtataaaaaatttgaagaaaattaggaggttgtttagcttcataacttaaaaactgttttcagttttaaaaaacagaaaatagattttaaaaattaaagagtcgcttggtaaaattttttaaaactagtttttttaaaaactgaattttaaaaactaaaaaacaaaaaacatcaaaatgttgattttaattttcaaaaatattttttt

SEQ ID NO: 327546 - DNA, 1063 bp, Cannabis indica
tctctccccaaaccaccattgatttcaacaaatttttcaaaaatctccaaaactcacttctatatctcttatatattggctatttattaatgtattatttgaagataggtttttaaagtttgcaattcaagtttagcattatttgatttttcggcatcaacattattcatcaatttgatttgagagtgctagctctcctcaaatttatggcacagttttttttggttcaataaaggtaatttttttatttatattttactgtattctttgatttttgttatcaaattttttcttttgcttttcatcttctctttatgattatttacttatatgagattttatattaattgtcatgttttctcattttgcacactaattatgcagtgaagtgaaccaaccctttgataataatatatatataccataataattgagtcctttgccaagttttgtttatgtataaattcacattattagtaatgtaaatttataatcatgtatttactgttgaattgtatagttcattgcaggttgaattgtttcttcaacaagacacaaaatggaatgaagacaattaatcaatctttggagcttcagaaaacttcgaaaatttataaaaattaaaattactagagaaataaatattacgtacattttgtacaccctcatttcttttggaaagtgatattacacttgttgtaaaattttcaactttattataaaaaatcttatcaaatattgtagtagacttacataatgtattttgattgtataataataaatttaaatatttaacttattcagattgtgttattattaatttgaattatataactttaacatttcttattatgataaaaaaaaataattgattgtaaaattcgatgttatacaattaaaatattatttattttaaaaaataatgatgatattatttaaataaatagatatatgacaacacttttataattagtgttgttatatgtctttattaagttacaacatatggtaacacttttataagtgttgccttatacctacatttttggcaacactctaggag

SEQ ID NO: 327547 - DNA, 959 bp, Cannabis indica
attataattgcaccttctgatcaggctaattaaattcaacaatggggaaattaaaaataccaaataaaatactattaacaaataacaatatatagaaaataaaattgaaggttaatttagacaatgtgagaatctattgattttaacacactaggattgcttgaggtttttgatcaagaataagaattaggatatatataacaatattggaaactcaacaattattaattgtacaagaatgttgatgaataagtttcaaattaatcataattaagttgtataagcaattaatggaatgagattttttattttattttatttatttatttattttgagaaaatagcattagaaaacaccacccaagagcaacgagctcatagggacggagagttaggaaaattcattaaaacatggcatcagccaaaataaggttttgaatacaagaaagataaccaggccaccagactgtgcttgcagtagttattaaaataaacttagctaaataatcaactactatattaacaattttaaaacaataattaaaactcacaacattgaaatgagaacataaaattctaatataatcaaaaattaaacccaatctgtttttccacttgaacaaagtatatatggctctaaatttaagtttttatatgacggtgtttattatagttgttggttattgtatgttaattttttttgataatttagtatatagaaaacaaaaattcataattttataataccttcaatcaactaaatacatgcgttgcggtgtcaccgaatgaatctaactacttaaaattagctcaagtgactataaatggtattgagagtgtgtgtcgaatctctactaaataactcaaaaaatgtaatattaaggcctttttaaagaaagaaaaaaagaataattagaataatttacggcataaatatttaagtttaactctcagttgta

SEQ ID NO: 327548 - DNA, 997 bp, Cannabis indica
tttagagagagaaagagatggagattgataaactatcgttctagttgtacacataaaataggattatcttaattattatgcataattcatgagtcttgcaattcaaaatgaataaaataagatttggtcgtaaatttaaatatacaaaaattatttttcatcacaataaaatttgtgatttaaaataaaaaaaaattataactaattataaattatcacttaataatgttataactaaaagatctgtaacaaaaagtattagtcacaaaaatataatttgttgtgactaaactaaattagtacataacttgtgactaaactaaactaaattctatattatagtcacaagtaattttttattgtaactaaaaatcacgtttagttacaaaatataaatgtttattgccaaataagactgagttggcccatatacacagcgacggagcacctaccacaaccccaaatgataccacactggtatcaaactagaacagaaaaatagagcatgctcagaaatttcagcttcttctccccatagtgaacattaaagtcgtacctaaacttttggagagataagttgtaacaagcatatctccttaaaacaagaatactaacatatctccttaaaaacatactgcaatctaattgtaacttcgaacgtgttgtgttggcttggtctatatttatttgtatttttttttttaaaaaaaaacaggtcttgtcgtgtcgtgctatagaaaattataggtcgtgttgtagtgttgtatcgtgctaatattgttaaggggtacgtacgtaggcccgacatcacctatagacccggtattttcgtgtcgtgcttgaattcgtaccgtgttttgctcatatttttcaaacaggtcagcctattttaatattcagatttgaattcgtgctttaattttttatatttttttacaaatactaaaagtatatgtatattttatagtcttaattagtttatatttatataactttt

SEQ ID NO: 327549 - DNA, 602 bp, Cannabis indica
ataacattatgcgcgattgacctcccttgcacaaaagcaccttggttctggttggcaatcagaggaaggacctgagaaagtctcacacaaatcagctttaaaacacatttataaacggtggtgcagcaagctataggcctgtaatccactgcctttgtaggattttcagtcttcgggattaaagtgagcattgtagcatgaaactcttgaggcatgaatcctgtagataagaagctctccaccgcatgagtgaagtcagcacccagctccggccacattttcttgaaaaaaccagctccataaccatctggccctggggatttaacatccgaaatactgaaaaaagcttttttgatttctttctttgtaaatggtctgatcaggttcagctgttactcaagatttaaacaactccccatctccatacaacctgttttgagtctagctgtagctctggattcggttcccatgtatcgctggaagtgacgaatatagtgattgaccacctcagagaaattgtctatgatcaccccttgttcattggtaaaggaagtaatgctattctccatcatcctttttttcaaactagcatgaaagtaagc

SEQ ID NO: 327550 - DNA, 875 bp, Cannabis indica
gaacataagaatcggggtaccagtggagaaaaaaccagtaggtcggcctaggaagagcaatgcaggtagaagaccgacgaagcgtcgaccgtctagtggtcaggtggtagtggaacctcgtcattgttcgctatgtcacggtgcagggcacaacagagctacatgcaaagctcgagtttgaattgtttctctattatttagatgcatatgtgttgtatgacaggttgttatttaacaggactatagcttgaatatttaacaatttgcatggatattttttaatgtgtctgcgactttgtgcgatattttgcgattcaagtgcgatttatgtcatatttcataactgactgtcctgtgcgattttatgcgacatgtatacgacttcgtgcgatgttgatgcagtaattttttatattttgctttgtgatttcatgcaatttctgtgcaatattttgcgattttattggcaacattttatgctgtctatgcaattttgatgtactaatcttttgcgatatatgtgcgacatttttagcgagtaaattgttgtttattgtaagttattataactgttatatgatttgcgatggctatgcgatataggttcgacatttgagcgatttaacaattcactgtataatatataattgcaaaagattatgtgtacagatgaaaaacaatttacaaaaaactaccatgtcaagtcttgttaaaataagtccacacaccacctatatctaaaggtgagcatgttatcatcattaacatactcaaacgatcggtccaacatactgtgttcaatgtactccatggaaaacattccacaatcaccactacaaattaaaaaattaataaatattagcaacaattaagtt

SEQ ID NO: 327551 - DNA, 587 bp, Cannabis indica
tctctaagattgtaggggtcattaccaatccaaattgctacttcatctaactctgaagcccaatatgccagcttatttgcaaatgtattggtagatcgattaacgtgagagatacgggctacgggctacaggaaggtgagacaaagcttccttgatttgacttataaggtcaccaaaatacgagatatcctctttaagatgatccaacgcatcagtaatagctttgcaatctgtttctaccgcatggactgggaaatgctcttctatacaccaacgcagcgcgagaaggagggtctttgcttcaagagtggcaacattcccgcctcttgtgtaagggaaagccactgccgcaactacgaggccttcactgtttctaatgacacttccaaaaccaactttcgctctccccttgggaattgcagcgtcacaatttagcttgaggcgaccaggttcaggaggagaccaggttgtgattgctgaggactggttagagcgggtatgcggtgatgaagcccacgttgataatttgaaatcatccagaaaacttttcgctaatttcgttatggcatgggtctgatcatgtgcct

SEQ ID NO: 327552 - DNA, 853 bp, Cannabis indica
ttacttcacaataggatatttaaggtttttttttttctacaagggccacaccaataaatatcatttttaggtacaacttttaaaattataggtattaaaacttttaaataatattaataataataccaaaaaaaaaaaacaattcacttgaatatcactctaattaacctctaataatttttgaatacatatcctgttgagaaacatatcttcttcaagagttgtcttctaaatattataactcttaataaccttcacactcttggagttggtggaattttttcggataaaggtgctacatgatctatttgaagattaatgtagaatttagttacacttgtagaagagaagttaattttatctattgaaagaaaatataaatcagtatacatatatattattgaaaattaaaatattgaatggtagaatctaaataaataattacctcaaaatttcttaacgatagtagaaattactcccacaataaatggactaccctttttcttatataaatttggatcgaatattcaaaatttttgaattttgcaaactgtacaaagaatcttcactcaatagctttttaaatttagaaattaaattttttcttattgttccatgcattagattttcttgaaggataaatagtacatattctcatcaataaaaatcatatcaagacttatcggttttccattaattcattttagtagtaagagactcctacattctacaaactctaatatgttaagtaattgtgatgatatctttttttgaatttattatatataaattttagagtttaagtggtgataacttaatttaaagaaataatatatatatatatagaacattt

SEQ ID NO: 327553 - DNA, 571 bp, Cannabis indica
aacctttactcatttcaacaataaaaaggcatcagacctagcataaaagccatttttccgcccaaaacatagatctgacaaaatccaactctaaatctaacataaactcacagattatagagattcatcatacattttaatcataaatcaataaacgcatacattttaatccaaaaatacaatgaaaaagagaggatccgaaatcttactttcgactttgcgatggtctggccgtggtggtcgtgggttagagagagagttcgagatgctgtaatcaggggcggaggcactttaaagggtgggatggccctggcccccccttaaattttgaaataatgaatttatagttattttttaattaactattataaacatatatataaagatatttggatatataataaaataagattatatatacatacgtatatttagcaacttaattactactttcgaatgtgatgaaagtatatttatggaaatatagctaagataaatactagtgtttctttatttaaatataattacaaaataagttttttcattttttttataattatggacattgtac

SEQ ID NO: 327554 - DNA, 1436 bp, Cannabis indica
actgcattatagccatcagggtcaacattgatgtttggaatttctgcacttattattttatcaatatgtgttgctgaaggatttttcattgttgggtgcaagaaaaatagtatgtgcgcatgaggcaaaccttttttctgaaactcaattgtgtagacacctgtgacaacatgtaacaaaattggttgtttattgattttgttaaaagtttttagataagtgttgtcatatacatattttatcacaatagtggatatgataacaaagagaacttacatgtaattatttttccaaatggttgttctcatttgaggtcttgcattagctggtataactttatatgaaagactctgcatatgatatcaacccgatctcatcatctttttgtccaattaaattgagaatatcctttatttcttgtcattttggattgcaagtgaaagtcaagaacaaatcgggatatcctgcctatttacaaatggccatggcatcttgataattttatgctctataccgtggtccccctgtatgtgatgaaggcaatataattgatttcccaacttttttacaatctgaatcacctcgatgaattgcgtccattatactagagtaaatgtgagttcttagtttattttggtactttcgtacaaagcgaaatctttcttctttaattcccatgtaagaatcaactatatattgtttcaatagtctccctgctcgaagaagagtgtgtccctcgtttaatctttgttgaaacctaaacgaataatattgtaacattgtcaactgttttgttttggaattatttttgttacacctctgaaaggtattcaaagtctatagccatcttcaccataagggtgtgtcaatgggtatgtcattgacatgaagcttgaatgtaaatcttttattatttgaagtccattagttcggtgctctacaatgacatcacgttcgtagtttgcttcactaaaatcacccactattaaccctactacttcagaaactgttggcatattgtattgacgaccatcgctagctctattttgtagaagtcgtaagcgtaatgtagcttctggttgttctttgtatttatccctcaccattctaaaatatttgaccaaattattgtgttggtctaacattttagatagcttgataactaatttgttgtcaaattctgtcttttttttttttttgggtttaacaacgtgttcattctgttctcaatctcattgtccgtgtcatatatatataactgagcaaatcgtggacgtttcccatcttctggcaataacgaaccaatatggtgataattttgacagctcatccgaaaaacataaggaccttttgattgattaattgatcaaccaagtgtaacgtccctgcttcaagcctccatggggcccttacacccacggaatgaatggctctta

SEQ ID NO: 327555 - DNA, 882 bp, Cannabis indica
actgtcagcaatctggtcatgtgatggcacgtatctgatctcaagttgcttatcgagaaccttgtttcttacaaaatgcacatcaagttcgatgtgttttgttcgtgcatgatacatgggattggcaaccagtgcactggcactcaaattatcgcaccaaattactggtgtggaggcacatttgaactattcgcctaacagttcttgcagccatgagatctcagcagcgagttgagcaagtgctctgtattcagactctgtgctgcttttagcaacaacagtttgcttctttgatgaccatgaaatcaatgtgtctcctagaaacacacaataatcagcaacagacttcctatcatcagggcaacaagcccagtcagcattcgagaagccaaataagtttagattggtgcttggaggtatatgtaggccgtggtgcatagtccctttaagatacctgagtattctctttgctgctccccagtgcacatcagtgggctgtttaagaaactggctaagtttatttacagcaaaagatatgcctggtctggtgtgactgaggtattgtaatgcccctatcacactgcgatagacttttggttcactcatgggtgtgccatctgttatagacagaggctttcctgcagtaattggagtgacactaggcttggtattctccatattaactcgttgaaggagttctgatatatacttgctttgagtcaagtagatgcccgtattgtctctatatacctctattcccaggaaatactgcagaggacctaaatcctttagtgagaaagattggttgagtcgtgaaatgaaattgttgacctgactcaagttgtttcctgtaacaactatatcatcaacatacaccaaggc

SEQ ID NO: 327556 - DNA, 531 bp, Cannabis indica
ttaatatacgtgcctcgcattaaatttttactagtatatataaatatatatataaacacatgaggcggtgaggtcatggactaaaattatataaaattccatattgagctttggtctcggttcaaaatccacactaaagaacatttatgtgttggttataaaatgacaccaaaatttaatggtgtcggttttaaaccgacaataaaagaaaatatatgtatactttaagtgtcggttgtaaaacaacactaaaaataaatagtgtcgattttaaattagactttttgtcattatggaataggtgtcggttcagtaaaaatatcagtcagtttaaaatcaacatcaaaagtacagtttgtagtagtgtacgtctagtacgagtagtagagacattaaattttggggctctcaaaaatatagaagaagagtgttataggatttgaatccatgaccttagacattattccatccacctcaaccaactgagctataagtatttgttgcttataatacacttaaattttacttaaa

SEQ ID NO: 327557 - DNA, 736 bp, Cannabis indica
accatcttctgcacagcttcaatactaaatataatagcggctacatttgcaagcccattcctagaaaatcaaaataaaataactactaaaacaacacaaaaataaatataaaacaataaaggagatataaccacttaaaaatatatataaaaaaaccacactcctcaaaaaaaatttgccaataagcttgtcaaatgtatttataggagaatatataagaataaaaaacacagaaacagtcatagagaaggaagaaataaattatatttatagcctccatctaccacaaacacgtataaaaccatcacatcaacatgagaacacttgaaaaacaaccattaattctgacgagatggagcaagagcaatgaaattgacgtcaaataaataaattatagcaaaacaaccgtaaaacagcactaaaataaataaaaaaaacaaaagaatagaaaaaatgactaaaaaaactaaccatcttctgcacagcttcaacaccaaatgcaacattagctatatttgcaagaacagatctagaaaatcaaaattaaaaaaaaaaaaaaaaaaaaaccactcttatttccccctaaaagtgtgacttaaaattagaaaaactgaaaaaatgagaagaagataaagaagaataactgaacaagaaataaaataaaaaatttatatgttaatggagagagtaagagaacttaaggaagaagatactgagaaaaaatatgataagtgta

SEQ ID NO: 327558 - DNA, 2110 bp, Cannabis indica
tgctcatccattgctccgcctttagtggatcaacaccaccttcgaacactatcagattctgtttcctaaactgctcgtacaatggctccaaataatttcccacatctagtggcactactaaaggtatcgaagggttaggattatgatttggagcaggctgagattgctgctctctcaattccctaatttgttcaccttgctgctagatggtctcttgcattgcgcatacatttgttcctagttttgtggtagtggagggttcgcaccctcaccgctagccttgaggccagaaagctcacaattaaccctattagatcacctcgggtgcatatctaatacacctgctatcacaacttttcaacttttagaatcttccaaactagaaatcaatgctaataagcaattctatacgtacacatacataacatccatgatctaaaacttatcatgcttttctaatagcttgcacatttcaaataagcatgtaattcaagcaattaacaaataatataataatcaactaacaattaacacttactataccatgagtcaaataaatcttcacaaccaatgtacatatcaaaccaatctctatgatttttaaaccttgatcgctctgataccatgttgtaaagccctgtcccacagggcgccatatttgtgtttttctaaattaatttgtaattataaattaataattttaaaaaaaaaagtgcggtttcactaaaacttttgatcaaattaaaacttagcttttcattcaatacagctagatttagggatcacttatttataaacttttataacatgtctcaaaaccagtattacatcgccgagaaacctctgaatcatggttggtccactttccccttccctttacctgcaccacaaagtactcgtgagtcacagagactcagcaagaaaagcaagtaaaatacaaacattgcataacacgagaaatcctaacaacgcacaaccaacaattctatcattcaatataaacatttatacaatacataatgaaatattacaaaaacatttatttgtctcataagacaaattgactttgatgcttcataaagcattcttaccgctcgttaccaacgagctccatatgtcactattattgcccaatgaagcaatcgataagtaagaaacctatctatggtttcaaagtgagtaattactcatttctaacaacagtgtttaccgtatcattatctcgattataatcaagtcacaaacgataataatcgtatcacatttgacatgctaagcagtgcaattggcttattcctacctcaatccaataatcaggtatgcagctgacctgagtggaacgctgctcgatgatcccaggtcctatgtcacgacaataaaactcggtgaacaacttaactgaattccaaaataaaccctaattccacaaccggacaaaccctaaacccttttggcttagaaatagcttaaacattaataaaataccccaaactaagtcctggaaaaacacctcgagcaaaaactagcttcgaaaaaaccaagattttcccctgctggccaatcgattgaccggttcaccagtaacctgtaaaaccgatcaaccagtttctgcgaaaatgggaaaactctggttttacacatcaaaaccaaaccaaaacctcttctaatatgttcaaaccttccagaccaattctatagcataaaaacaacatacttaaacattcaaaactcagtaacatctcaaaattacaaaatcaccataattgagtgaactttgagttcttaaactcaatttacccaattcaaacctaaaaaccctaaaattaattcaatttaaacctattaacaagctctggacttaaataacttcttagaccctgaactcaaacaaaaatcccaacaaaacctaacttaaaacctcaaaaattaaaaataaagattgaagaacttacctccaagttacttagctcatactattagctaaatttgctggaaaaagttgatttgagcaggaaaaattgccttgggttcttgttggtcttagggtcgtaaaaatggaagaagaaggagagagagttatccaattagtttttttttttttctattaatc

SEQ ID NO: 327559 - DNA, 896 bp, Cannabis indica
ggtccaagccccaagtccagatccagatctcaatgtcaggtcctgttttggctccatttcagatgtcgggtcacgagctcggtcttaggttcatgtccgggtctgggtcgggtcttgggtctcagtctttgctctattgcccaggtccctatctcgattctaggtccaggtcacggttttggtttgggtttgggtcccagtctaggttcgggtttgggtcctagtcccattttgggtttgtgtctcgatttgggtttttatttgggtttgggttcgggtgtgggtccttgtcctggtcctagtcctagtccagttccagttctaattgcgattccgagttcgagtttgtgtttgagttcgggtcggggttcgagtcctaatatgagttcttgttttggtctggatctcggtctaggttcggatcgggctctgagtgtgggttagggtcctggatctgggttcaggttcaggtctgagtcccaagttttgatctcaatctgagtcctggtttagtttcgagtctaagtcctaggttacgatctcagtcttggtttgagttcgggtccgggtgctggcctaggttcgggtctgattctgggtatgggtttgagttcgggtatcggttttgggtttaatttttggttcgagtgtgggttcgggttttttcctagtatggcttcgtgtctaggttcctgtcctcgtttgggtctggtgtaggcttcaggtccgggtctgcgtctgacttcagattcccgggtccaggacaggtcttgattctagttcgagtcccgaatttagatctagatctgtgttccagagcttaggtcccttgtctaggtcccccatccaagtccgattcctaggtcctggtctgggtcgaggttcgagttcgggtc

SEQ ID NO: 327560 - DNA, 713 bp, Cannabis indica
attttattttaaaacttaatactgcggactattaagggtggggtccgctgatattaatggatccgccggtattaatgctttagtttcataattgacgaaatctaatattggcagggtccgtccttaataatccgccaataataagttaatagcggcgaactttatttttagttgttatttctatgaattagcgatcgtttattaatagtgggccttaactgtctggacccgtcgataataatcaataccgccagtttcactctttaatattggcaggtgttctcgcccctagtaccatcatttgttgtagtataatagtttttttttaaaaaaaaatacctagtattagtggcgggatccgaatttcgccactaatactacccatattagcagtagattttgcccaccgctattgatgaatgttattgtagtgatatgtggcactgaggtgacaattagttaaacagtcccgtcatctatttatttaccctctacttgtttcagcatccagaaaaataatttagtcttattttttttttatattcatatacgttataactatttaagatatcctacaaaattttgagaaattcggaataatttacgatatagaaaacaatgttcaaacagtttattttacacgggtataaaataaaatagtcacgcgtgcaatgcactgcttgaaagcaatttttggcgtgttaaaatttttt

SEQ ID NO: 327561 - DNA, 619 bp, Cannabis indica
cagggcctgggtctgaaatgtacttacttaccacactcattgcatgagctaagtcaggtcttgaacacaccatggagtacatgagactcccaacacaacttgcataggaaacattgctcatcttggctctttctgcatctggttttggtgactgagacgcagacaacttgaagtgtattttttattatggtaatcagttaaaataatctaatcgggatatctctcccattgaaaatactagcaaaattatacttggattttaacaagtttttttttttcaaatatattcataattaattaattgctaattaaattaaataattaataaggttaattgttaaaacgtacaacttatggttatcatattaatttgatactttgatggtacttttatggtgcacagaaaatgggaaattatttttgtcattgtttgtgccacctttatatattgtacaatatcacgtaatttgatttaaaaaaaaaaaataatcatgttattttatttttatttgtttattttgtctttctatgctcataattactgttccaagttattttaaggctaattagtaatttttctccctgaacttttttgaccgttaaaaattctcctcgaact

SEQ ID NO: 327562 - DNA, 773 bp, Cannabis indica
aaagtattcttggcgctatctcacattgcaccagctccaactctatttgaacaactcttctgcaaaaattttgtagtcaatctaaagtccaatggctccaactcaaaagtcaattgtcgacaatttaaaaaggtacaaatatttgactatattgacaaaatcaagactctatgtgattctttagctgtagtcaatcaccctattagtaattttgattttatcttgcatttattcaatagtcttggtcctaagtttgatgatgtggtctcgagtattacaacttaaagtgacaacttatcttttaaagaagttcacgctcttctcatgtcacatgagacttgtctagaacatcacaactccatgataaatctttctactaagatgtatgctaatttgacttttggttcaagaaatggtccatatcattcttataacaactctgacaggttccggttcgtggatattccaaacctcctaatcctaatctcagtcgctcattatgtcaagtttgtatgaaatatgaccatacaacagtgatttgtcattacaggtttgacaagaattgggttactccaaaggctaccccctcttagcctcaagctcatctcccttgtaggaatttggcttggtgaaattccaagtttaacctacaccaactcaattttacagttagaaacgacagggacaaaattgtcccagaaaaatacaatttagaaacccaatcaacgacaaagaaaccttggccgtttctttcctgcacgacaacgaagctt

SEQ ID NO: 327563 - DNA, 1053 bp, Cannabis indica
taatactatacaatactatataatacaagagaaacatgagatggtgtgcagccaaagttgcaaaggttaaaccattagcataagcaaagaggatgctgaaattaattttgctatattgatcatatcattgctgataaaattggaaggtagcctcattcaacactagtgaaacattgtaatcttggccattggcatcgaacacgtgatgagaaaatgggaaaactcttagcctggtaagatttagtctagtatgcaataaggattaatatgtagataattgtacagaaatcagccaagtatttcaaacggtggtacccaaaaaaaagtgtcgaagtggttctactatcaattacaatcaatcaaaaatatttgtttcaaaaaaaatatgtcggtgtcaagttttgacatcaattcaagtatagggatacataaaagaaaaatattaaaagcactagtagtacttagcacatttaagatgtcatctcactattattgtaattatgtattaatttcctcacaatttagtttaataattattataaaatatggttaattatttgtaagcatcacttcaagatagtgctaacattacttgtgcctaataataatattgtagatttaagattactttttttctcattcctatcttatctccttggacccattcatgacaaccatctcatgtagcatttggtgatgttttagtaaatattactgatgacaaaatccaggagctgcgaaggaagatcctaggaagccagccactcttgagcaatattactgtgcacgaaggccaaaaccaatctctgttgggctgtgactaatgcatgtcggccagaggttggggcagtcgtgatttaggctttaggctccacaattttaaaggcccttaaaaattaaaatttatatatattactaggtgaatgtacgtgccgagccacgtagtgctagttttatttaagattttggtatttttaagattttgaatgtattttatttttaaagattacaaattttttgtttgaaaaaattaaatatttatatttgaaatat

SEQ ID NO: 327564 - DNA, 1063 bp, Cannabis indica
atcattgggggtgtctcggtggcaatcagaacacgccacatcatttaatgaaagtgtatttgggagcagcaagatacaccagattatttttacatctttttttatcattatttctaaatttctttttaataactacgtttattagtaacctttgattttcgagctacttcgctctaagtttttcgtcaaagattttcatctaacgttttgctaacttttttcgtctaagatttgatacaaaaggtgaattttgggttgttcatttgggttgcgaggttgctattgagaaggtgattttacccggttagctttgtgtttatcatgcagattttgaatagattaaggtaaaaatgtaattttttatttgatttttatttttgtttattgtctgagattttgatttgtatttttttttacttttattcaataattaggtataggttggtcaaataattagattggattatgttggatttgataaaaatgaattatgggtaagtgaataagtgggttagtttatgctagggatttggtgatttagaataggcaagtgaagagtttgcggtggtcgatatcattattgatggaggtttgttgttaaagtaattaaaattgtcatatgtttagtatgaatattaacccattaaattccattttcaatttgaactttaattttttgtgaacataataaggggtatgttggatagtaaatatttatgcaattatacttggttattgctaaatatattgtgatttattcggtgttggtgaagtatttatttaagtagaaattatttgactgtgtatttttgattgttatgcaaacttgttaaatattcttgcggttattattttgttaatatgattgtataggttgtcatggataagaaagttgtggtggagattattatgtcattgagaatccatttagtcaaacctggtgagctgaagtcaaggattggcatgcttaaccatagattagagaagttcatgagttcgagttaagggtggttgttgaggaagaaaagtttgaactatttatcgaggaatgttgtcagaggaa

SEQ ID NO: 327565 - DNA, 667 bp, Cannabis indica
gagagagagagatgtatgagttctgtgaaatggttaggcacttgattagatgtgcctgctgtggtttttattggtgtactttgactcattaaaaagataaaagtatatatatataatatattatacatacatataaaatgtatttattacacatattggtcaaaaactatatttattgcttggttttgtcatatgcagtttttctttatcttttggtatgataataataagggaaatttgtggtcaaacccttttatgatttaatttgtatacatataattctcttattttttttagtaaaatggtctttagtttagttctgtttgcaaatctcatgtaacagttagtttttttttagttaagtgccaactaagaagccaattaagactaccattgtgtacatctatgtacacatgatatactcttattggtaccaaattttttaattatttcaataacttttaaattttctccatcatcaccaaatcatcaccaccaccattgttattgtcgtgacccctatctccagtacaaccgcagcagttgcatccacattttatttccaaaaatctctcagattcaaatacatgaaaactaaaatctgatcaaatcttatatccaaagacaatctcaaatttaaaaaacaagacaaaaaaaaaaaaaaata

SEQ ID NO: 327566 - DNA, 936 bp, Cannabis indica
aactcattttttacattcagaaagtaaccataaggtcaaagcatctctctctagtttatccctctagaaattagagcattcatacttagccaattttcttgtatttctcgtgagaaataaaaactcaaagtagacgtatctccattaccatcgcgacatggggagtgcaatactataaattttttgtgtctctctaaattatttgcttaaacttattattcatcttgccaatctagcgagctggtgatggccacttttctgcatcagtattttttgcttttactgagagccacaactcaagttttgcaactacatctcagtttctttgctcagagcattatttcgaaagaaattcataagtacaagcaataaatcatccgtgaacacacaaagcaacattaccactcctcctagccaggctactactcagcaaccagcaggcaatgagattccccataaggaagcaaactatgagcgagcatccgaaaagactcattctcaagaatgtggatctatggtatctccacctaatatggagtggtcgcttgttagggaaacgagatacgagtgagggtctgaaaggactcagactcgagatcgcagacctataggtccacaacacgcagctgataggattaaccgcaattctacttgaagcaattagactaatgtgggaaacaaatctcctccatgggattctcttcacaagtctaatgactgtagactaccccatgaccctacaaaggaaaagggacctgcagttagaaatatggtttgaactcagaagccctaccatgaaagtggagagtatgagattcaaagggtgaagatcaatgaactactcgacactcaaaaatacttccgtgatgaatgatgtgcttggtgtaggtacttcgcccgaggtcttgatgactacaatcgaatgcttcccatggg

SEQ ID NO: 327567 - DNA, 1213 bp, Cannabis indica
taaaaattattaatctttgcttcactgatgatttaatggtgtttaacaaagggtcaagacaatcgatattggtgcaaaaaggatcttgatgctttcagttcttcatcaggattgcacatcaacatgtagaaatctcagatttactttggtggtgtggaaactaatgagaagctcaacatcctccaggttcttaagctgtctgaagggaccttccctctcaagtatttgggagttcctttaagactaaccaaatggaaggttgaagactgtgaagttatcattaaaaagataatatatagactgttttcttggtctactagacacctctcttttgtaggaggagtccagctgatccattctattcttcttggtcttcacaactattggatgagcatttttgttcttcgacaaagcatcctcaaagaggtagagaaattatgtagagggttcctttgggatctttttggtaacaggagcgaaattcatgtagcaccttgggagaaaatttgtcttttgaaggcttatggaggtcttgggtttaaagatggtgctaaatgaaatcaagccaactttgcaaagtatgtttgggccatttcagcaaagagatattctttggattaaatggattaacaacatttatttgagaacatctccttttggtcctatgaattgaaacaagacacgagctggcattggcgcaagctctgccacattagacttaaatttttgaggctgatattaattcaaaaatctttgcaagtaaactcaaaacaagaagactttataacagctctcttcaacaacaagtgtactaccatagagctgtttggaactcatagacgttgcccaagcattcgatttgttgtatggcaaggtgtgaatcatcaactttaattagagttaagttgtgaaaatttcaagttgcaatggaaaatgtagattgttcggtgtgtgctgctggaatagaaactcatgaacacttattttttgagtattctctgtctcggcaggtggtcaggcttatttttgattgactgggcaaaaatgcttggtcattggattacttgggatggtttaattggttgtctttgtcttctttgagtttgttgcaggctatagatatctctatatttgcagccacttgttatagcatttgggtcaacagaaataattgtatatttgagggcttttctaatatagtgtctcatatagt

SEQ ID NO: 327568 - DNA, 1455 bp, Cannabis indica
tttttttaagagcattgctattaggcaccagtgatgcctagcaccttctcgacatgtcacgttgcgattgactagcgatactccctaaaagctattatattatattaaactatgtgaacccgatacttagttggacctagcaccactagtgctctttagcatttctcataataatgaagtgtaagtgcaaataaagcccccttataaaatttaaaattaccattataccctcacattttataaaaaagcattttagaaagttaggtacaaaaatgaaaatttactcacacgtgttattgaatttgtagtgtaacgtaacggccaatagggtaagattttgacctaataaaatcaacaaccaatcggtgtcgttttgacatttagagataactaaacgcagcaccatattcttcactccttcacactctcccaaaactcatatctccttcttcatccaagatgaattctcagatttccagatctgctgctagagcctttaggtccttcctcgcttcttctaagaacgctcgttttcactctggtttgtatactttttctctatttcatttggtttttttggttatgttgattgattttactttttttttagtgttatgtattgggtttttgttgtgattttgaaggtttatgatgatttttgaattgggtttatgtttgttttggtggaaaatgttttcattcttaaaaagttttaatcttgaattaagagttggtaagagctttagagagaaatgattggtagaaaggactttttcgtgctgtgattataattattattatcattagtttttagaattactgttcaatattttggtttgatgtaatattagatctgaaatgattgcattgttttcacgtgtaaaaaatcatgttttgactgttattactgttactgtaatcatacaattgattgtgtgattgtgttttcatgtacatgtatgtagttatgtagataatataatgatctttatgtttattttgtatgttttaagcttgatttaaatcctccctaaataacatcattataatcagaagtcaaactaagtacaataacataagccttgttatttgtgtaaatattggactctcaaagttgttatgtgattgtgcattgctataagtcacattactacaaggtgggtgatttagtggttagtgatattctataaaattttattatattaaattatgttagactagaggtaggattaatataatgttgtgactggaatatttccactgtcctctctcttcttcttactcttacctctcacaacacttcaacctttctatttcttcatcgttgtttgtgattgcatccctagtacttgcttctccatcgttctgatcctccaacaaactatcacggtaaatatctctctctctctctctctgatttttttttttttcgttttcgtagactgaattcattcc

SEQ ID NO: 327569 - DNA, 2163 bp, Cannabis indica
aggtgagcccgtgacacttagcagtaagttaactaataaaaaattagttttgcttactgtcataaaacaaggtcctataatcacaagtatgcaagctgaatcattactttctacattttccttggatgaagtagaagcaactatattctcaattcctaggaataaatccacggggtcagatagtttcagtagcttcttttttcaggacaattggatcttattggggctaacatatatgatgctattagttctttccttcaaacaggccagcttttgaaggaaatcaacaccacagtcttgacacatatcccaaaaattaagtgtcctaacctggtgagtgattaccgacctattgcatgttgtaatgtactttacaaggcgactaccaagctgatatgtgcaaggatcaaatcagtacttttggatttaattgtccaaaaccaaggaggatttgttcatggaaaattcattggtcataacattatgatctgtcaagacctcatccgacactatggaaggaaaactaaaaataaaattgtatgtttaagctggatctccaaaaagcatatgataccattgaatgggattttattgaagagatactttatgcttttcagttccctcaaaagttcattgatctaatcatgatttgtgttcaaactcaaagttctcattgacgtttaatggctctttacatgggttttttgaagctaagagtgggttgaggcaaggggatcctatttctccgcttctctttgtcctatgcatggaatatttctctcgtattatgcagaaaattggaaagaggcaaggctttattttccatgagaggtgtggggacttgaagttaaaccatttgagttttgcggatgatgttctactcttttgcaatggagacttcaaaagcatctatcttatgctccaatgaatcagattattctctcaaactttaggtttatttcctaatccctctaaaattgccttctattgcaatgacatgagtgataatgatattcaaagagtacttgatgctttgggcttccaaaaacatggtcttcctttcaagtacttaggaataccaattagtccaaagagaattttagtagctaattgtagtatcttaattgagaaaatggtggctaggataagaacttggagtacccaaaatttatcctttgttgggagagtacttctcatcaactcagtgttgatggccattcattcatattggtgtcaagtcattatattgccaaaaaaaaaattgtgtatgaaattgaatccatctgtcgtagttttttgtggaatggaagtcatactcttacaggttcagtagtcgtggcctggagttctgtatgtctttccaaatcggcaggaggattggaatttaagagcatctcagattggattctagtggctatgtttaagtatgtttggaccattacaaaaaaagaagacaatttgtggatgaagtgggtgcataatgtgtacagcaagaaggaaaattggtggtcctataagaccactccaacagccaactggtattggcgtaagatggtcgccattaaagacaaagaaataggaatttttttgtatctcatgtgctgaatgacaggtacaaagtggcagatggttttcaagctattcggcctatcttttataaagttgaatggaatttaattatttggagctgattaaacatacccaagcatagtttcattttttttggctctttatgctcaatagaatcaaggcaaacgacaagttgcattatagagaagttgagaattctaaattttttctctgcaatattgaggatgaagccataccacatctcttctttgattgtcctttctccttggactgtttgaagaagatcaaatcatggtttaattggagaatggctgccacttccctcaatagaattgtaaggtggataagaaaggaaaaaataagcaaggttaagaagtcgatttttgctattgtcatagcagctcttgtatatgaaatatggcgtacaagaaatgcaattttgtggtagaattcctatacaaatgtagagaatgcaatttttgcttgataccttgtaaagttttatagatatttagattctcctcattcggagaatgctattagtttgtacaaaaagtttttgagtaatgaaac

SEQ ID NO: 327570 - DNA, 726 bp, Cannabis indica
aacaataacatacttattagtaaatctagatcctggtaaaataattccaacacgttatcacctcaacgctgttttcagggcacggtctcaaatgccctaaaaccgcgaagaccccatgatccctaattgggtgattaaggcacaaacaacggtaataacccagcgaatgttgtcaacccatctaacgcaccagctgcgactaccgaagtagtaatcccagcgaacatagctacaatcgccactgcacctgtgacaatgtagaacaacaccgtcgtgccttggggtgttgattagagcatcttgctacaagcattaaaataatcaagcagcaaagaaatcccatttacaagctccatgggacttctcccttcactgtagaagtgcgacaagctcgactacccaaggaatttagattatctgaatctctaaaatataaaggtacgactaatcctatagattacttagaaaagtttaatataattgtggaagtagaccaggtacctcaattagtgaaatttcacatacttgccgcaaccttggaggataattctcactatggctcagccagttgcctgaggcatccatatcgacttgggaaacctttgtgtatttattcttgacacacttccaagccacaatgacgtataaattgtcttatgtaacgtgcgtgccaagatggcacgttacaagctaggtgatgcccacaagttggtcaagtggtggtca

SEQ ID NO: 327571 - DNA, 707 bp, Cannabis indica
ataggttaccattcttcatttcttcgtgtcaactctcaagtccaaaactcccattaaaaaaaaactctaaagtccaaaaccacttaactaatataattgctactacttaaaaccttcacccaatcgcccccacacgccacacccgattttattaagataattaaaagttttaaaagattttaattaatttaattatttttgtggcaatttgatatgtaatttcaatcacacacacaaaaaaaaaataaaaataaaaaacaaaaataaaacgaaaacgaaaacgaaaactatcccaccgaacaagatactggtatataatatagttttctttacccaagttatattttcttttttgaataaccagatcagaataagaataaatttgtgtgaaagattataccaactttatcaaaaactattatataaataccgcataaagtaaaagccatgtaaaattcgactgaccagtttgcttccaatggaaacaaagagaattatattgaatttgataccaatttgaaactatttttcatgcgcacttgctgttttttaattttatgctttttaatcaatttttataaggtaattctattatacattatcagtgttttggttaatctcttatctattttgaaagctttttagtccatttgttttttggaattattacataaaaaatataaattgatattttatttataaaaata

SEQ ID NO: 327572 - DNA, 1002 bp, Cannabis indica
attttttaccgtgcaaaaatgactcaaagatgatgaggctctgaagagagagtacggggggagctcgagcttgtctcctccgaccagaagtctaagggtggtgagactccgtccaaggagaagattccagttgaagaggtcattgatctctctgaggagaaacctgctgtggacccttctaccttaaaggtcgctaagtcaaaaagttcccgggggagttcatacggacctgagtaagctaagattggaactgagcaagttaagggcggatcttaagaagttagggcccctgccctaactctggtgttgtgcacagagactaggagaggcaaagacatgcttaaccactacgtgactcggtcgctcccgaaagtgaatgagcaactgaccggggcagatagtgagttatccttggagctggtcttgggaggagttttgaaggaaatttctcgagtaagttccctctatcactcttatttcattcttctttggatagttcagattttaatgcattctccgtacaaactagtgtgaagatggcttacgcatactctcgcgccaagtcggtcgctgtcaagaaccttgccacttctaacacaatgcgaagggaatcggacttggccaagaaggacgctaaagatgcacggacccagctcgaggttgtgaggacggaacttggagaggcgaataagaaactccttgctattgagaccagggttgccgaactgaccaaggagctgcaggtaatgccatcgaccgtgtagcttgaagtagataatgcttctttgtctcaggaaattaccagtctccaagacgagagagagtctccggactcttcttcacaggttggaggatgaggttaaggacaagaagactagggaggaagaacttgaggtagaggttaagtgtaacaccctaactagcataggcgtattacatgatttttaaatgtactgtacagctcgttgctaatcaacgaggtttatggaaatcgtgattaat

SEQ ID NO: 327573 - DNA, 628 bp, Cannabis indica
attatatataaagtattatcatattttattgattaaaaaaaattatgaataatgaaataaatttctgtgatcaaaatatagagtctgtcctgtataatttgatatacatcaactataaaattagttataatgtatacatgaatatgaattatatatttcatgctaacttagagaaaaaagttatgatatattgattgtttgtaccaagataaaaaaaaaaattgatggaatattaattttcagtttgtgtcttgtgatatatatatattttacattatgctatatacattttatgtactactgtttaacatttaaaaaataaaataatagaatttggattgtataaaaatatgcccaatcttaacctaaaataccattctaaaaaaattaatatactagcataatgaaaaaaattatgtatataaatatacaatcttaaatatggaaataatataccctaattaaaagtatatatacctcaaacttaaattattattctacctttttttattacactcaatatatactatatcacataaaagtaatatacgtaccttacaacaatataaatataccacaaaactaatagtagtgattcaattaatttttttgtttccttcatgatata

SEQ ID NO: 327574 - DNA, 514 bp, Cannabis indica
tggtgctgtctatattacttaccctgttccttcgactgtagacaaaggttagtgtaggcctatcagccttatgctgaatggggaatattataagcatatattattaagtagatatgcaacgcacatacaaaaactatattaatataataataaataattgtaaaaaaatcaagattattcctcttgggattgcaattcttattgtactttttcacagaaaatgaaaaattacaggtaatctctaggaaagtttgtactatcataaaactgtaggcactcttgatcaaatgataatattgatataattaaatgaaataaaaagaagaacaatgttgatgtacattgataatattgatgtaaattcaagtcagcaaatattaaaaaactaagggacatatagctttttgttttctctgttgtgaaacataaaatgtttagttatgaaacaacataacattattacaaattataattatactcagatatgctataattgaaaaataaaatcaaattt

SEQ ID NO: 327575 - DNA, 635 bp, Cannabis indica
atgatctttggctctgttttttttctttttcttaattaatttgtataaaaaagagcttaaagttgataactttattaataacttattttattattttatgggttgatgaaagaaagaaactttatgtaaattttatagtgcaccttataaaaaaatataaacggatgcaccttaacatgttttctacatttaaatagatttaattttattttttaaaaaatttagaataatttaatacgtcaaaaataaggttcaaataatttattgtacacacgtctcttattttatttatgtgtgtaaaatagacaatctaaacattctatattataaattattttgaatttctaaattttacaaaatattttacataattatactatacactattatatatataaaaaagtttactataaaaatatcgaaaatatgaagggagtgaaccgtagaaacactcaaaactttattaatttttatgtgtttagaagtaacagtgtaattactagggtattaattacatagtctagtaattacactatattttaaattacaagacgtaaattcttaaacgcaaattattcgatttgacatgtttgtctgactatgaaattacactgtaactgtgtaattggaaataa

SEQ ID NO: 327576 - DNA, 614 bp, Cannabis indica
ggtgggggtctgggttaaggacaatggtcgatccgaggtttgggtctaggtctaggtccgtgtccaaatttgaggtttggattcaggtctgagtccaagtttgagtttctggtgtaggtcctaggtttgggtcttgagtccagatcccaatctgggtcccgagattgggtttgagctcaggtcctaagtctgggtccaaggttgggattagtattgtaagtttgtgcgtgttgtgatggcccgacctatattaaactatgcttttcaaaaaaacgggtcgtgtcgtgttatactacagaaaaatatgagtcatgtaatgttgtgccaatatttttaaagggtatgtccaacacggcccgtaggtccgttattttcgtgttgtactcgaattcgtatcgtgctttacttgtgccagcccatattttttaaataggccagcctattttgatatctaggcttatattcgtgctttactttttcatattttttttttacaattactaaagtatattatattttatagctttagttatttttatataatttttcaataatattttataaataatcatataaaaaaattattagcatcattagaacttgaatatttactt

SEQ ID NO: 327577 - DNA, 631 bp, Cannabis indica
gttctaataaaaatattctaattcaagtttgtctaaaattaattaatttaatttaattttcaactcaaatatatttttctacttaattaaatattagaaaatgattttgatttcactacaagaaatccttctcacataaacaacttactacaagaaaacctcaagggaagagtgtcaatagcattgtgatgatgttgatttcactttccgttttatttcagcagcattagttgtctcaacactgtgagagtgagagaatggtcatctatcactctctctgtagaactgtgtcttccttctcatttccttctttcctttctcttcttctcttcgtgttggtgatctgagtctttcttttgttgtgatcgtggcagtgtccattgtgtttttttgtctgtattgtttggttccttccccttagttgctttggtcttagttttccttgttctctttccaagggttcttgttggtcctctgtctgatagttgtctcggtgtggggtctttgtgtatttagtggagtagggtgttgttttgtgggtagaggggttggtaacggttggttttgtttagttgtttttttttttgtctggttcaatggcattagtaaatgccaccaactcctccactaa

SEQ ID NO: 327578 - DNA, 551 bp, Cannabis indica
gtttttaaaagtaaaggtgtcaaaaataatatggaaaaaaaataaaataaaatattatattttggatgatgtagaaatatagagtatctttaaaaaatacaccatttaagatgctctaactgcaacaaaaatgagttttaacttttagcggctaaaatatatattattaattgctaaagttcgctataccgccgctaataattatatctctttataaataggaaaatgttgccgtagcccatagggtctctaagatagactctatttatggtctacaattttttttacacgtttcacttttttactggaggtttacaaaataattttactatatatacatctttatctttttttacacgtgttttattattaagagtctccagtttaattttaatgttttataaagagatttttttttttgaataatgttttataaagagataattcatttaatatatatttttctaaaaataattcctatctatatttctcttatagtgtacaatagtggacattatccaatccaatccaattgaaccgaaccgatccaa

SEQ ID NO: 327579 - DNA, 1010 bp, Cannabis indica
ccaacaatggaagaacaactcaaaagaaggaagtgttggaaggctatgaaacagatataggggaatgttgagaataatccatttaatatacggctcaatattttactcattatttcatgtggaacaatgtctaggataaaaaatacaatacaaattatttttactttctctgtgataattaaaaggaggtgcataagtgttggagagactaagagtgttcatcaaaccgtgcacactacacaaattatttgtaccgcaccacaccataaattttttgcagtacggttgtggtttgttattttagcaaactgcacggtacggtacggtttacacttttaaatttaataattgcagtttaaaccgtatcgtactgtatattataaagttactaatttttacaatatgtttttattttttttttataaaagaacaaatatatgtaatatatgtatagattatattattttttagagacagttcaagataatgacttagtgattagtatatatgttatgatgttaaaactttaataagattattttttttgtattattaaaattattagattgatttttaaattttcattataatatttgattataatgatagtgtaaaccgttaaaaccgcaccgcaccacactgtatctttcgcggttttaaagtctcgcagtgctgtttgagaaattacaaaaactgcatatgcaatttgattaaaaaaaaatacaacctgcaccgcaaacattttaagagagaccgaacatttaagcgaactaagctaagattatctcgaagaaagagaagtactcttcaagttgggtgttgatcaagatgtgtggtcgagtatcataatcatagacatacaatgttacattgatgctgatgtgatcaaaccgattactattagaatatttctaattaaggaaataaaataatattattgattctgataaatgaatatttttatattcattgaatctggatagaatcaaattacgtaaatattctatata

SEQ ID NO: 327580 - DNA, 659 bp, Cannabis indica
cagataggccctgtttcaagaaagttataatatttatataaaattggttcagaaaatagctcactttttttttatttacaaaaaaattaatgatagaagtaatcctcaaagacataaagcactttaaagtttgactcaaaatttgatttttaatagtaaattattgtgaatgataaattacaaatttgtcaaattttgatttttaatttagtaaatgattatagttgtgaatgctcaaattgcaattttgttttgtgaatgtaacatatcattttattaacttttgtacatactcaaagtcaaagctataaatttggtcacataaaatttctttctttttttttttttagggaaaatggtaactttattaataagaagattcaaccattacaatagacagaaaatcagcgggaacattatcctcgctaaatatacgatctgaatacaaacaagagctacgagcaagacaatgtgcagctttgtttacagaacgtttaacaaaattaattgtgactaacggcagatcggccataagagaacgacaagccgccacctgaaggccaaaaggagaaggaatatccaccgtgctttggactgcctggataacaaccaaagaatcagtttcaacctcaaccggtccccattgtttcctctttatc

SEQ ID NO: 327581 - DNA, 990 bp, Cannabis indica
aaatatatcacatattattgtaggaagtacatatatacatattatgtaaattaaatattaagttaaattatttaatttgtaattttattatgttaaattatttaatttataatttgtggcataaatatttaaattaaatttttgattttatataaatacataaatttaatttttaacgataaaaatatctaatttatatttttaaaacttctgtatgtacttagctattgagttaatgggcacgtggcagttcttgattggtctaggtcattaaatttttatttttatttaaaaattaatttaaatataccaggaataaaatgacacgtggataataacttgacacttaacgatcaggtatctatagaagttctagaaatataacttaagtattattaccgtcaaaaattaaactaaaatatttatttgcaactaataattaaattttggtatttacaccacaaattactcttatttaaataattattcaacatttaactcaagtatatatatatagtgtatatacatgtatgtaagaaataagtcagcaattagttaaagattaattaagatttttgctcctctgaatttttcagtccgttaaaatttttttttgaattattgagattgttgaattcaaagatttatgttcaatttcattcaattttactaacatgagattatctatgtaccaaattgtacccttcgaactttgtcatataacaaattatgtcctccaaatttttactctttttttatatgtactaaattttactctttgaatttttatagacactagacatccactagtaaaatcagaaggaattccttaaatccaacatgtcttaatagtttggaagaaatttttaaaagtaaaaaaattttgagggcacaatttaatacttgtctaaaaaagcaaaaattcaaattagtttcatttttttaattaatcataaaatacttttaaaataatttaaaataatattaatc

SEQ ID NO: 327582 - DNA, 510 bp, Cannabis indica
aataaataaaagaaatcgatacatctatacataggagaaatagcctattgtagaattttccttgtatcattaatacaataatattaatacccatttgaaaaaaaaaaattaagttgaaagatctcacatttgagtacaaaaatcattactcaacttttaataccctcttcaatccgccgggtaaaatttgaccatggtgcccagttgtgttggtatattctacagaaatgcagaaggatctcatcatgtctagtgttattgtaaagagaaatgttaaaagtacttatgtgttaatattgctattgattaaaataaaaatcgaatcctatatagtttagtataataatttttaaaatatatcgctagtcaattacaaagagacatccctaaaagcattaaataccactggtaccaagtggcgaaactacggtggagtcatgtgggggcaaatgaccccactcaagttttattaaattacaattttgtttaatttttttaataattttaatt

SEQ ID NO: 327583 - DNA, 1131 bp, Cannabis indica
aaccatgcaacataaaatgttatttctaatctttattaataagcaaatctgattatattgaaatgagttttatttagggcacaaaacccaacagttacatctttaggccatatacaaactattctatttttaatgacagctttaactttgcaaacaattctatcacaattttctatctccccattccaaaaaatattatttcagttgctccaaatcaaatagatcaaggctgctatggtagcagcataaactttctttttgaagttgttgcatctagcctttgttaaccgcttgctgatatttttcagggttgctgccgaggttttccattgcaaccactgtttgatttgtatcaaacaatccttcaaaaactgacagcaaaagaaaagatgttcaatggtctcgctgccacagttacacattaggcaatcatctctttcaattaccccaaatctctaaaatctttccttcgtcttcagcttcccaagcatcaccaaccatacaatgaaactatgcttaggaatattaaaacggttccaaacaaacttgtcccaattcactctagtcgactgtaaatgtatttctctataaccaacaaccactaagtatttgtctagtaccatgtttaaggagcccaaactcttcatttgatctttaaccatcactaattttctccaataccaacttgcttaagctgaaggtttataggcccaccaatcctcatccttaatgtagacattatgaacccatttaactcataggttatcttccttcttggcaatagcccaaacatatttgaatagagccgctttgttccaatccgagatacaccggaatcctagtccacctgaacttttagattgacaaaccgaggcccaagcaaccgcaggaacacctgttaatgtgtattggccattccataaaaaactacggcaaatagactcaatttcacttacaattttctttggcagcatcatcacttggcgccaataaaagtgtatagccatgagaactgagttaaagaataccactcgcccagtaaaggaaagatttctcgagctccaagttttgatccgagccatcatcttctcgaccaagagttttcaatctgctgaggagattctctttgga

SEQ ID NO: 327584 - DNA, 656 bp, Cannabis indica
tttattcaccttgtcaatgaaggagtataagtagtactactcaaatcattacctagaacttgtgaatagaggtcttgtacttaagaattggcagagctatctctatagagaaaatttgaagtatttagctacttagaaagtggaatacaaattagagacagtgattggaattagcttaagattgggactacataactttttattatcctaagacagccaatgtagtggcagaagtccttagtaagaattgtttcgggcaagttttctatacaaccatggtttttcccttcagttagtgattgtcatggtcgaagttaagtttagattttgtgttagacaaactcagtgagttaactcttcaacaatgtttatttgataacaacagaagtgctcaattgatggatataaaattcagggaaaatccgtaagaaagccatagcaggctagctcagagataacttgatattaaatcatggaatgttatgtcataaaacttaagtgtgtattttcaagtaatgctaagctcagaaatgatattctaaggaaagtttgcaccactctttagttgttatactatggtattattaaggtgtatgaagacttgtaaattctacttatggtgtagaatgcaaaaaagatgtggtggacaaggtatt

SEQ ID NO: 327585 - DNA, 1670 bp, Cannabis indica
ctgcagatgtaaaatctttaaggattggaaagtctattcatggctatgttctaagagctgggtttgagtcacatgtgaatattgcaactgctcttgttgacatgtattcgaaatgtggttatgtggggattgcaaggttgattttcaataggatgagagaaaggactgttgtttcttggaactcaatgattgatgggtatgttcaaagtgatgatcccaaggaagcattggagatatttcaaaagatgttggatgagggttttgaaccatctaatgttactataatggaggcattgcatgcttgtggtgatttaggtgatattgagaggggaaggttccttcataaattgttggatagactgggtcttgggtctaatgtttctgtaatgaattctctgatatcgatgtatacaaaatgtaagagagtggatattgctgccaagatcttgaaaatttgcagggtaaaactcctgtttcatggaatgcaatgatattagggtatgctcaaaatgggcaagtaaaggaagctttgagtcactttagtgagatgcaatctcaaaatataaagatggatacatttaccatggttagtgtcattcctgctttggcagagttatctattacacgccaggccaagtggattcatgggcttgtataagatctgtttcgataaaaatgtttttgtgatgactgctcttgtagcatgtatgcaaaaatgtggagccgattaacactgcaagaaaactctttgatatgatgggtgagaggcatgtgacaacatggaatgccatgatagatggatatggggtagagctggccagctcaatgaggcttggagtttattcagaaaatgccaattgagcctgggattacagtgtttggtgccatgttaggtgcttgtagaattcacaaaaatgttgagcttggagaaaaggcagccatgaaaatatttcagttaaatccaaatgatggtggctaccatgtattgctttctaacatatatgcatcagcttcaatgtgggataaagttgccgaaattcgaacaatgatggagaaaaaagggctaaagaaaactccaggctgcagcttagtagatttaggaaaagaacttcatactttctactctggaagcactctacatccacaatccaaacagatctatagctttcttgaaactcttggagaaaagataaaggctgctgggtatgttccagacactaattcaattcatgatgttgaagatgatgttcaaaaacagttgctcaatagccacagtgagaagctggctatttcatttggactactaaataccagtcctggcacaacattacacattaggaagaatctaagagtttgtggtgactgtcataaggccacaaaatatatatcgctcgttactggacgagaaatcattgtccgtgacatgcatcgcttccaccatttcaagaatggaacttgttcttgtggtgattattggtaaactgaatactcttgtttggggtattcttgtgtgttgctgtaacataaaatttctctttagaataatataaaaggaggctctccactaacacaaatgtttttttttttttttttagtttaaagtaagtcgactaacctaaaccaactaagtttgtttagtaaactttttaaacttttttttaatttttttt

SEQ ID NO: 327586 - DNA, 801 bp, Cannabis indica
taattgacaatggaagttccgtgaacctgctcttcaaagaagccttcactgcgatagggttgaccgaccgggacctctcgcctagtgggtcacagctcacagggtttaacgggacgacgctaatcccgatgggaaaagtaaggctcccggttaccctgtgcccggataccccccagagcacattcaaatattgcaccttcgtggtagtagactgtccgacagcctacaacgcgataagagtggaaggcgacgtttcgtcgatagagtcacattttcttatggtttagtatttttgtaatagtagtgcaatttagttagacattcagattgtcaggatttgccgagattatagttttgggccattttacacctatgttagttagctatttaaaactttagtgaggtaaaaatcgtacagaatggctctagctgcttaaagaattgaaaattcaacttgaggggttgcttgacctagggtttacacggcctagtgtttcacctgggttgctgccgcattgtttgttaagaagaaggaccaatctttacatatgtgtattaacaaccaggaattaaagaagctgactgtccagaacaagtatcctttacctaggatcgatgatcttttcaatcaacttcagaggaagatggtcttctccaagattgatctccgatagggctatcatcagttgagaatccggtaggacattccgaagactggtttccgaactaggtatgggcaatttgaatttctggttatgccttttggactaaccaatgctcctgctgttgggttttatgccc

SEQ ID NO: 327587 - DNA, 1539 bp, Cannabis indica
taggggacccccactccttttttaaacattagggtttggttcggggcctaactgctagatttgacttttccagaatcaatgtctgcttctgcatccggttcaaagtcttccaagaagtgggcagttccactggccaccttagaggaggtcatgatgggtcccgtggcccaggcaaaatatacttcccgtgccaacgtttgggaggcggacgatctccactccaccttaacttgtgcccaccagctcgagaagatcgtaacggtagaaggcatcaagccatcagcttccgagaccttccaccgcctgccccgggatgaggagacgcccaatcataactacggggggtttggagcttggagccagacccacctcatgccggggctatgctccctcttcaggattactttgttaattttctaatttttgttggcctcgcaccgtatcaattaattccacaagcataccgcctgcttttaggcttatttattttgtatgctgcccggagctggggttcgcccagtccggctgagattttatatttttacgaactcgtttctgtccccaaaaagggggacaaatttaaggatagattttatgggctccgggcccaccctttgaatgagggctcggtcccttacaattttcagaagcatgtaaaggaataccgccaccgcttcttcttttcctccggcttccaagccatggaccgcccggaccttcttacagagtgggtcaggatacctccctacctgcggactgcgcctacccagctgttcctccaatgggccaagaccttctctacttatgacaagaaggccctcaacgttggggacttggtcacgacggagaattgtcggaaggccaagctgatctccgagaattagtcggtggatgactttaacctttccaaggtcatctgcccaaatgacagaactcatgttgcgaaaagggcgctctgggtggacataatcacttcggcggaggactggtatcaaaagtacctcttcaggagggaacaggagctagcctatatttaagcccaggctgccgccgaaaggactcttcgtctggaggtaggtcgaggtcgggtgctttctaggcctaaactgctggccccggtccccaacacaggagcccctgacgccagtatgtccagttttggtaagtcccttttaacaattcatcatgtccactctgtccgagagtataccggcgtaggcctataggatttgatgagcgcccttttaagtttaggatgccctccactcggtggggggatcatgccaaagacttctactgtaatatcccggaaaataaataatatttaaatagacatattttattaaatatgtaattattttggtaacgaagtaagattatgatcttacttagggtaactactgagaatttattgaatgatatatatagcgtaatttattaattacggagattatattgggatatgtgggtattgaggataccatttctgaaataaaatatttttttttgagcccgacaattgtggaaatttaacgatgt

SEQ ID NO: 327588 - DNA, 523 bp, Cannabis indica
atatgcttagcacaagtatatgtagtttaggactgtcatgtgtttagctcactagtatatgcttaggactgtcatgggcttagcactgtcatggagttggagagtcatatcaatcatgagtgtcttttcaattaccttcttgtttcttatctccactcatctcatgctttcacgcgtttcatattcttatcacaaggaatttcttcaccatcttcagagatcttatcttcaaactcaccacaagcctttccaacccgccaacatcaccattttcacctatttttaatgatattaatctacacgcattcccacctaaacatgaaaattgtaagaaaagaaactatatagaaaacaataataatattatgactcacgagagaaagaaattgtaactaatctattacctcaacggagagaatgaaaagagtatgcatgtaagctcaaagtggaagagcagctatatagctagctataatattggtggtgttggaaattatagctctaaccaacacactttaagaag

SEQ ID NO: 327589 - DNA, 564 bp, Cannabis indica
tctttgtgcaaaaggaagaggcacaaaatgagatgaaaatgctcaaatccaaatataaaacgttaagaaacggtaatgaatcgtgggagtaacgttagttcatagtagtgactcctcaccaacccgctaaggtaggatgaacaacggtgcatgctcgtgtagtgatctaatgtgtgagtattcaaccttacgtcacaaaactagggtgaccctatcggcccagacccaaatcactagatagcatcttatatacacttataacgaagtgtttttatttcatgtaagactctttccactatcacacacttcactttttcttatatatttttttttttaaaatttaactagaaagctcaaacaaatcttgcacaataccaaatcggtctttgtgtaattatgtattgagtatctacatattttttatttagggaaatttatttaccctggaaaaatttctaaagacactctactttaataatttttattttatataaaatgcatattttaattgtattatgtttttttaatttttgtcttccaattcatattcttaaaaaaatatac

SEQ ID NO: 327590 - DNA, 1183 bp, Cannabis indica
agtatttttgtaagtttccctaaagaaaagattgctaaagacgttccttacagaattgggcttagttctaactaggcccacctaaaaaactcagccctatctgtagtacgatatccagctagtgggcgttttctctttaggtatcagttattttttgaaataatttcaaaaatacacaaaaaaaaaaattacaaaaatatgattatacgtaattttaaatatttttacagttttaagattttatttacataaaatacgtttttttaatgtatttttatattgtactcttattattttattgttgtgttttttgttatttttatattgtttttttatgttatttttctgttattttttacgtgactttcttgttatttttataaatattgtaaaaatgtaaaaaaaaattctttaaacgtaaaataagtaaaaaaaaatttatcaaaaatagtagtttttatcgatttccctttttttgggagggaatttacacaatacacctaaaattaatttttttttacaatttcacaaaaaaattatttacatttttacggttttgttgtttcaacgttttttttatgttgttacaatgttatactatattttcacaatgtaaaaaataacatgtaaattacgatttttcttaaaacaagtgtaaacaatagtctgtaagaaaaaaaaaagtccagaaaatgtaaaaaaaagctcaaaattcagtaaaaaaatgtaaattttttattatttttgggtatttatgaaacaatttcttttttttttctttttttttttaagtaaaagtatcggttaatttcactaatatgatattgcaatttacattgaaaacaataaattaatatatatacggataaaagtttaaaattctttaagactgtaacagattgtaacagtattttatttagtccctaaatgttgtttacaaatttgtaacactttaaactagggttgagcatcggtcggtttggtccgtttttttctatataaaaatccaaaattcggttttcggtctggattagtgcaatccgaaaaccgaccgaccaatccagaatctatcttaaaaccgaccgttttgaacctccgtttggttggtttaaaccacccaaaccgaatttttaaaaaaaaaatgatctaatttattctataataaatacattattttacattt

SEQ ID NO: 327591 - DNA, 547 bp, Cannabis indica
tatgtagggttttatgtgtcaatcgagcctttaatgaagtgggctctttttcttttatttaatctgtcgatttctaactaacgttagatttcctctgttataaactgaagtaaatgtcaatatgtcatttttagaccgacaaaaaatgttgtcagttccaaactgacgaaaaatttttagtatggtttattttacgttggttttgagcattgacagacgaaaaaatacacttttgtagtagtgcatgaggacatccttcttggatatagatgttgcttgtcctttaagtgtgaagtctctatgtgagacttgttgtctagattcatcactaaagagtgatgttagaaccagaccaactctccaaattttcctattctcagcaactagactgatggcttatattctatggagtgggtaatgagccctacatctgtgatgggcctctgagatggtccctgtgtcaccaatccagaatcacagataacatttaccctcaagcctttaactgcttgggagctacagaggtatgtttgttggaaattatttt

SEQ ID NO: 327592 - DNA, 763 bp, Cannabis indica
tctctctctctaatatctctctctctgttctgatgttctcccccttttccaattttagggttttgaaatgtggaggaacaatggaacactctgaagaaatccccctttcccaaaatactaccgaccatccctcaacccacgatacccagttagggtttcagcatccacccccgtcttcttcctcttctaacaataatagcaatggtgatcccgatcctgaaacttctgatctcgctcatggggcagtcgagaaggagaaggagaaggatgcagatgaaactggaggtactatttgtcaggagctagcgaatttggaattgaagaagaacgaggaagagccggttctgaaacctgatttggaggaggaggaggaggagaagaaagatgaaaaagaagaagagaaggaagaggaaaaggttgctgacagggatttgagtggtgaagaaatggggagccggaatggaagtgatgatggaaatgaaaatgtgagtgagaacgagaatgcaaatgatgatgatgatgatgatgatgatgatgggaagagagaagtagaagagaacgatgatgaagatggtggagttggagagaataagagtggaaatgagactgagaatggcagtgaagtaaataatggtgtcggtgagatggagaagaagaacggttatggtggtggtattcgaaagtatcagtacccagtgaggcctgaagctgaagattgctccttttacctcaagactggaacgtgtaagtttggatccaattg

SEQ ID NO: 327593 - DNA, 560 bp, Cannabis indica
ttatttatttatactataaaaaagtaaacaataccctcaattttcatatttataaaaatttccctatattaaatatatttgtgatcacactcttttatgtttgaatttgtatacatttaacccttgcatttttttttttgtgtcaatatccttaaacatcccttttattagaattgttaatgtatgtacatgtaatatgttattatttgtgaaagtaattttcattatttaaatattataaaaattattttaaattattttttaaatatgaaatttatgtagccgcaaattatcttataattttaggctgagatacaaaatgatcctaaatttgaaaattaagttaataaatatctcattttaaaaaaaaaaattgaaaaaatgaccaaatatgataaattagctaatacaaattataaaaatatatttactacatattatttttttttaaaatatatataataattaaattaagttatataatttttttagtattgcatattattatattgtaacaaaaatgaatgaatatattagattattaaatatatacaatagta

SEQ ID NO: 327594 - DNA, 1265 bp, Cannabis indica
gggccaagtcctcagcagtaaaataaccagaaaaagagttacgaaacgaccaatgcgcaagcttatgagccacctgcacactagcacggggctgccacacggtctccacctcaggaagctcatcgagcagttgcaccagaacccagaatagaccagcaagacgccaatcaggggcccttcgtgcgtgtaaaccgtgcaccagcagctggcaatccgagactataacagcctgcttccaatccctgcaaatgcaccatttcacagcattaatcaaagcccgcatctcaacctccagcagctgttcagagtcaaaattcacagccatggcctccagcaccgacccctccgagatggacgctacacagctttagcgagaggacacttaaagaacaaatgatgagccgaatcctcctccacaccacagagtacacatctagcatcattaccaaaaatcctttggagccggcttccgaaagggattatatctctgcaaagtttccataggaacattctcagacgctcagtaatctggagtttccaaatccgaatccaaagctgatcagtctcacctcaacgacccttgataatagacttatacgccgctctcggagagaataacccatttgtagcatctttccacacgaggagatcttcccgcgatctaggcaaccgccctatcaagttcaaagaactggccacactagggacgaaccatctatgaaccaatcgagatatccactccccatcctcatcaagcaaagtagagaccttaattgagttctgaacacacaatggattgaaggcagctctagacatattccagtctagccaaggaatctaaggggaatgccacaagtcaaccttgtttcagtccgctataagccagcaggattcattcccgatgaggtctctcgtagccatgatacctttagcaccaaaagatgcattcttaggcatcttcgagttccaaaaagtttgatccctactcccccaatacttggctctaaagaccttacaccatagagaatcttcctcctttgcgagtttccaaccaagtttcgcaaccagagcaagattaatatctgcgaacttcttaaaatttaacccacccttttccaaaggcaagcgtaaggagttccaatcacagagcgccagaaatcgatctttgttttcactacccatccaccagaacttacggaccgtctgatccatctcaagacacaaggatttagggaagaggaaagtagccatagaatacaccgggg

SEQ ID NO: 327595 - DNA, 251 bp, Cannabis indica
atacaaaaagtgtaaacaattttgttataacacatctagatcgtattattattaagttttattttaatgaaaaataatttatggttctatttatacaattttgaaaaatacataatctatattgttattcaacaaaatagggggtaaaaagttcgaaatagtatttactcaaattaatttaggggcttactttttaatttttttaaacaaaactctgatccaaaaattaattatagtagcatttaataaca

SEQ ID NO: 327596 - DNA, 884 bp, Cannabis indica
cgcgtagcagcacccgccgttggttcatcatcagacgtggagggaacgacagcatcatccgaggcaatggctctagcgcgtttaagcatgctgcgcatagagtctccaacttgagcattttggcgcatgaatgttggcctaacaacaggggaaatggcagcagtgggatgggggcaagaagcattgataacaagtccagagtccccccgggaacgagagggattggttatgggagaaatcataggggctttccctttgcctttatcaatatgggtggaaacggagatagagtcagtgataataggagcggagggtttgacagagaaggatggcatagcatgggtaggagtaatgtaagtggctggcatagtggagggggatgacactaactgtggagattgggccgagagacgaggaattgggctggattgaggagaatcaacatggagaaattggtcaacggcttgttggagatcttgagtatccgaaggagggtggatacgaggaaagaactcctcaaaaggggttgagttagacagctgaaaaggatttttcttgtgtggggatgaaggggtagcacggagtgtatctttgtattccaagagtggggggtgcgggaaattatcacagcggaggaggtatttagaacatttattataagtatggtcaagaagaccgcagaagtagcagaaattggggagactttcgtatttgaagctgacccatcgtggttcagaaatgcctctgaaccgaatggtcatacctcgacggaggggcttagtgatatcaaagagtacacggattcgaaggtaaggaccgaagttttccattaaggaaagagggtaaatttccagaagatcaccaatttcatccgcaatgaactg

SEQ ID NO: 327597 - DNA, 1463 bp, Cannabis indica
aaatattttcacttttctacttttaaaaacagaaaactgattaaaaaagtgttaccaaacgccaccatagtatatcacattttataaaattttattgtgaaatgaggtaagtagtaaatgttagttaataaataaatgtaaattgaataccattcacttttttttatgttaataaataataaaatcaaattattttccttttttaataataattcatattctcattttcaattatataattcttaaagtaaaacaataaaagatacactacaaaaaaaattgctacatttagtaataaatttttaaccgcaatataatttttttttttgactaaatgtgacttttaatcacaacaaaatattacttgtaattaaaatatagtatttggatacaaattgtcatgactgatttagttttagtcacaacaaattatattttttgtctaatatacctacatttaacatggccggctatataactatttaaattggaatattacacagggctctcaaaaaataaagggtctaatatatttttttctttaatgtcttttaggtttttttttaaaaccttatttttctaacaacttgtctcaaagtcctttattgtctattttcaattctaaaagcccattttcaatttcattactgctttaagaaaaaaaaaagaattcgttactgctatttattattttttttcaaaccaattatattctttttttttttttgtaagttttattggaatcaatcacaattttaataaaataattcgagtgttttggtattttgtaaaatatatataatggtatgataatatttaaaactattaaaattgtatattttttttttgttaggggtttaatttttaaaattagaacagagcttccaaaatgtttaagacggccctgacatttagccgcagactttttagttacgatatagaaatgatgatttataattagtcgtaacttttttacttttagtcagaaattttattgtaactaaaagtaagattttttatagtgatatttcatttgaatttatttatcaactattatgaatagtgtcattcgttttaccataaaataaattataatagaaaaaccatattactgtcaaatttatatttcgagacctattattaacaaactgtataccataaaaaaaaacacaactaaatagtgtaaaaaaattgtaatgggtaaaaataataattattatacatttatgtgaggcgtggtatatagtaattaaaatgcaatgcatgcatggcaattggcatgtatatatagccttgattggcgccgagaggcacatgcaatattggaacttttacttcttctactcatcactttctaatctacaaaacaaacattatataataaagggtaaatagtggcataattaactaaagttttaaatttgtaagcggcataatttaatgatttttttagtggcataagt

SEQ ID NO: 327598 - DNA, 1405 bp, Cannabis indica
ttcaagtgtaactctatttagttataacctctcaattagaatattattttcttggtcccaagtgtattcttggatagaggttctactatatctctaattacatttgtgacaattaatggagctatatatagagttccatatatatatatatatgaaccaaatatgatacattggtgaattatttggatgattaattaattacaactaaaaatcttaattaattacagaaaatatacaatgtataaaactggattaactaatgataatattataattacaatacataaaataattaataaataaatgaaatatttgcatgtgaatgaagttagctctctcatccatgatcaatgaatattcttacacaaagtagtttttccatctagaattgtccaaagtcttttcttttaatcaacttggaaccataaattataatcatatattaatttaatgtaaaaataattaagcaaagtcacagccgtttaaagtatataattaggccaaatagtaaaatttacgtacgtacccaataaaggtctaaatcatgatttatatatattcagacatgcactgtgttttggtccccaaaaaatataaattaattagttttaaagtaagattattaatcatgtgttaataataatagccggataagttaaacaaagaatagggtaacttacaactttcagcttttacaaagtaattaattaattattatagaaaatatggcaagttgtgtacaacacccatttttttaacttctctaataaagacagaaaggtgtactaatatataacattaatttatggccatatttgttaataaaatgactttcctataattaccaccaaattaaaaataattcaatggttattaattattttttctagagggaaattataagttcattttttttcaacttaaattggttaattataggcacatatatatgtcaatgaaaagttgatttcaaagaggaaatttatgttattctttagaatttggttgtaggactatttctaaatatgttcttccattgataattcaatggtatttaattacccaacataataatgtatcactactacaatatagccttttagtgacactatttagtgacacgcacaaaagtgtgagtcactaaagagttaagagtaatttttagtgacatgcacaattagactaaatattcagggttagtctcttgtaatgtgagtcactaaaaatatggagtgtcactatagagtaaaacccaaaattatttaatttttattactttaaaaaatattactctatagtgacatgccaaacatgactgggtaaatatttcccaacgcacctagtgtgtcactatatcatagtcttattttttttaattaaaaatacaaatattattaatatgtaa

SEQ ID NO: 327599 - DNA, 744 bp, Cannabis indica
ataatattattattattaatattctgataagtttattaatatataaatatatatattaagtttaaaagaaacaatacgaacaacgaaacacttctctgttctccgttcaacgaaaccctcattcttctttatctattttcttcgattttcaacctaaaacctagccattcaagctccagtagtagcaagatagtaaatcagtgaagaggaaaagcttaaggtaaggattgtactactacaaaaatggccttttacttcagtttttaagtgacgtataaagaatttgtgtcggtttgtgtaactgaagctataagtgtagacgcaaatagtcttatttttgtttcacttagtaacagacggtaaaatatttttacttcagttcataaaccaaagcaaatagtaaaacattgatgtaaattagtttcttacttcggttatgaaccgaaacaaaagaataaaaaaattaaaaaaaaacataaacctttagactaccacaacctttcagaccgccacaacaacccaatagtaacaataataaatactgccaccacagcaacccatcgtaccacaaaaagtacatcaaacaaccaccatcccagcggaccaccaccaatgcctacaaaaaaatggagagagaaagagagaaatcagagctggagcggggtgcgtgagacagggaacgagaaaaaaatgatgaatctcacctttgaaaactccattttctcaagagagagagagagagag

SEQ ID NO: 327600 - DNA, 997 bp, Cannabis indica
gtattcttccatccaaaaattagctacttcaaccactagtagcgatctagaggtgaatccagagagtgaaagttgaggtaagagttagtttatattttccttagtaaaagttgggttgtcaaggttttgtttttgtgtaagaaatgaacttttaccagggcattttgcaaactgcgttggcaaagaggtcaaagtattaccaacatacatttgcagtggctaaatctaacttttaccagcacatttacgcgctgggaaaagtcatttttgccaacacttttcgttttatgctggcaaaagttctaataccaacattgatttgtcaaccccttttgccaacacatcacaagtaaatcctattttaccaacgcaataccaactttttccagcacaaaaatgtgctggcaaaaatgatatttcttgtagtgggtttatggttgttatttgattttgtttctgagattgtaggattggttttgatgcttttgtgataattttgctattgttatgaagtataaatcaagtttgagttctgttacgtgataattattgtatggatgttatataagtattctgtgaaattttgaattaattagttaggttatagtggaattttgagaacttaaaattcatgtttcttcgtccttgcgatgaaacggttaattgtttctgttgttgtcgacaagatcaaaaattatattttggtcataatttttcactcggatatctgttttagatgttctatatatactctttcaaagcttgcgacgagctcaaagggccacttcgttgaactaggttgaaagagaattccacttctctgatcgtcaatctgcgatcagtgaaagagaatttcaaagtatattattttcttttgatatcaatagttacttttattttagggtacattgaggcataaatacctaatgtttcagattttgtacacttaaatacctaatgtttatttttggagacaaaaatacctaatgttacaatt

SEQ ID NO: 327601 - DNA, 1055 bp, Cannabis indica
tacacactctcagaatcatcacacttttcctccttaagcagcgtgggattgcacttcttacctagcatttcccattacaaattacgagactactaactttcactacacctccccttagggggtcttgttggggttttatgccctaaataaatctatttcaatataatcttcttttctatctatagaagataagaagtcatttatgtttacatgttattttcatgtttatggtttaatatgcactttctgttaaatccataacatatagtttttcataattacagtgatgtctttacagtggaaagtaattttgattatatacttcaaagtttaagtcccatgatttatcaatgcactagatttatactcacatgataatcaacgataaagtttacttacacttggatatgtcgtatgtcctttccagggcattggtaaagtatactagtatcagatgtgttatcccaaattttgtcctcatgacatggcatacttaggtggatagaaccactgctatgtggtagtacaactcaataaaaggaatgccaagtcagcacctgagcaaataaagacctctccactcaaacaagcatcaagtgacagaccagttccctctcaagagctggccagccattgggacatcaccatggtcggccagcctgtcctccacaagggcctagacagccaaggagtgcattgcaggctttgctggacaactctacacatggacaatagatatgggctgggaatcggtccttaaaagcccaatataatggctaaataatatctgaatcaaggacactttgatctttcgtaaatatctaacaaactatatgaatgctaagggatttgaattgtaagcctagggtttagggctcctatataaaggtcttaacctctgtttggaaacctaagttgcctctaagtctaagtgtctgataaactctctcttccttcttctttctctcactctctcacgcctaccgtagtgttcttcaacacttgagttttgccgatattaattcataccttgtaatcctaagggtactatagta

SEQ ID NO: 327602 - DNA, 2657 bp, Cannabis indica
ggatttacaagttaaaaaaattgtttttttaattaagttagtaggatagatagaattacctaaattaattacttttaattttttttaaaaaaaaaaaaaatctatgagttgattattttttaagagtagaatttttccactatatgataaaaattgtaattattcttacattctacaatttctactcataccaattaacaaaatttagtaaaaaaaaaaataataaattaagacattcatgaatcatgtaggtgagatctttaggatcccacctaatacatcactctttttcactctaatatcattttacttaaaaaaaaaattgttaaaaaattaaataattttattaaaaaataataaataaaaggaaaattatcttatatactatttttttaattttctttttttaaaaaattaaaatgtgagttgttccgtggtttctctaatggtttcagtgtagattagttgtgatttagattgctctattaatcagtgacggacctagaatttttgatctgtgggggcttaattgttataaaaatatttattatttactttacattaaaattataactattttgtgggggcttttttactattttgttgtataattatttaattaaatagaaaatatttaatttttttttcacactaacttttttttagttgcacaatcttattagtgtgtccgtccctgccattaattactataaagattcttatataaaatttcttaaaaatatatagatataaaaaaaacatataaaaataaaaaaagtctctaaataaaacttaattttccccgtatggagactcaaagcatggaattttcaaactaattaattatactccatcttattaaacttgatctcttcaacatatatatgaataaagatctcattaatatttatataaatatatatatataatgaaaatatatagatgatgaggaatatagtaagtgatgaagaatgtaattaataaaaataaataaaagaaaaggattattattaatattattattaccccattggaggtgttaaagctaatccatttgccagaagatttctttggatcccttcttcattttcttctgcataattatttgacactaataacatacacacaactataattcttattatcaccttcattatttaatctccttcctctaattaataaccaaaaactatatattatatatatacttcttcacttctttagtgatgtttgtatatatagagaatattttgagttttgatctatatacatagcataatatatatatatatatagcttaagtagcaagctcaacaataccattattattattattattaccactatttgtgattgtgactatattttttttatatatacatatttttgttcatccacttgtttatttattgattatttgtttcactatttgtagtatattattattgtaatgatgaagaggcattaattttgtttgtttgtgggtgcaatgcaccgtcaataataattctcacacacataaaaactacaaaatattgacatattataatatatttaatataataattacacgaatctatattactgaaaaggttaaattaattaatttattaattagacaaaaataatattaatttagtaaataatagtagctacaaacaaagaataatgtaagaaccaaaaccaacacgtgatcagtcaaatcaaatgcatgacttgcaagtttcaaatataatcacttaatattattagagctaattaattaattaagaaaaattaccttaattctttgatatataagaattagtgtgttggtcatttaatataaccgtgtcacgtatataaatagtttatgttgacagttaattgtgaaaaataaataacactttaaatttactatcaaaatttgagcttagataggattaagtgtaagtaaaataatagttattaagaaggtttagccgtaaaaaactcaaataaaaatagtattatttgtaccataccatcagatctgatattaaaatatagcaataataatatgtctaatgttggatataaggacaaaagtgagaagaaagaaaatggaaagaaagtcaaaagaaaaatatttgtttggttgaaaataaaaatgagtgaagtagaaaatgacaacaaaaaattgggtgtattactccaaaatatttacttaaccaatacactaatatcaaaagaaatagaaaagaatgatagattaagatagtgcaattcgataagggaatccccaaatagttaagtcaagtatgtttattggatcacatctaatatttttaagtttatttaaattcgattcaattatatattagatattaaattttatcatctaattcaatccaattaatttcagtcatataattgataatgaatgttagattggatcaattctattcattagatgtattttatatgtatttattgatttaatttagattttatctaatattttagatattttggaccagatcagatctatctaatattttaggtctagtatatattggattgaacttgatctatccaatctaaaaaaaaagtaaaattttaatgttaattttcatatatatacatatatatttttacgtataacaatataaaaatttaattacttatccaaactaaat

SEQ ID NO: 327603 - DNA, 754 bp, Cannabis indica
cctaaaacacaagcttcacaaatagtaaggcataagaatttttttaattataccttgttttgtagttctttgaggccttattcactgatatgcccaagcctgcaatgccacagttgcatatatgatactagcctttttcactaaacctgcttctctagctggaacaatttctccttggagaacatataaaccattgatcttcttacctttcatcactgtaagcgaacctttagtaattctcaagcttccgttcatggatttttatctgtaaccttcatcttcaagcgcacccaaggacataaagttttttctcaagtttgaaatgtgtcgttcgtcagaaccttgattctgccattatattatttgatggcaaccaattcgattccaatgaccctgcatgaatgatcattttccacgagaactttagctccatcaactaatctataattaataaatgattcttaactcagacacaagggataaatgcatccggagtcaagtatccactccctatttattgaagatattgaatggagaacgattctcgatccattgagcagtcatcactatctttcgcgactccagctgaatctttcatgtggttatgatgcatgttgtccttcctatctccattatgagatttgttgaagtcttgctgcaccttgtactttttgcaaaaaaatttcaattgtccagaccttccacaaaagtaacactttcgaatttccttctctctggacttcgatcttgattg

SEQ ID NO: 327604 - DNA, 1017 bp, Cannabis indica
tatgtttttagaatattattttcgggatatcattgttgggaattggtggtgttggaattttcggggtttggaaaatgaccaatcaacctttggtttgttttaatctttggtttttaaagaggggcaattaggtcttttcattcttttggcttgtagtgaatactagaggctgccatattttatctagattattatttaattaattgggtaattgagtaaggatttattgagagcttaacctagaaaccacatatcactcttcacctctccctttctctttctttcgaactatcaaacccatcaagaagggaggtgtttcttgctgaaatctttgaatcctagcaggttttaaacactttgaatcaaggtatacctccttaataactctattcaagttttgcttaagtttgggattgtgttttggtgttttgggtttaattaggggttgtgtgtgttcagtttggattcatttgctgaagttgagtaaatattgtctttactgttttgagatgggattgagccttatgttgagaattgttcaagttaaagcttagaaaaccttagttgggtctttaatggtgtttttataatttgagtggtttgttgtgaattgatgcttgaaatgtgttatttggggtataagcaggtatcctagaagtttttataacgtttggggatgaattggattaaagggatcagtttttaggttcccagcacagaaccggtcgaccggttctgggggacctgttacaaccggtcgaccggttggtaccctataaccaagcttctggttgggaaccggtctgctggttgaggctttttcccgaaccttagtttttcccgtttttgtgttatttaaggtgttagcatcctatttatcgatagggttatccttagttttgattttaaattcccgataagagttttagcgtgtctctcagtgaattttgaacgttatggtttagggccctgtaaagcgtcgagctgcgtttccactcaggctgaccggcacacttg

SEQ ID NO: 327605 - DNA, 467 bp, Cannabis indica
taattaagatcttaatggaatccaaatccactagactaactaatattactggaatataatcactctatatcttattatgccactattccatgaacaggccaccaaagaaaataatggcacaaaattaatacttctttcaacttgatcaaaaaatttatgtaatgtcaattttgtacagctcacacttaatttattttcatcctatcacattaattattattacctacgtttaattaattaactcttattatactgattttcagttcatgatataaattatatatatagtgcatgcatgaaatctagagagctaaccctgttaatcccagaaggaagagtctcagaaagaggtttaagttgaatactcctggctcttcatcatttctgcacaaaatttatatataaacaaacaataatatatatatatatatatatatgaacacaaatatataagagagagagagaga

SEQ ID NO: 327606 - DNA, 441 bp, Cannabis indica
ccgagttccaaaataccgggtaccggaaatgcaaaatatgaaaactactgaatgacataaaatgcatcactgaattccataaataacagtataataaattatttaaatagctataaataattttcataattaatcataaccaactgctaatttccaaattaactaagcgggctttacaactgcagtagcaaaaattgcatcacaatggcaaaacacaaccccgaccaagccacacctatacctaaagatgactagcagacctaactcgagaaaaaagacaacctagtttttaaattagttcacaactccattttgggtatgtggttgaagattaatatttgattcgttttggatttacgaatatcgtttgtttaagttcaaatatatgtaatgctaatgtttgtttaagagtggacaattattaaaagggttttttttttt

SEQ ID NO: 327607 - DNA, 635 bp, Cannabis indica
ttttatattgtactcttgttattttgttgttgaatttttgttatttgttatattattttgatgttattttttttagttattgtcatttttttttttgttattttcttgtatttttatagaatatcgtaaaaatatataaaaaattaaatgcaaaattattacaaaaaatagcaatttatatcattttttccattttttactaacacggcattttctacatttatactttgtttttttcttctatactttattatctttctaaaactacaaatatattgtttatattcaatctgcaatcatctaatatactttataatttttcgtttttctattttgtaaagatatacaccatctttaatatttttcaaaatcaccaaattttatttgaaatggtccaaaatttacggcctagcccaaacaatgttagctggccctagaggtggataatagcattcttctaaaaaatagggctattttcaaaaatatgggaaaaattattaaggttatgataaatatggcataaaaagtaaatgccactaaatatagcattatctaaccaatcaaactaaaaatatgttttttttagaaaaaaaaaaaaaaaacccatataaaacattaaaaagaaatctgaattt

SEQ ID NO: 327608 - DNA, 819 bp, Cannabis indica
atctgtcattatgtcaatcaaggaaatgtaggtttgagatgtgaaatatcattctacatcaataaaatattaaggttaggataataattgtgaggctcatttaagtatagatatttattcttgaaagagttttattagtaggtcgatttttattcagttgtaaagtaaaataattttttatttaaataaggatattatatttgcaacttaaatcatttatttttatttttataagtgaattatcttatactattgaaatgtagatgttcaattaaaatagaaaataaacttaaattaataagatttaaaaatatgcatctttaagatgacgatatccaatttcaaacatcaaatatcaacatcatcataattgcatactttgagttattaaataaaaataatcaaccatgaccaccaaatgtaatgcgatcatgtgcatatttaatatatctatataaaatataaggaggtggcattgagaagaaacttgagtcggatggaagactgtctgcggcggagaaggggaaacgaccgatgacccatgtcgaacaaacaaaaagaagtgagctgtcattctgccaagatcgtacatgggagtgtctccactactctgggaagggctgacagctgagtacgagggagaatgttgtaacctctgacggtgggaaatgaaaatttaaatggagatgggccccgtctgtctattgggccggagattttaaatcctcctcaacccgattttgctggtgtggagggaaggatggacttggtccctgacattgggcccactatagcccaatctttgaatatccctcattc

SEQ ID NO: 327609 - DNA, 1397 bp, Cannabis indica
atatattgtcaaatttcccttttgtaatgtgacatatttgtatcataatttggcatacaattggagtggactttttttttgaaagaaaacgtggtaccattaaatatcaactgttacaggagtacataaaaatttagaacaaacatctgcccaaacatgaactcccaccgaagtagtacagattttgtatttgtatatactcttataacaacaacaacaacaacaataataattgttatagtgagaaatctcacctaaaaacttgagactaggctcctataaaaatgatacgtggactcactctcctcgaggaaggctgagatgttattaggagatctcttgagtgcaaacctcgcctgaaccagattcagcgggatgatgtgaccttgacagtgtctagttgcattcgagtagcttgcatgaagcaggactgaagatcaggttgcgagaaatataaagatcttcctgcgaagaggtaaagatcccttctatactcagcgagatggtccggatgatccaacaacctcgatagcccgatgaagactcgcatgtcttaagttatcaacttactgtaggatcgatgtccgtataagtgactcgactcgaacagacgcagacatcccaaactcgattagtcttgtgtgtatcttaagcctgcgagcttatgcgagaatctgaacatgcaactcgtactatagaagtcgcatacgttgcttatttagtaaattgggccaaaattattcttcatttattttatttacgttttttattgatttaaatgttaaattcaacgtacaaacggattgataattaattcaatctctgtgtaatcaaaggacacttgctttgtatataaatgagcgatctaatgaaataaacaagacaaaaatcccttacaacagtggactaagctgactatgatctgactggaccactatattttcttgtgttcattatatttccaatacgtctgtgtgttcataacttgaatactcgcacattttcttattatatctttattatattatttattttaatattgtctaaattcatccaacaataataataataattgcaattgccaaagctaagtgcatggaccataacctacttactgctaagcttagactaaggtccatatactatattcattattattttaaagtgttgacattttttttcttcttcttttaattttttaaatttaatttgtgaataaatcataatgttttctttatataatttttaaataataaataataataattcttaattcaccatgtcagtgtaacatttataaaactaaattatcaatttttttttctttctgaatgaaattgcattatatcaattttaagagataaaaattacacaaaatatattttcaaaaaaaaaaa

SEQ ID NO: 327610 - DNA, 686 bp, Cannabis indica
cacgcattgtttgaatcatctcagatattgattttttttttcttattcacctactcgaaaatgagcataaacaagtgaattcaggatgattaataatgcaaatatttgctctaaattcactcattacttaatatcaccaatttcccttagcagaattatgtctaacacgcattgtttacatcatatcaaatattgattttttcttaatcacctactcaaaaatgagcaaaaactagtgaattcaagatgattaagaatcagcattcaattcaacgttcattcaagcaaaccaaggatcacattccactaataagtgactactaaggaactaaagcaaacttctttccttacaatgcaataactttcatcaaagtaaacaaaaacaacgaacagtatattacctctgacaatatattacgctcaatatcttcaggattcgccgacgttatacccaaactactcaacagaatcctgtcttcgtcttcctccatagtatataaatcaatttcttcactcaattttttaaaatcattttacattactatacacgaaatcagcacctgaaattgtacaaattttcaaagcattcaactattcatacctaaaacacgtaaaggttccatcttttacacaaatattgaagaaacatgacattgatcaaataaatatacatatacatatacata

SEQ ID NO: 327611 - DNA, 2402 bp, Cannabis indica
aaaaagttttttagtttttttttttttttaacaaaaatggatctcagttcaattaaaccatagaaaagataactgggatccagtaggggacatccctcccctttaaagttacaaccgccaagagtagggtctcttgcttctttagctagactatcaacaaaacttagaacatttcgattaacataagaaaaacgaatctctccaagctttcttcttcgagccagtatttcagtgaaaagaggccaaagtttccaatcaggtggcttctcaatagcaagagcattcaagctaacccgagaatacagaaaacacagcaaaattgttccagtttctttcttcagcccagcacaacgccatatttaaggcttccatctccgcaccagtagcatctgcctgtgatcctttaaaatatttcccttcccaaataccactgtcgtagtcaatggcgacgaacgcaccacctgactttccatttttaaaggactccatctgctattataacttttgaggtataaggtaccttaccctcaacaatcgagttcttcaaagagcctacattgtgttcatttctattcttgtaaaggctttcaaccatctcagaatgcctacttttgacctcagctaggatcacttccagatttatggaaacatcaacccctctgttcagcatgtttcttcaaagccaaataatctccataacagaagccaaccaaattaaaggcccatccatctttgctgctttcagaatggtgatgataccagaggcaaattcggtaagatcagaccctacaacttgctcagagtggatggggacagggcccccaaaccagattgctctggctagtgtgcatctgctaaacagatgcaaaggagtctccatactatcattgcaaaagaagcatccagttccattatcacccccgtatttgtttcgagtaggcaatgcatccgatatagccctccacagaatcatactctgtctcgtgtgaataccagaatgccatatatctttccagagcaaatcttttccaccaaatcgcgctccttggcttgatacataagcactttttaccgaaaagctaccagagtttgaccccttccaaataaccatgtccgaactgccttgatgattaatctggatcaaactgatcttgattcctaactcctccccaaagagaaatttaagaaaccccacattccaagttcgagttcgacgatagagtaaatcagcaactgaacgtagagcaggagctttaaatcgtatcccttccataatgtccctgaattcagtatagtttaaccatgggatccatggttgaaaccatatatcgatgtcttccccattatggataattgtgtttgctctttcaacaatgatacgtctcgcctcaagaatgcccccccaccccggactgtccgaagctttaggagaaacttgccagaaggattcaagagcaaaatatttagctttaagggatctaatccacggtctttcattgccacaagccagcatccacgccagtttagacaaaagagccaaattgaaatcttcaaatcttctaaaacccaacccaccacagcatttaggttgacagagagaatcccaagatttagtagcaagaaatcgagagtctttgagatgacctttccaccaaaatcttctcacaatggcatccatctctttagaagaggaaatcaggagtttattcgtcgtcatagtataagcaggaagagccatagcaacagaattaatggagaccattcttcctgctatagaaagagttttcatcctccacccatcaagccaagaaaggagttttgatttaagaaagtcaaaatccttccgacggcttctagtaaagagaaagggattacccatatgtttctcgttgcccctcattgtttcaatacccaatttcagagaaatctcatttcgaatagaatcaggacagtttctagaaaagaggatacctgattttggtttactacatctttggccagaccaatcttcaaaaacctttaaacatttgccaaggttctcagcctctctactatttgctctgcagaagagaatcgtatcgtctacgaacatgaggtgggaaattgccggagctcctctcactagttgaataccatgaatcttccccagttcttgatctttagaaataattctagataagacatcattgcacagaagaaaaagaaagggagatatcggatctccctgccgaattcctctcttcggactgaatttaggaagaggtttaccattgagcaggatagagtaagtcacagaagatactcactccataatcatcttgatgaaatgaggactgaaaccgtagggattgaagaaccttctctagaaaactccattcaagcctatcataggctttgttcat

SEQ ID NO: 327612 - DNA, 646 bp, Cannabis indica
catccccaagaaagctgtccgaggggagaaactagctggaagacagataagctgaatgatccaggggaatatgtgcagaggtccggatcccatcctggaccggtctagaaaatgacctaagttggaaaaataaaagcccttggcatgatcaccccaccgggtagcgggcattctaaagctaagaagacgttcgtcaaattctataggcctacatcgggaataatcttgggcagaagggacatgatggaccgttaagggagacttgccagatcctgatgtgctggcatcaggagccccagtgttggggaccgggaggagcatcttaggcagagaaggcgcctgttctttccccgcttttatccaaagggttctctcagcagcagcgtgagccttgatgtaggctagctcttgttccctcctaaagaggtactttttggtaccggtccttcaccgaggcaatgatgcccgcccggagtgccttctcagcttccggggtacgaatttttgggcagaggaccttggagagattgaagtcgtctacgaattggctccccgagatgagcttggccttccaacagttctctgttgtgaccaagttccccacgttaagaccatttttgtcataagtggagaaaaccttggcatg

SEQ ID NO: 327613 - DNA, 877 bp, Cannabis indica
acaattattttttaatatgtaggtaatttattaatattttaactaatatttttttaacacaaagagtttaagtgaaattttatattttttcattttattttgaaaattttgtgagatttttcaattttttttaaaagaaaactataagttgcgtttagaaaaataaataaataaactgaaaaataaactacacatataaaactatgaatattattttttctacaaataaattatatctaaaaggctcacatggttaaaaactattttaaatattactcatgtaggttatgaataatgtttttattatgtcattttgatctattaaaaaaaaatagtattatgagtctcgaccatctctccccctagaggcaagatggcctagaattaatcccagcgcatgatgaaattagacaaacgcttttctctttggggagtatgaagaccccgggtcctcatggtatgtcagtcctgttctttaagcactactggagctcagttggtatggacttctgtgaggcagttgtggatttcttcaagtcggggaccataggggcattaatgcgacaaatgtaatccttattcccaaggtgcccaattcgaaaaagtatcgcagttcagacctatttctctttgtaatgtggtgtacaaggttatctcaaaaataattgcaaacagaaccggtcctcccccggttgatttgccctacttagatggcttttgttcctggtcatagtattcatgataacaatgtgttggtccaagagatcgttcatttgttaagcttaaaaaaggtaaagaaggcctcttagctatctaaatagacctagtgaaagcttatgacaagttaagctgggaattcattgatcacgtccttcgt

SEQ ID NO: 327614 - DNA, 1189 bp, Cannabis indica
tccagaagttcatctcttgataactctactcgttgttgatcggacttgcaataacataaaagtactgtatacaacacaatagaaactatgaaaaatcccctcatacctatatcgatctatgtggaaagattttatctgcaatacaaatatacattcaaattagctaaagaataaaactaaatctaccaacaaaaaataaatgatatgaatttcagtatattttaattcagttcagaagaatcatgcaaatatttatagatgtatataatataccagcaatagattaatatgatatatatgagagtttcaatatttgaattagagaattgggtttatatacaagctaattaattatatatgtaattgaaataaaaattaataaatatttaatttttttctcaaaaaatatttaatactaatatacgttacaaagtttgaaaatacataaaatggtatgttgtgagagagtttcaatatttgtaatgtttgactgaatttaatattatcactaaagaatgaaattaattaatttatatagaaattataaataaatattaattacactattctgtaagaaatagtcttagctgtatttgtatatttgtaatgttgactttgattttgatattttcaatagaaaatgaaattaatgtatatagaaactacaaataaatattaattacactatttggtaagaaatattctaagctgtacaaatattttcatatttttattttttttttgcttttggtcaattattagttatacaaaaaaaaaaaattctttttcaagttttaagttattttaagttttattctctccatataaatatttaaatttaatttttaaggataataatatttaagttatattcttaaaatttctgtaagtatttgcttgctaagtttcaaatgaatgatcatgtagcaatttttgattggtctatgcattatttttaaaaaattaatttaatatacttaagaaaatgacatgtgaataatgacttaacacttaatgtccaggtacctttatatggataggagtgttcatcaaaccgctcaaatcagccgcaccgccaaaaaaaatttagtttgaaattctttgcagtgcggtcgcggtttatatttttcataaattgcacggtgcggtgcggtttgcaattttaaattgttaatatgtagttcaaacc

SEQ ID NO: 327615 - DNA, 636 bp, Cannabis indica
tttgagttgttctgttttgtgttttataaaaacacagtatttttgaaaactttccgtgtgacagtatttttgtaagttttccgaatttttataagataaattaattctatataattatatataatgatatataaatatttaaagatgaacttaatatcgatgttatactatttttggtacaattaaatattaaattttaaataattttacatgaaattttttgtaaaatattgctaattatttttaaactaattatttttaaaatactactacgtgatatctaataggaatgttaaaaaaacactagtggtatttagtattctcttatgtgttaatattactattaatgcaattaagtattaggtttcataaatttaatgtaataatttttatatcatattgcttacccatcacaaggtgacatatgtttagagctagacactattaatgcacaataacaatactctaataattatttaaattgtaggtacaattaatattgattgaccattaatcttctaattaagatcatctatagatatataattagactttatattagaaataataattatacacttgcaagatgtaataaataaacatatatttaaccaatttggttttgttttttttttt

SEQ ID NO: 327616 - DNA, 587 bp, Cannabis indica
ctaagtgtgatcacctaaacactatataaaagagtctaatgtgctcatttgaatgagaaattttctataaaaaaaacacactactagaaaactataaggcttgataattgacaaagctattttcatgagagttctctccgtacttagagattgtgggaaataagttgttggacaaatgtgtataataatttgttcaaattatggtgatcctcactaatctacattaattgtgagtgtatatatatatttatatattttttttttctatatatatgtattataatttatattacatgtattgtattcttttttttctacttttcatatatatatacatacaatatacatatatagtgtatatatgtgtattgtaataaatttaaccaatctccttttttagtttttgtattatttttacaattgggttgtatatttgtcaattaataaaatctttaatgtattatttatatcaatatatcgagcttatcaatctaacacgagataccacacactataacttgtggaacccggtcatatatatatatatactagatagatgttacgtgccgtcacgtatgttaatttta

SEQ ID NO: 327617 - DNA, 1037 bp, Cannabis indica
tttggcctccaatcgggtctcgatggtcaaaaaatatttttatttcacaaatagctcacattatattcacacatgctatataaatctccgtaattaataaattacgtttatttatccacttataacaaaattaaaatttatgttgaaatagattagtaggatcataatcccacttattacatgattaacccataatataaatataaatcctaattatttaccattagacttatcggaatattacaattacgctctagaaatttctccatttagtgtaactggaagttgtatttttctcattggaagcaatgcatctccattgaaaccttggagttgaactaagcaagatgttaggttggtttgcaccaggcctatagcttgaaaagctgctttgaagagaatgtggagagaactccaattatccacaagaattttggacactctcttatttacaatttgagctatcatcaccaacggctcattgtgtggaaaatgcacatgcttagcgtcatcttctatgaaagttattggaagattcatcattcgagatcactgagcaattgtttgtacaagattacatgattcatcctattccaattaattcaagtatcttttttgagcatttcacgtgcttctaaaaatatatgggcctccagatatggttgccacatggccatctagtgttggtggagcaaccccaggtggatatggatttcaaggtccaagaccaataacatgccttgccactggggcattttgtgccccaaggggcatgtatagttggagcttgtggaagacctactccttgaggaggatttacggatttgggctttcctggaatatagagttgctcatgtgctactccctgaccaggatagataattggtatcctcacccaattagctaggtggccgttttgaactaatccttcaatttcatgtcttaagtaggggtaaaaatcggtcgattatggtcgaattttacaattttacaacccactgatcggttacggtttttattttacgaaaaccgtaacc
